United States Patent Application Publication US 2018/0305689 A1 - sequence listing, part 130

SEQ ID NO: 1881617 - DNA, 4001 bp, Homo sapiens
gaactgaagacaaacagagaacaaacacatgaacaaaagaaagacaataacaagaaagtgcatagacccagaacagaaacaattgcttagtcactcatggctatgggttttatcaactccttagcagagaaaaaaaggtttttttttttaactcaattggtgtattgttttataatctgtttaacatagacatattaaagttagttatttcctaaactgaatgtggtttattctgtagtgtgattgcaataattgtcaattaatcattttactgttaaaaataatatctagattggtcttgcagtttacttgtgtcctcacaaatggaatctgttctagaatgcatgcctggatatggccttccactgttgtagatgatacccattttaaaaaaagtaaaaaagagcagagataatcatgacctttttgaatggtactattagtattaatatcattgttatttaatacttttgaaaaatgctaagtgatgaataacttaagacagtcatccagtagagtgaagaaaaataccggttgacaaaatcatcagggaaaacgttatcaactttcacaaactagtaatagtaggacctaagtgattttatataagcatatgaagtatatattgcataaatagacattagtacacattagtttctagttcaatattaatttcctatatattttctaagtgacatgcaatctcaataattttttttattgtttttccccttacttccttttagaattatgctgcttgattttggaaagaattgtgttcttatgctttgtttaacttttgctaaattctttcctaaagaaataatggccattatattacatgtcaaaagacacgataatcttgccatattcctaaaatgttgctaattttgccaattgggctgtaaaaattccatcttcaaatgacattggaattgatacaagtaatgagaaaattttgaagaaaattagttaatttaaaacactcttttattagtgctttctgtgagcatttttcagaaaaatgaaaaacttaagtatcacttcatccaattaatttttgccatgtcagtgaaagaatactcttttgagattatgaatttgaagatgtatgaaattcaaaattgtaagtcctttttggtagattttccatttgcaaataatttaaaatttgtttcctaggtgacaattcttcaaaaaggagttcaggttgaaaccttattatagaaaccatgacagagacacggatttattactgcaggagaaaaataggctacccaatttacaaacaggctgtagttttcttctgagatttagggatgcacttgggctttaatatgttgtttcaattgaaatatcttctctatttcaagcagataggtaggtgactttgataaacaagcataccttgaagatatttcaggcttggttttagaccaacacaaaacaagggaatatcacagtaaaaaggaagtcacacaattttttgtcagtttcccagtgcatatacaggttagtttatatactgcagtcttattaattgtgcaatagcatcatgtctaaaaatgcacatagcttagttaaaaatactgtgttgctataaatctctaatgaccatatgagccttcagtaagtagcaatctttttgctgatggacaatcttgcctcagtgttgatggctgctgactgatcatggtggtggttgctgaaggttgatgtggctgtagcaatttcttaaagtaaaataacagtgaagcttgccacatcaatggacacttttgcaaaatatttctctgtagcacacaatgctatttgacagcatttgacccagagtagaacttctttctaaacgggagtcagccctctcaaaccctgttgctgctttatcagctaagtttgtgtaatattctaaattctttgttgtcatttcaacaatgttcacagcatcttcacaaagagtagattccattttaagaaaccactttctttgctcatccgtaagaaacaacttctcatcccttaaagtttcatcatgagattgcagcagttcagtcacatcctcagggccctcttattctaattcttttgccatttctaccacatcttcagttattttctccactgaagtattgaatatctcaaagttatctatgagtgttggactccccttcttccaaactcctggtaactatgataatttgacctcctcccataaattacaaatgttcctaatttcatatagaatggtgaaacctttgcagaagatttttcaacctactttgcccagatccatgagagaaatcactatctctataagctatagccttatgcaatgtagttactaaataacaaggcttgaaagttgaaaaatactccttgatctgtggactgcagaatagacgttgtgttagcagacacaaaaacaaaatgaatatcctgagcagtttaggccaaaatgttggattataagcacgtcatgtgcactgccctcgtggagaggaaacaaaagggttagtgaacactgacgctgtgggtcgaccatctgagaaaccacattaggatccacaaggcagcaagggaccatggagagcagagaagagtgaaactggacactagcctgtctgagctcagcacagagccaggaaaatctctccaacatgggaaagggtgaatgagtgagacccctggggggattcatgatcttcacagtgacctgagcaagactgggaatgggagacttctgcccccaccctacatctccccaccatccttctagcctgaggcagagagctacccagcactttgcaggagcaactctccagtcgaaggggacctctacaatctttgggccccagagcagaccaataccaatatggcagcgcatcatcaccttagccccagtagaagtcatagttatggtgtctgggagcagtaagattgctccactcccccttgctggacagagcttggcaccagctttcagcccaggagttctgctttggcccgaactcgaccagccagtccactcactcccaccactggtaactgggtgggcaatgcttgcttgagcttccggcccagcggtcccacttttttgtgagctcatatggagggcacagcctccagatatcctgggaaacacctagatggcagggcctgtagactcacccgccccttccactgatttcccagaggacaatgcttgctagagcttctggcccaggggtcctgcttctatgtgaactcagctggagggcacagcttcctgttgtcctgggaaacacctgtacaggaaagcatgtgacctcacccacccctgccacgggtagccaggcaggcaaccttgcttgagcttcttgcccagcagccctgcttctgtgtgaactcagccagagggcgcagcctcctattgtcctggaaaacacccagatggtggggcctgtgacctcacccacccctgccactgataactttgtgggcaatgtctactagagcttcctgcccagtggctccacttctgtgtgagctcagccagagggtacagcctcctgatgtccctggaggcacccagacagcagggcaggcaaccccacccacccccaccaatgtagctgataggcaatgcttgcaagagcttatagcccaggtggtccagcttctgtggaaactcagctggagggcacagtcacttgttgtcttgggaaacaacaggacaacagatcaggtgaccccactcatctccaccactgctagccaactgaacaatggcctgttaaggtttctggtccagtggtccacttctatgtaaactcatctagaggaggcagcttcttgttttcccaggaaacacccggatggcagagcaagtgatcccaccacccccctcactagtagccaactgagccatgcctgctagagcttcgagcccagggggcctacttctgccccaaggtgacagggtgggtaactccactcacccctagcctcttgtagcccaaata

SEQ ID NO: 1881618 - DNA, 4001 bp, Homo sapiens
aacgctcaacactactgattattagagaaatgataatgaaaaccacaatgagataccatctcacatcagtcacaatggctattattaaaaagtaaaaaaaaaaaacagacgctgatgtggttgtggagaaaaaggaatgcttatacactgttggtgggagtgtaaattagttcagccatcatggaagaccccgtgacaattcctcaaagacctaaagtcagaactaccattagtcccaccaccccattgttgggtatatgcccaaaggaatataaattgttctattgtaaacacaaatgcatgagtatgctcattgcagcattattcataatagcaaagacatgaaatgaacttaacttaaatgcccatcagtaataggctgtataaggaaattgtggtacatatacaccatggaatatcatgcagccataaaaaaaaacagaatgagatcatgtctttgcagggacatggatggagctggaggccattattcttagcaaactaatgcagaaatagaaaaccaaatatcacatgttctcatgtataaaagggagctaaatgatgagaacatatgtacatgtagcggggaacaacacatagggcataatggaaggtggaaagtggagggttggatgagggagaaaatgaggaaaaaaaaactaatagttactaggtttaatatctgagtgaagaaatagtctgtacaacaaaaccccatgacaaaagtgtacctatataacaaacctgcacacgtaaccctgaacttaaaagtttttaaaaaagaaaaagaaatagaaaaggaaaacatttatattattaatgatgataatagcgctgctgctgattaacaggatacttattaatctcatctattatgtgggttagtaagcaatgccacagagatttctgaaatgctaaccacttatgaataacttcccaattactttttccttcatcaactgctgggaattttctgtgcatttctttgttcctcctcatattttattttatcttcccattgattgacctaaaacttcatccttctcaataccatatgaccaaaacaaaaatgaagtgaaaaagtgaacaatattagagtattgactaatctttttattaaaaatatcaaaagctgaaaaacttaataacaggactgatggagttaactatatcattcagatatggtgcacacgtgtcaatctgaagactactttgctcttcgtgacttcaaaaagtagcacactgagacttctctatgtaatttcctttttttaatgtcctaggatgctcatataaccacagtggaatctaatgcatatacacgtcttcttttgagagctatgtgtacattagtgaggctttagttttcttggaaacattatacagtgaagcaaccaaattgtttcaaacattgctgattaacaggaaacttggagaacatgaaacttgttaccaaactaggaagtgtccgggagtataatttatatacaccacaatatgctgcaagtgtgtttcatgttatcctcattgttccttccatgcatcttctttttaaaatgcaatcactccttaaatgaaattttttctggaaatattcatcaggaaaatattacaatgatgtcccataaatttcggcctcatttctaagtggtactataaatttttggctttatcttttcatttgaatggtatttagaaagtcttcttaagtatatttggaatccgaagagcttcatcgtttgaaatgtactgttaaaggttaatgactgttagtcagggttcctagggaggtagaacatataggatatggagatagttacattagagaagatttattagcggaatgggctcccatgattatggaggctgagaagtctcatgataggccatctgcaagctggagaccagggaagccagtagcacggctcagtccaggcattcctcaggtggtcagacttggactgagccatgccaactggcttccctggtctaggcaatccagtggtatgaattcagtcccaggtcaaaggccccaaaacagagctgctgttgtgagccccagagtccaagagctggaggaactggagttctgatattcaaatgcaggaatagaagagcctcttgctttggaagcaagaaagagagcaatagtttgtccttcctttgactttgttttccatctggaaccccaaataggatggttcctttctacactgagggagaatcttcctcactcaatccactgactcacatatcaatctcctcaaaaaacaccccccccgacacacccagaaacaatacttttccagctaagtattccttaatctagtcaagttgacacctaaagttaaccattgctgattttcacataattattaaaaataaaaatcattgaatgaagttaaaagtaatgaatgtatgcatgaaaatgatacaaataattcaattaggaagtccacctaagatacaatttaggattgtaaacttacacttaaggtcttagtgaagcatagttcaaaaaaaaattttttttttgcggggtgggggaagtcatcatttatttgtcttttacatgaaaacagatttgggggagggagaagcatagtttttatcaaattctttcttatttagaagtaaccttcatagcctctgaaaataaaattccacattaccatttttaaaatgattatttccaaatgcttggcaatttctgggaactttagaaccttcatccactacattttaagttaacacaggtattatcaaacaaatatgccagtcacttcaatcttttatacaaacattaataagtaaagacaaaaaaaatttcctagcatgaaagaatcatgagacacagtataataccacttggaagtacaacagtggaactcaacatgagccaatctcagctcatcagcattgccatgactgcaatgcttcactttgttttatgagctacctagagccagatgctataaaattgctgtgagggattgcctactagggacttatgtaggccatgccaggagtaacacagtggtctctttatactactatccatgtaataaacattctgtacagcagagtttgggaatgtaggaagtgttttttaaattatgtcctaagaaagcatttgtcccaaacactaatattcattctaccacacaattccttagaaatctcattcagcattgccacacatgtttgcaataatagcaattttgctggccagtgttctcaggaccgacagcacaaacatctatgctggcagagtaggcagcaaccatcacgtgtttggttgcttgattccaggcagtttacctcatttgtaaataggactcacggccaggaattctggtttgcaagttctctcacctcgtttggaaacatttaattcattctaacaatctgtctggtgtacagaaagaaaacaatgttctagtgcatcctgccatttctttgaacagccacattccatattttacttctttttttctcattttctatagagttgatgaagcaaagctccccagtggataggagcttgtgatttatatgaaaacaagcactaaaattcaatgtaaatagatacacctttgggaaaactttgggaagctttgagaaagatatcaatcaattatttttttaagtaccaaggttcatctcatgaaaccacacattaaataaaagcctgtgtttttggtttagcgctaatttcaccggaacatcctgtggtgaagagtctatgattattgtgcccatacttcttcagagaaataaaatgaaaaaacagcatccctttaattttttattttataatttctatttgggtctatttggatataatttataaatccataaagtctacttggtacatttaaaagttgttttaactgtgatcaagtagtattaaccaaaatggaataaataattttttttaaaaagttagtttattttggtccttagtatcctgagcaatccattgtaacaatacaagctga

SEQ ID NO: 1881619 - DNA, 4001 bp, Homo sapiens
gctcatagactaattaaatataacagtatctagtaactcagggagacattatgctttttaatttattaaacatactaatttaaaagctcatgtacatttacttacgtggtattaatatatttttgtgttactgccttgttagctgaaagctactttttattctgttggaagcaggcaatacttcctgtaaaaattttatgggtcagaactcagtgaattaaaggtatttttcaaatttattaataaaatttctttgatttttaaagcatgtattgaccctgatgatcactctacaatagctgttatgggaataacatttaattttgccatgcaaaactaccgatgatgtattttaaatagtaagaagcatcaaaagtcgcattagatagttttaattgaaaagaaaaaaaactcacttaaaaatattttatgtaccagctcaacataacacatgtacatcatcactgaaattttactttgccacttaacattttctgtgatttatctaatgaaattagctaatgtgattttattattgcaatttctgctataaatcttacaggagctttgtggttttttttctttttacttggaaaaagatcaaaatgcttgcagacttcagattgctattagatgtaataattatacactaaactaattaccattaaccaaaacctgacttacaactaattaaattttattacatcatcatagagtgtaggctttcaatttaacacagggcacaactataaacacaagagtctatcagcgtgtatatttatttcaagtaaaaggcgtagatcagatttataaagtttgaatttggcagggtttgtaaaccaatttgtcaatttcacaaatctgctaatttgccaacttctaaggagaaagaaaggtgctacttgcaaagcaaatacactggattacaccataatagtttagacaatagctaaatgcatattatacaaatataactacgttatagaagaaagtatgaaatgcaatgaaaaaatcatttattttcagttcagaggtacattctatttgtgacatcacttatctgacattaccgacatacaaattgccaagccctagtttcttctgtgcaaaacaagtaacaacatgtatgctatcttaaaggaatgaaagacatatgaaacacagaatccttagctgacatgaaagtgccaatttgtttactgttcaaggaaccaatgaagatcaaatggcaaaatcagttgcgatctagtatgcatctcaaaacagtggcagaatctccattcattcttcaatgaaagtacacttaaatttgtcattcacaacaatcggaaactataagcgattcactttataaactttaattttataaaaaatgtttactttctaccagatggtaagattaaattacaaaaacactgtcagcaagttgaatcctcagatgtattcattcccaccacagaagcttcaaaacctgtctataattttgttactgatgtttagaaacagctgtagctgacatagctacatgttatatatgtcagctttaaaggattaaatattcttaacccccacaggagaggtcttttgctgttaacaaacgccaatgtaaattacaccggaagttattactgtagtagagatatctcacactacattatttggtaaacaaaatggtcaagagtcacacgtttctcattattactggaaattctgtttgacttgggcaaaagaaagattttaaattcacagcactttctgataataaatataagataaattctcctctaaaaagctcctcacatatatcttcattcatattttaggtggtagtaaattatatatttttctcttcagaagaattcaatccatctcaggagacttcttttcctcgtgcagatttttacttgaatttttgggagaatcctgctgtctctcccattagagttgaaaagtatctttacaataaacattcaaaactaatggtagaaacagcaggatcttctgaaatgctataccccaaattttgtactcagttaagctatctaaaggaacagaaccaacctgactcgccagactgcaggcttcaaaaatcacttggtttatgaattaatctcattaattttcaagaaccacagattaatagtggtcaaatgtacagatcttagaagatggcattcattcacacccacgtgtgtgtgtgtgtgtgtgtgtgtgtgtgtatggcatgattatatgacatatatctgtccatatacgttttccctcatatagctgtcacttttaaacatcagtcactttggaccatgtgaatgatttttttaagcctgtaagtatacatataaacaaatattctaaaaaattgggcaaatacaattaattgtatacagtgtgttattttttcagaacatatacatgaatttttttcagaagatataaatgaaaaatggccaacataaatgaagagataaaatgggctaactgttgagcagcactaagagatatccacttagagaagaaaattcaacacaaatttccaaaattaatgcaattatccatacctataattcatgttcatttaaagttacatcttaaacttttatatacagtataataattttatgcaaatgactatggtggggataagtctcaatactatattaacaacagagacttttagagatgctgaaagaaacctgtaaggtgaagtttttcatttcttttaacagaagctaatagaagtatcagcagcggtttcatagagatccaggagcttaacacaaagcctgggtgaaaaagaaataagtcaataattggagaaaacgaaggctagtttcccagagagaagaaaatacatatgtgggctgggcacggtggctcatgcctgtaatcccaacacttttggaggccaaggcaagaggattgcttgagcccaggtgtttgagatcagcctgggcaacatagtgagacccagtccctataaaaaatagaaaaattatccaggcgtggtagcacatgcctgtagtcccagctactcgggaggctgaggtgggagaattgtttgagccccagagatggaagctgctgtgacccgtgattgcaccactgcactccggcctgggtgttgcagtgagaccctgtctcgaaaaaaaaaaaagaaaagaaaatatatatgtgattaaaagtgaagagtagagtgaacatagctttggggtctagtccctttagtttataactacatgtaactcacctagctctaatcgagaggtgtgacgggatgaacagaaattcaagtttgtcctttttactaaatatcgttataataatatccaaatttaatgcagtgattaatattctgtatcataaaacaattatagttctacaagggaatttacttatttatttatttatttaagacaaggtctgactccgtcacccaggctggagcacagtggcatgatctcagctcactgcacctccacctcctgggctcaagtgattctcccacctcagactcctcagcctcccaagtagctgggactacaggcatgcacccctgcacccggctaatgttttttttgtattttgtagagacggggtttcaccatgttgcccaggctggtctcaaatttctgggctctagcaatccaccagcctaggcctcccaaagtgctgagattataggtgtgagccaccacaccaggcctacaagaaaatttaaatgttattttttaatttttttaagactcaggtctacacaagaattctttttctttaatgtattctttatcaaattctacatcctgttatgcctcctgaatctaattgtacatttagactataaattagcataatcaatatactaaagcaaggcatttcatatgtatttaatacaagagcaaatatttattccaactttctgttattcattcaactttctactaattatgtaaaatttatacttctaagcctaatgagatgaaacaaaccttttgcagttttta

SEQ ID NO: 1881620 - DNA, 4001 bp, Homo sapiens
aaaaaaatgaaaagaaaatcaacgagtatactaaactgacttgtatgatgagtgtaaaggtaaagagactaggaagagtgaagaaaatgcctgttctttcataagcaaagacttgaatgggcaggtgttatcaactggactccctgtaacattcattgttccacaagcaaacacacttgatgatgaggaaattattggcccagtttaaggataaaggcaagttctgtatgtacttaagcatttctagtgaatcatgtgaatgttctgaactgggaaacttcaaaagcaatttgccttaaaaatattaggtaataaattatagtctatattataataaaggtccatttttgtcaggtctatattagaattctctagtgtttatatggtaatttgtccaatatagtcctttttaacaacattcaagcttaaaaagcttgccattgtcttcattggaatataattattaattttatgactatgttgtaagttaaatgcttagcatgggaaatttcccatgtttcagactcatttctttatgagagctatgaatttttatgttgtcagaaagcagtaactttcttgcagtatgccatattaaattgctgacaataacagattcatttctcaaaacaaatgcaagtgtgaatttttttatcataattagacattaaaatgtgttttcaatgacttttgaatgatagacttactttcaaaatgtctttttgcaaaaattggtacacatgataccatgaattttattagttatgtaataattgagcatatatttaaaatctgcacctccagagtggggaaggactaaatggtgctgatacaattgatcgaatatgagagtctcaatagcaagggtaatgtgggagaaaaaaatcatgtataactacaagtcatagataacagaaaactattcaaatctaaattaaaattgattttatataaatgttttgatttaaaatacatcataccctaggagcatatgtaccattctagacatgtcatacagaaacatagagataaaacaacagttgaaataacataaagtcatgaaaagtgtactacttccatgatgaccaggcaagcttctggtcattgaaatgatacagctgtggcatgaccagcattaatgacagtctctttcagggtattgtacatgtacatggtacatgtaaatttgaaataagggtaatttacatgatgtaaactaccttacatgtatatatagaaatatatatatgataaataagattagttttctagatttttgttgcttatatgttatctgtaaacatttttctgtttttctgatacatatgtctacattgagaaaaatactttttagtaatcttagtggttttgacaatatatgaatttttctttgcatggaagactatatggagtgagggcactttatgaagtgggccctatttctcttgtcctttcatactaagataaatgttatatagatagaaactgacctggattactcaggtctgaactcagatcacatagaactttaaccgttaaacaaacgaacccttaatagcggctacaccattaggatgtcctcatccaacatcgaggttgtaaaccctattgtcaatacttttatccgtagggtaatttattccgttgattgaattatttggtcaatgtgtactaactcgcttagactactgcagtcttagtttaggttgttcggaggttgaactatgctccgagctcaccccaaccaaaatttttaatgcagggatagtaggccagggcctctagacttgtttgggtttttatttgcattaatgaattaaagctccatagggttttctagtctcatttgtttatatccgcctcttcacagataggtcaatttcactgattaaaagtaagagacagctgaacccttgtgtgtccattcatacaagtccctatttagggaacaagcgattatgctacctttgcacggtcaggataccatggccgttgaacatatgtcaccgggcaggcagtgactctaaaactggtaatgctagaggtgatgtttttggtaaacaggtggggtaagatttgtcatgttcctcttactttttgcaatctttccttagagcataccttagttgggttaacagtgtaaataatagggtgcttattatatcatttattaatattaggttgttaactgtcagtgggttattccagtctgatgtaaacgtatgcaatggagaatgtttatattaacattattggttctattaagtaattgattagtccagtatgatgttaggagttcagtagagtgattagaattgaagatagttagatgttgagctttaaatgctttcttaattggtggctgcgtttgggccaactatggtggtagtattttttactctctgtaggaacgtcgtttcctagggtctacagagctgtccctcttagactaacagctaaatttacagggagagtaaataattctgtgggtaagtttaaagttgaactaagattccacgttggacaaccaactatcaccaggcttggtaggcttgtcaccgctagtcatgaatctcccaactattttgccacatagatgggtgtactcttcagttgttcttgggtagctcatctggttttgggggacttggctataatcctctgtgtaaagttacttctagttaatacattatgcggaaggtataagagcttgtctttgctttttagtgctttatatagttctttcacctttcttttacggtactatgtctactacaccagggtaaaaatttctatcacctatactttcgtttaatgtaaatggtttgattaagatagtttgataatatttttagcgaggtttggggctagcgttggctcaaagtgaacagatcatgatgaaatcttccaggtgtaagccggatgctttgggttaagctacactttggtttgtccaagcgccctttccagtacgcttaccatgttacaacttatctcctctgtatgtgcatagaaagtttttagtaatagtgatttctagagtaatatttgaggagggtgatgagcggtgtgtgcatgcttcatggccttattcaaccaagcactctgcgcttggtttactactaaatcctccttgagcccttagatttcataaaggttgttgtgagatttgccggatatagaaaatgtagcccatttcttgccacctcataggctgtaccttgacctaatgtttttatatgtgtacttgtgcttactctgtaacttttttagggtttgctgaagatggcagtatataggctgcgggcaagaggtggcaaggcggttgtatcggggtttatcaattatagaacaggctcctctagagggatataaagcaccgccaagtcctttgagttttaagctgttgcttgtagtactctggcgaatggttttctcaatgtaactattagagtttagggctaagcatagtggggtatctaatcccagtttgggttttagctattgtgtcttcagggtattaaagccactttcgtagtatattttatttcagctgtagttttttacaactcaattggagtttagctttattgagggtagaccttaattaaacactctttacgctgagttctgtcagctcgggttaatcatatggtcgcggtgactggcacgaaattgacctatcctaaatattagtatagcttagttaaactttcgtttattactaaagatttatcactgccgtttcccatgggggtgtggttgagcaaagttgttttgagctgtattcatgcttgcttgatacctgctccttttgatccgggtgacctagagggcattttcactggggcagggatgcttacatgtgtaatcttactaagagctagtaaaaaggccaggaccaaacctctctgtttatagggttgtgcggatccatctagacattttcagtgtcttgctttgaataattaagctacattaactgcataaattcttaagtg

SEQ ID NO: 1881621 - DNA, 4001 bp, Homo sapiens
aaattgttcatagcaaccttgctggcaggtactatcagaaggtaatgaatttgagcttatcttattttgcagaccacgtgttaacatatcataatatgagcaccatataaaaatgcatatgatgtttttctgtgcagtacattaggaagacccaagcttttggatgttgcttttttcttaaaaaataacttgacatctaattttcatttgttgttactttttaaattatgattttatagattcatttggttatttttaaaatgtgggctatatttgctcaaagaaaatatttcaatatttaaatatatttcagcaatgtataaatatagtgaagttacattattttgtttaatgagtgatacatatgcttggtttaaatgtgtaggaatttttttctttcacaataatgtatgaaaaatatttcatttcttgaaaggattgcttttatattgacttgaatttttacaaaaatatctgtttttgtctagctttaaaatctttttatttcttaaagtgagactatttcttattaatgaagtaaaagttaggaatcattttctctagattatttaggaaaactgctatgaaatgtaaaattccagaacctctttttacttgatgtagttttgcaaacaaaacaattttactgaaacttcccacctaaaaacaaaatgctatgtctttagatatattctttcaagaaatcacgggggacttatattgatttcttcataagggaaaattaatataaatcaaaaataaacaagcaaccaaaaaaaactgaaatccagacttttctaactaaggaaggtaatgataaaggaaaatgaataagtgttttctttgaatagcttaatgagagtcgcaggaaaacaacgacctattttactattaaagtacttatctacaaaaaattgtaatggaaaaacttctgctgagcaggctagcaatgggtatcccctaggacccagaacacttaatgggttttcagttctgttctaaatgttttttttttttttctttttttgcctattctcaaccagtgttgtgcaaaatgtcaggttttcttcaactttcttttcttcctccttagaaactcttgccctttgtcaattgtttagaggcagaaaagattacatttccgtacaagaagtccagattagttgaagacactagaattcaaagcctgcaaagattataccaaatgtatacgtatgcatttttaaactatctagattgctcccaacctgtaaaatttcaacagactcaaattatatctgtgccttggaaataaaataggtgattaattagccattaaagtaggagaatcaaaagatcagctgatatcaggattaaattgtcttttaccccaagaagtacaattttaaaaaaatctggttagagaccgattaatcatgaagtgactcttttggagaagttttgctctgagtcttttagttttgataacttcatgtccttgactttttaaataacacaataaactagctaacttaaattttattttatttattgatatttatataaatatatgtctatataaatatgtttatataaatatatgttttataaatatgtttatgtaaatatagcaaatttatacttgctatcagattatctggtgcattgctgattgctctgcctttcagtgagagtcactggggaaatttatatctcaccaaaagaaaattctgtaattttgcttctgttattgattataaaactgagcaatatgagaaacaggagaaaactcaagtctacaagggaccatcagtcacttggtttgtctgaattaattgttatcttcagacaaccagtttgtgttgctctagcctgagtttacttactaaatttagaagcagtctcaagcattattactgcatataaaacatagacagctaattaccctctgttgaatattttaatatgctcctctgtaatacattttttaatgatagagaataaattaaatttatattacaggaagaaggagaatctacacactggtgcttcttaattgttgccaaaggaaacctagcaaaaactcatggattcaatgggagtattaataagccaatcaacagatggctaattgtaccactgaaaaatgcaaataaattaattctcacttgctctcatctattgggagatcaaagtagaattattagtttccatctcaatatatttatataatttatacaccaagatattttagtgaaataatctgaagtagtaaaagagtataaaggattattctaacattttgataccacaaagcatctccattttggtatagttctaacaccatcttatagtattaaacttgaaattcagagcaattaaatctttgttttattagcttatttgtatcaggcaggttacaacggcatgctatagtagcaaatcattccaagatctcaatggcttaaacaaggaaggtttctttgtcactcatgttcatgcccattgcagctctgctccacatcctcatcattccaataccccattggaagggggaaatctctactaaagtggttctgatggcagaaagaaagtaatgacggaggatctagaggatgctctgaaaatatttgctcagaagtgtcacatattacttccatacacatttaactagctaaagaaattcacatggccaaacttgatgtcagtgtgatgagaagtaacatttccctacaggaatagtttgtgcaagaacatatagcaaaaatctgtattataatgtggtcaattctttaagcatttttctaaaaccgatttataaaacttttcccccagtcctgaaataaagttcataagaagctcagaaaaattttgagtaaatacagcaaaaaattagaaaatattacagtaggttatgaaaaaatactgtcatatatttatgtcccttaatctggcttaaagtcataagaaactgacattatcattctaatactctccataagattgaggtaagaataggtatttttgttagactattactctgcttacagctctggtctaatacttacatgactacatttagaagagtttaatgagcatcagttcacttcctattctgatttttttttactcagtcacattgataaatacatggataaattatataaataagtgtatttaattttgaataaatgaatgaaaagttttagaaatggggaaatggtatagttgccccaaaattgtacataaataggtaagaataagaaatgtctgtattaaacccatgttttaatcctaggatggactcctttagaatcattggcaatattttaagagcatctcactgtttactaaataccaaagcagtgttagcacaaaaagacattgctccaactatgaagtcatccatacagcctgcaaatttgtcactcaacacaatgaagactaggaacgaagctccaaaatagagaactagggctggcaaccggctattgctaaagttaggacgtggctccaggagctcattcccagtgcctgaaggaaatgtttttgagtctttaaactcagaagaaaaagagtaaaatgtacatgtgttttaactgatatgtcatttgcaacaaagtttaatacttgagtaaatcttcgtctctgtatcatatcctatctctatctgctttatttcttgtttgaggatactagactctaatgatccatagtccctagccaaaaagagagagagagaaatacagtaattacacttcaaaatatattcttccttttgtattttgggactagaaatccaaaataggaaaatgtaatgtattactttgaagcaacttctaatttgatgtcttaaattattgtctcttcaactaagaaataatttaaatagccttcagacagatttggaagaaagaatctacacatgcaagaattgagtgctgaaaataaggcacctgtgacttaattttaaatctatttgtattttgctttactggctacgtatgtgctttcatgtattc

SEQ ID NO: 1881622 - DNA, 4001 bp, Homo sapiens
agtactattgtgctggaaggtatcacttgtttgtagtattataggtaataagcataaatccctatatgtctataaaaaataaagttcagggccttggttgcatggactccatgcatttctaaaattcctggagctgtgaaatagcttcatcaactaataggagtaaaaaaaaaaaaatcactataactacaagatagtgggtttctgtcaactctttgaaaggcattactttatttttagttattcaaattgctaaaaattaattaagtacaggcatgagtataggcacagtgagagataaacaataacacacaatccctgtcatcaaggagctataatctagttaaagatggaaggattatatacaaacaaacagacaacgaactttgcaaagcagtaaatgacaaataccagatggtgctatatataaacatggctaagatgtttagagaatgatgaggttttgctagttttttccctgaattgttagaacactaacattaaaggtcctcttcttataaataaagtcagtaaaggcaaaccatgcatgggcatagaatctgtaagtgctccaacaaacaccttagcacttagtatgtgcaaggtcctatgttaaggctgttaagtgtaaataccatcatattctgccttttcagcttttcttgcattgttcagaaaaagctatcctttctactttaatacttgataaccactgaatccttctgcccgtaagtcaatgaagtagtaaattaggtaagacagactccttgaatctattgatagtttacagagattgaaaatggaggctctcaaactactttatttagttgctataagaattaaatacgttaaaaactaagtacttagaaaacaaattgggaataaataatacccaataaataagcatcaaataaataccattgttattagtatgaagtgcttactgaattttgagagataaattagtttctgtacttaatcgtatggttggctagaaagatgaatgaaggtagcctctaatatattcttgtacaaaatagagttatgccaatgtaatgcatattaattaaaattaatgcaattattaataataaaaatggcaagacaaacattcttatgctttaatgctttcattccctccatcccaaccagaattttgttgggggatgaacttacaactctgcagtgtactggggaatgtgctccgggattttgttgagcttttgattagagcaatctactgtggttccttcacagcgacacttttcagggcaagccagatccgcaaagcagtctccacttaattttgatcgataatcttctgtacctattgagaattcaaaccaaaaaaaagatactgagtctaaaggttagaaaatttattagtttgtaggaagaaaaaagtaagataactatagattatgtagcagggagacaacttggggtattttggtcaatggatgtcaggagaaaggttaaaagaaaggcttggaattttctggaaaaaagagtgaccagattcacatgacaggaaaacattaataaagttgagcttttcacagctgtactttctgctgatccaattctgagtcattctagcctacttcacagctagtcacacaatggatattaattattaaaaagtttattttttttctcggagtcaagaattgaaaatatatccagtaataaacatgatcctatatctcattgtaaattagggctttcaaggcaaatagatatactcaggcttttaaattttctatggactttttactattctctccctctcacataatctcggagatgcctaaaaagccctcttttttcattttgattttgtagaaagagacaggaaaatcctgatttaagcctcagcagcttgtcatgctgtagaaagctgcgtgacgttccatggtgcttgacggaaccatgttttactcatacctcgcaaccacatggttagatcaagcacaacagaaaatctcgctacattatcactacaccaaccactaggccaaaggtaagaccaagaggaaaatggagggaaggaggagaaaagctacagacgttctggaaacgtaatactgtttacatgacatgcattcttcccgcagaatgtttatgaccacagtaagagtattactaccgatgatttcctggaaacacaaagaaggggctatatggaaaaggtgcctccaccattcctcagaactgcagaatggaaacaacagctttcgggaacaacatccaggaagaagttgaaggtgagctacaaggacaacagagaagctcaaaagatctgtggtttcttcttgaaaaaaaggtgccaaagaccaagactagaagaaggtacatcaggattgaaaagggagggtattatgtttcagatcagacacttttacttacagccaaaatggtgaattcctgcaaaagtaaagatcaccaagaaggaaagaaagagtaatcccaattaagattaatatacatatttataaaactaagctctcttccttctttctttattatgggaattattgaaaaaatagcatgatgtgatgggaattgtcatgctttgtaaaattttataaataatattttgaagcacggtggtctcacaagaaaaccaatgtaataaaagatgcatagtgcaaattaagttcttgattcctttaaaagatgaactctcaaggccgggtgtggtggctcacgcctgtaatactagcacttcgggaggccaaggcgggcggatcacaaggtcaggaagtcaagaccatttcacctgacgggtgaaaacccatctccagtaaaaatacaaaaaattagctgggcatggttgcgggcgcctgtagtcccagctactcggtgaggctgaggcaggagaatggcatgaactcgggaggcggaacttgcagtgagccgagatcatgccactgcactccagcctgggagacagcgagactccatctccaaaaaaaaaaagatgaactctctgcaagacagattttcttttatcactgtaatatgtagagtgccatataaaatggtagtagcgaggtacacacgtaaaagtgaatgaaaaactaatcatggagatcctcaaggacaatcattacaacatttggattaatccttatgttgtgatgtacactttttaatgaacttttcaacttataaataatgtgtcttagtggaaatggaatcagaatctcataagaagtttgcgatggtaaatataatcgtttcattacatttggcagttaatgccatgatatttactgaggatctggtgtcttatgatttatgcttcactccaaaatgaaataagagtgcacaaagtctaagtgacaggtacactggatatcttgcaattcaaataatctgcattcaacggaacagtaataatgcttattttatggtggcttgttaggtggactcaaattttaattaaaatttttggaaaaaaggggaggaagcccaaatgatccttttgagtcctggcttctacaattatcatgtttaaagaatgtaaattaaattatcataaattgaaacttaagacatgatatttgatataaaagataatttccaaatcctattttggctgctgtcagtaacagggaaaaactatatcagaatatatgaaaacaacctgacttttgttctttatttagtgaattggaaatattaaacttaccaattattaattaagtatatttaaatgaaatagtttgaataatttgataccaattacattactgccataattttaggatttaaatcatattaatgttttattctataggtagtctggtgtttagaatatggctttttctggttaaataatagctatcagattactttccacttaattgggtaaagtaattaatattaaacattgtcaatgaaggccaatcaactgttcttttcaacatgttacttgttatgcagccagtataataatatacaatgctattgatcattcaagctcaaaataagtc

SEQ ID NO: 1881623 - DNA, 4001 bp, Homo sapiens
taaaaaataaattcagatcaaatgttgttgttgctgttattttcatattctgaatgtgtggcactcttgactccttgaatgctgtgtgtgcatataggtagataatttatggagccgctgaggggattccctctcattctttcctgaccccaagtcaggaactgacttcccatgtgggagatgagatttagtacccagtacttcagtcgaaagcccataggcagatgttatggctctatttgcctcccaaagtttccttcaatgaaaggactcaaagggggcacaagttagttttcttcttagtggcccaaaaaggtgtggcgaggaaaagagtattgctgaaatatctgctttgaaattaaagaaaataagacatttctttagattagcttagaataatgagatgtgagaaggaaagtttaaggtatataaaatggggcaatttataatttgtcataaagttgttataaggatggaatgtgttattattataaagagcttagaatagttcctggcagagagtgatttttatttaagggttagatatatagttagtataatcttttggctacttttattatcaattgattatgagattgatcagaaaagacatttggagatagagtggggctggcaaatgtgatcccttttccccttttagactctaatttctctttgcccctcttctttttaatccttcaatctctctctcagacctatgacttgatgcctgtagaccctaggtagtgagatctgtgtgcctctgaggactatgatgcagcactccaacagaaatagcagaattctgaataagtattcagtcagcacgttactgtactaaatgctttaggcaactgttacacaatggcaagcatttgtgtatctaaacatttctaaacatataaaaggtaaaatatggtataaaagacaaaaaatggtaaacctgtatagggcacttaccatgcatggagcttgtaggactggaagttgctctgggtgaatcagtgagtgagtggtgagtgaaggtgaaggcctaggacattactgtccactactgtggattttataaacacagtgaactaggctacactaaattaaaaaaaaatcttctttcttaaataataaattaactttagcttaccatggcttttttactttataaacttgtatttttttactttttgactctttctgtaataacatttagtttaaaatataaacacattgtatcgctgtacaaaaatgttttctttctttatattcttattctataagcttttttctatttcaaagatcatatatatatatatatattttactttttcaactttcttgttaaaaactaagacagaaacatacacatagcctaggcctacacagggtcaggatcatcagtatcactgccttccatctccacctcttgtcccagtagaagctctattaagagtggaaaactggaaatagtaacacaaatggagctgtaatctgctataacaatgccttcttctggatacctcctgaaggacctgcctgaggctgttttatagttaactttttttttataagttgaggcagtataccctaaaatagcaataaaagtttactatagtaaatatataagccagtaacatattcgtcattatcaagtgttatgtattgtggataattgtatgtgctgtaatattatatgactggcagcactgtaggtttatttacaccaacatcaccaaaaacgcatgagtaatgcatttgctattacattatgatggctacgacgccattaggtgataggaatttttcagctccattttcttcttatgggacaactgtcacatttgtggtctgtcgttgactggaactttttcgtgtggttcatgactatatgatcaatgcagaagttataccatagattaaaaatagaaatgaaatctccttgatatatgagtacataatacatatatatgtatatacacatacatgcacatgcacacatacatacatatgttcataaagtatgtagaaagagatcttgagttggaaataagccatcgttcaggcaggtggccatgggttaaagctgtgaatttacaaaatggggaaaagggaatcagagtaaaaagctatgctattactccatatttaattttaattgtgatgggtatagaagccctttggcatgaaagggaaaatggtatatattttaaattttcatgccaatgataaatatttcacatgcattaaaacctgtaaaatatattgtatttacaggagcaagtcacattctagggggaaattgcctttcctgcagttgtatttttacattaccccaaatacctgtgagaaccaattagtctccacaacttgccatgttcctgttaagtgaacctggcacaggaacatccagctaatcctttggcagccttgtgtgaagtacttaggaagcctggtgtgtccttcctccaaccttacagcatgggagccaactctggccactgttggcctgttattgtgcagtggtgaatttctgacacaaaatgagttgtggagattactgaggaaggaacgcaaagtgattatgtggtctctcttttgggcctgatctttagaccttcagaaaaattggcctcaaccttacaaagatatggacaaggaagccattccaaacacgaagtactccattgtataaagtacaaaaatgagtaataccatcattaagaataaaatattctcaaacaagagcctactgattaagaatggaaaactgggctgggcgcagtggctcatgcctgtaatcccagcactttgggagtctgaggtgggtggactgcttgaggtcaggagttcaagagcagcctgatcaacatggtgaacccccgtctccactaaaaatacaaaaattagctgggcatggtggtgggtgcctgtaatcccagctactctggaggctgaggcaggagaatcacttaaacccgggaggcagaggttgcagtgagcccctatcgcaccattgcactccaggctgggcgacagagcaagactctgtttcaaaaaaaaaaaaaaaaagggaaaactggaaacaaactgcctggcctgaatcttggtttctcagcttactagctgtgtgactgggcaagttatgtaacatctctgttccttagtttccttatctggaaaatatacctaccagatgaggttgttgtgggattagactaagataatgttggtcatgcatgtaagcagagcctgtcacttacgtaagtatcaaccaaaaacctttccaagcaaacaaacaaggaaacaaaacttctgtacaaatcttattttaaaaagttataaagttatagttattcttaattaatggttgaatgagtagaattcagatctgttattatttttaaagaatgtagacttgaagtgtagaaaaggattattttaaaatataacttttcagttttggtgttctgtttcacagtagagtgactacagcaaatgccaatgtattgtatatttcaagacagctagaagagaagattttgaatgttgccaccacaaagaaatgctaagtagttaaagtgatagctataattactccaatttgaccattatactatagatacatgtattgaaacattatacccaataaatatgtacagttattatatgccattataaataaaaataagtgaagagttcaaaaaaaaccttttcaaagctttgaaaattttttctgaaagatcgagttgatcattattttgaagagaagaaaatgtttaacattttactcagtaattttatggacagtaaaccaaatgggcagtcctttggttcacttctctctgtgcccagaaatacctgggttgccttcatatggcctcaggttgtagagttgtgaggcacctgactggggttgcatgggatgtggcaatccttatatttaatatttcatatttttaagagaatgagagtggtgcaggcggggtaaagggttctctcaagaagga

SEQ ID NO: 1881624 - DNA, 4001 bp, Homo sapiens
gagccaccgagcctgagggcctgaggggcaggttaaattgtaccaaattgaattaatcctgctgatacactaacatattaactttttcattttctttagatgttgatatatcactacttgtgtcttttaacaaaatgaaaaaattgactactgatgggaagttaattgccagagcattgagaagttcagctgttgtagaggtaagaatcaagaataactactgtttatatttatagtttataattataaagaatgttaacgtaatgattattatatgattatagcttacaattataaataatattagttttattaatgtaatatactattttaaagcttgatttggaaggcaccagaatccggaggaaaaaacctctgggggaaagaccaaaggatgaggatgaacgcacagtgtatgtggtaagcttaagaacccgggtccccagtcagaaactggcacagaaacaatataattaagttaaaaatttattgacattctgattgtgaaaaactctaatattgcttttaatttataataggagttacttcccaaaaatgttaatcacagctggattgaaagagtatttgggaaatgtggcaatgttgtttatataagtataccacattataagtctactggagatccaaagggatttgcgtttgtggaatttgaaacaaaagaacaagcagcaaaagcaattgaggtaagtccagatcctaaaaaaaaaaaaagaaagaaaagaaaacaagtattaaaatagtaacttttgcaatcatttcagtttcttaacaacccaccagaagaagcaccaagaaaacctggcatatttcctaaaacagtgaaaaataagcccattccagccttaagagttgtgggtgagtatttttcaatatttaaataggtgtagttgaagtaagatgaactaataatgatggcacttttacagaagagaagaaaaagaaaaagaagaagaaaggccgaatgaaaaaggaagacaatatccaagccaaagaagaaaacatggacacaagcaacaccagcatcagtaaaatgaaaagatccagacccacatctgagggctctgacattgagtccactgaaccccaaaagcagtgctcaaagaaaaagaaaaaacgggacagagttgaagcatctagcttacctgaagtcagaacagggaagaggaagagaagcagctctgaagatgcagaatccctagctccccgatcaaaagtaaagaaaattattcagaaagacatcattaaggaagcatcagaagcttccaaggaaaatagaggtaaaactacaaggttttaattagataaaactaattaattttaattaattagtttttaattaattaggttttaattggcttctgtttcacccatttcacagccccatgtcttaacggagagcttttttatttatttcaagatatagaaatctctactgaagaggaaaaggatactggagatctaaaagatagctctctcttgaaaacaaaaaggaaacataagaaaaaacataaagagagacataaaatgggagaagaagttataccattaagagtgctatcaaagtaagtctgtggtttaaattctgtcattggcttaacaatccatcaccattgctaaagtgcaattccaatttatattcaacagagttgcatattagcaacagtaatggcctgtagccaagaactgcacacagtgtgggcgttaacgcaattgctgattaggtaggaaccaccacactcaaacatggaagcacttatttttgtcatgtcacagcaagtgcctccatgttaaagtagagggggccccttaacagatgtaaaaatacaaaataaagcttaaatatatgagctgcggtcaatacaataaagttattttctaaaaaaataataaaaatgtaaaaggaagacttaccatcaccaaaacatggaagcacttacttctttagtttcaaagcaagtacatccacgtttaagtggtggggagcccagtcttggaaaaagttagaatcctttaacctgtaacaagcttagtaaccttaaaacacaataacaaaaaaattttgtaacaaaaggtgtgctggcttggagacacctccactgaaacatggaagcacttacttttgtttcacacagcaggtacccccatgttaaagcaaaggggatcccttcaaatgaggttagcgtgttctattttggagaagtaaattggattcactcctactaaaacatggaagcacttacttttaaagtcacagaaagcacttccatgttaaagttgaagggagcccacccaacatacaacttctttggacttcagagtatttagagctgaggagaaagaaaacaaaatggcataactttagaagaaaaaaatttttttaccttcctgaactagttcccaaagattcgtgttctcctccagaagggtaaaaggcagggacttcagccacttctatttatactattcttaactcttgaattccttttgcctttttatctcagagaatcattacaagggccttttgttattttaatgtatcagctctcagggaatgtatgatcctgggtgggtctggatccttttttttttttttgaagtatacagatgtcaatgttaacagctaaaaccattaccacaagatatcttcctcttaaaaaaaaaaaagaaaaagaaaaagaaaatctcctatctgcttgtttgatggcatagattagggtaacaatgagtgctcccactgagccgagaaaggcattgtgtttctatctggaggaactctgtttgaagaagcatctacatgttaaatgtatgtaaataaatagattgcttccacggggtgttttgttctacttagaaattctttttgattcaagtaaatactaaggaatgttatctctcaaattggaagcagtttaacaaatctttaatctcgcccttttcccacagagatgactgatttagtaaatgttactagttaaggaattaatgctaaaattttacttttataaattaaaatacttcagacactcaaaaatttaattggcaatcttaaaacatttaatctgaatattgggggaagaggaactcccttagcttattttgctaaatgtctttagaacctaggaaatattttgaatatgtgtttaaagaaacaggaaagttggtggaggagttgctccaagtcattgtgaatgtatatatttagatatttccctatttactttttatatttagtcatctgttatcaccatttctttccttgtaggagcgaatggatggatttgaaaaaagagtatttagcgctacaaaaagctagcatggcttctttaaaaaaaacaatatcccaaataaaatcagagtcagaaatggaaacagacagtggagtacctcaaaacactggaatgaaaaatgaaaaaagtaaagatcactgatagttttgacaacattataatgtacttatatatgtaaatgctatctctgagttgttataagataaattttaattttaaaaaacttgattattctatttcattattagaacaattcttgatttgttaagttatccagatgtgttacttactcttgatataagaatatttaaaaggctcatttaaaacaattttttaaataacctgagttttctctacagttttcatcaagcacatgagtgcagagtttgcagactgagcaagtttgtaggaatgaagattgtagtttctcacctgttaatttcattctgtagtatgcaccacaagcaggaacaagttaaagcagaattcctatgaattcaaaattaggatacattttaaattctcatttcttgtaaaaataaatgttcacgtttgaataataatgtatttaaaacacagtatcctttaacttttttttaactttattgagtaaaaatttactgttcctttgttcagggagaaggggcaaatttaaaggctttacgaatgctcttctagcagtaacaatttgca

SEQ ID NO: 1881625 - DNA, 4001 bp, Homo sapiens
gttttattaatgtaatatactattttaaagcttgatttggaaggcaccagaatccggaggaaaaaacctctgggggaaagaccaaaggatgaggatgaacgcacagtgtatgtggtaagcttaagaacccgggtccccagtcagaaactggcacagaaacaatataattaagttaaaaatttattgacattctgattgtgaaaaactctaatattgcttttaatttataataggagttacttcccaaaaatgttaatcacagctggattgaaagagtatttgggaaatgtggcaatgttgtttatataagtataccacattataagtctactggagatccaaagggatttgcgtttgtggaatttgaaacaaaagaacaagcagcaaaagcaattgaggtaagtccagatcctaaaaaaaaaaaaagaaagaaaagaaaacaagtattaaaatagtaacttttgcaatcatttcagtttcttaacaacccaccagaagaagcaccaagaaaacctggcatatttcctaaaacagtgaaaaataagcccattccagccttaagagttgtgggtgagtatttttcaatatttaaataggtgtagttgaagtaagatgaactaataatgatggcacttttacagaagagaagaaaaagaaaaagaagaagaaaggccgaatgaaaaaggaagacaatatccaagccaaagaagaaaacatggacacaagcaacaccagcatcagtaaaatgaaaagatccagacccacatctgagggctctgacattgagtccactgaaccccaaaagcagtgctcaaagaaaaagaaaaaacgggacagagttgaagcatctagcttacctgaagtcagaacagggaagaggaagagaagcagctctgaagatgcagaatccctagctccccgatcaaaagtaaagaaaattattcagaaagacatcattaaggaagcatcagaagcttccaaggaaaatagaggtaaaactacaaggttttaattagataaaactaattaattttaattaattagtttttaattaattaggttttaattggcttctgtttcacccatttcacagccccatgtcttaacggagagcttttttatttatttcaagatatagaaatctctactgaagaggaaaaggatactggagatctaaaagatagctctctcttgaaaacaaaaaggaaacataagaaaaaacataaagagagacataaaatgggagaagaagttataccattaagagtgctatcaaagtaagtctgtggtttaaattctgtcattggcttaacaatccatcaccattgctaaagtgcaattccaatttatattcaacagagttgcatattagcaacagtaatggcctgtagccaagaactgcacacagtgtgggcgttaacgcaattgctgattaggtaggaaccaccacactcaaacatggaagcacttatttttgtcatgtcacagcaagtgcctccatgttaaagtagagggggccccttaacagatgtaaaaatacaaaataaagcttaaatatatgagctgcggtcaatacaataaagttattttctaaaaaaataataaaaatgtaaaaggaagacttaccatcaccaaaacatggaagcacttacttctttagtttcaaagcaagtacatccacgtttaagtggtggggagcccagtcttggaaaaagttagaatcctttaacctgtaacaagcttagtaaccttaaaacacaataacaaaaaaattttgtaacaaaaggtgtgctggcttggagacacctccactgaaacatggaagcacttacttttgtttcacacagcaggtacccccatgttaaagcaaaggggatcccttcaaatgaggttagcgtgttctattttggagaagtaaattggattcactcctactaaaacatggaagcacttacttttaaagtcacagaaagcacttccatgttaaagttgaagggagcccacccaacatacaacttctttggacttcagagtatttagagctgaggagaaagaaaacaaaatggcataactttagaagaaaaaaatttttttaccttcctgaactagttcccaaagattcgtgttctcctccagaagggtaaaaggcagggacttcagccacttctatttatactattcttaactcttgaattccttttgcctttttatctcagagaatcattacaagggccttttgttattttaatgtatcagctctcagggaatgtatgatcctgggtgggtctggatccttttttttttttttgaagtatacagatgtcaatgttaacagctaaaaccattaccacaagatatcttcctcttaaaaaaaaaaaagaaaaagaaaaagaaaatctcctatctgcttgtttgatggcatagattagggtaacaatgagtgctcccactgagccgagaaaggcattgtgtttctatctggaggaactctgtttgaagaagcatctacatgttaaatgtatgtaaataaatagattgcttccacggggtgttttgttctacttagaaattctttttgattcaagtaaatactaaggaatgttatctctcaaattggaagcagtttaacaaatctttaatctcgcccttttcccacagagatgactgatttagtaaatgttactagttaaggaattaatgctaaaattttacttttataaattaaaatacttcagacactcaaaaatttaattggcaatcttaaaacatttaatctgaatattgggggaagaggaactcccttagcttattttgctaaatgtctttagaacctaggaaatattttgaatatgtgtttaaagaaacaggaaagttggtggaggagttgctccaagtcattgtgaatgtatatatttagatatttccctatttactttttatatttagtcatctgttatcaccatttctttccttgtaggagcgaatggatggatttgaaaaaagagtatttagcgctacaaaaagctagcatggcttctttaaaaaaaacaatatcccaaataaaatcagagtcagaaatggaaacagacagtggagtacctcaaaacactggaatgaaaaatgaaaaaagtaaagatcactgatagttttgacaacattataatgtacttatatatgtaaatgctatctctgagttgttataagataaattttaattttaaaaaacttgattattctatttcattattagaacaattcttgatttgttaagttatccagatgtgttacttactcttgatataagaatatttaaaaggctcatttaaaacaattttttaaataacctgagttttctctacagttttcatcaagcacatgagtgcagagtttgcagactgagcaagtttgtaggaatgaagattgtagtttctcacctgttaatttcattctgtagtatgcaccacaagcaggaacaagttaaagcagaattcctatgaattcaaaattaggatacattttaaattctcatttcttgtaaaaataaatgttcacgtttgaataataatgtatttaaaacacagtatcctttaacttttttttaactttattgagtaaaaatttactgttcctttgttcagggagaaggggcaaatttaaaggctttacgaatgctcttctagcagtaacaatttgcatgtagaataataaaactttctgagttttattcatggtattttgaaataagcagtatgacatataacctttaattgtttactttaaaattaaatacgttttaaattatttaaatctgcctcaggaattattctaaggtagtcctcctaagtattaaattgttgttaagtgtaagagatttagtcctggtctttttccttttctaatcagcagccaacagggaagagtgtcgcacccaggagaaagttaatgcaacaggaccacagttcgtgagtggagtgattgtgaagatcattagcacagagcct

SEQ ID NO: 1881626 - DNA, 4001 bp, Homo sapiens
agaagttcagctgttgtagaggtaagaatcaagaataactactgtttatatttatagtttataattataaagaatgttaacgtaatgattattatatgattatagcttacaattataaataatattagttttattaatgtaatatactattttaaagcttgatttggaaggcaccagaatccggaggaaaaaacctctgggggaaagaccaaaggatgaggatgaacgcacagtgtatgtggtaagcttaagaacccgggtccccagtcagaaactggcacagaaacaatataattaagttaaaaatttattgacattctgattgtgaaaaactctaatattgcttttaatttataataggagttacttcccaaaaatgttaatcacagctggattgaaagagtatttgggaaatgtggcaatgttgtttatataagtataccacattataagtctactggagatccaaagggatttgcgtttgtggaatttgaaacaaaagaacaagcagcaaaagcaattgaggtaagtccagatcctaaaaaaaaaaaaagaaagaaaagaaaacaagtattaaaatagtaacttttgcaatcatttcagtttcttaacaacccaccagaagaagcaccaagaaaacctggcatatttcctaaaacagtgaaaaataagcccattccagccttaagagttgtgggtgagtatttttcaatatttaaataggtgtagttgaagtaagatgaactaataatgatggcacttttacagaagagaagaaaaagaaaaagaagaagaaaggccgaatgaaaaaggaagacaatatccaagccaaagaagaaaacatggacacaagcaacaccagcatcagtaaaatgaaaagatccagacccacatctgagggctctgacattgagtccactgaaccccaaaagcagtgctcaaagaaaaagaaaaaacgggacagagttgaagcatctagcttacctgaagtcagaacagggaagaggaagagaagcagctctgaagatgcagaatccctagctccccgatcaaaagtaaagaaaattattcagaaagacatcattaaggaagcatcagaagcttccaaggaaaatagaggtaaaactacaaggttttaattagataaaactaattaattttaattaattagtttttaattaattaggttttaattggcttctgtttcacccatttcacagccccatgtcttaacggagagcttttttatttatttcaagatatagaaatctctactgaagaggaaaaggatactggagatctaaaagatagctctctcttgaaaacaaaaaggaaacataagaaaaaacataaagagagacataaaatgggagaagaagttataccattaagagtgctatcaaagtaagtctgtggtttaaattctgtcattggcttaacaatccatcaccattgctaaagtgcaattccaatttatattcaacagagttgcatattagcaacagtaatggcctgtagccaagaactgcacacagtgtgggcgttaacgcaattgctgattaggtaggaaccaccacactcaaacatggaagcacttatttttgtcatgtcacagcaagtgcctccatgttaaagtagagggggccccttaacagatgtaaaaatacaaaataaagcttaaatatatgagctgcggtcaatacaataaagttattttctaaaaaaataataaaaatgtaaaaggaagacttaccatcaccaaaacatggaagcacttacttctttagtttcaaagcaagtacatccacgtttaagtggtggggagcccagtcttggaaaaagttagaatcctttaacctgtaacaagcttagtaaccttaaaacacaataacaaaaaaattttgtaacaaaaggtgtgctggcttggagacacctccactgaaacatggaagcacttacttttgtttcacacagcaggtacccccatgttaaagcaaaggggatcccttcaaatgaggttagcgtgttctattttggagaagtaaattggattcactcctactaaaacatggaagcacttacttttaaagtcacagaaagcacttccatgttaaagttgaagggagcccacccaacatacaacttctttggacttcagagtatttagagctgaggagaaagaaaacaaaatggcataactttagaagaaaaaaatttttttaccttcctgaactagttcccaaagattcgtgttctcctccagaagggtaaaaggcagggacttcagccacttctatttatactattcttaactcttgaattccttttgcctttttatctcagagaatcattacaagggccttttgttattttaatgtatcagctctcagggaatgtatgatcctgggtgggtctggatccttttttttttttttgaagtatacagatgtcaatgttaacagctaaaaccattaccacaagatatcttcctcttaaaaaaaaaaaagaaaaagaaaaagaaaatctcctatctgcttgtttgatggcatagattagggtaacaatgagtgctcccactgagccgagaaaggcattgtgtttctatctggaggaactctgtttgaagaagcatctacatgttaaatgtatgtaaataaatagattgcttccacggggtgttttgttctacttagaaattctttttgattcaagtaaatactaaggaatgttatctctcaaattggaagcagtttaacaaatctttaatctcgcccttttcccacagagatgactgatttagtaaatgttactagttaaggaattaatgctaaaattttacttttataaattaaaatacttcagacactcaaaaatttaattggcaatcttaaaacatttaatctgaatattgggggaagaggaactcccttagcttattttgctaaatgtctttagaacctaggaaatattttgaatatgtgtttaaagaaacaggaaagttggtggaggagttgctccaagtcattgtgaatgtatatatttagatatttccctatttactttttatatttagtcatctgttatcaccatttctttccttgtaggagcgaatggatggatttgaaaaaagagtatttagcgctacaaaaagctagcatggcttctttaaaaaaaacaatatcccaaataaaatcagagtcagaaatggaaacagacagtggagtacctcaaaacactggaatgaaaaatgaaaaaagtaaagatcactgatagttttgacaacattataatgtacttatatatgtaaatgctatctctgagttgttataagataaattttaattttaaaaaacttgattattctatttcattattagaacaattcttgatttgttaagttatccagatgtgttacttactcttgatataagaatatttaaaaggctcatttaaaacaattttttaaataacctgagttttctctacagttttcatcaagcacatgagtgcagagtttgcagactgagcaagtttgtaggaatgaagattgtagtttctcacctgttaatttcattctgtagtatgcaccacaagcaggaacaagttaaagcagaattcctatgaattcaaaattaggatacattttaaattctcatttcttgtaaaaataaatgttcacgtttgaataataatgtatttaaaacacagtatcctttaacttttttttaactttattgagtaaaaatttactgttcctttgttcagggagaaggggcaaatttaaaggctttacgaatgctcttctagcagtaacaatttgcatgtagaataataaaactttctgagttttattcatggtattttgaaataagcagtatgacatataacctttaattgtttactttaaaattaaatacgttttaaattatttaaatctgcctcaggaattattctaaggtagtcctcctaagtattaaattgttgttaagtgtaagagattt

SEQ ID NO: 1881627 - DNA, 4001 bp, Homo sapiens
tgggttcaagcgattctcctacctcactctcgagtagctgggattacaggcgtgcaccactacacccagctaattctttgtatttttagtagagatggggtttcactatgttggccaggctggtcttgaactcccccatccacccgccttggcctcccaaagtactaggattacaggcatgagccaccgagcctgagggcctgaggggcaggttaaattgtaccaaattgaattaatcctgctgatacactaacatattaactttttcattttctttagatgttgatatatcactacttgtgtcttttaacaaaatgaaaaaattgactactgatgggaagttaattgccagagcattgagaagttcagctgttgtagaggtaagaatcaagaataactactgtttatatttatagtttataattataaagaatgttaacgtaatgattattatatgattatagcttacaattataaataatattagttttattaatgtaatatactattttaaagcttgatttggaaggcaccagaatccggaggaaaaaacctctgggggaaagaccaaaggatgaggatgaacgcacagtgtatgtggtaagcttaagaacccgggtccccagtcagaaactggcacagaaacaatataattaagttaaaaatttattgacattctgattgtgaaaaactctaatattgcttttaatttataataggagttacttcccaaaaatgttaatcacagctggattgaaagagtatttgggaaatgtggcaatgttgtttatataagtataccacattataagtctactggagatccaaagggatttgcgtttgtggaatttgaaacaaaagaacaagcagcaaaagcaattgaggtaagtccagatcctaaaaaaaaaaaaagaaagaaaagaaaacaagtattaaaatagtaacttttgcaatcatttcagtttcttaacaacccaccagaagaagcaccaagaaaacctggcatatttcctaaaacagtgaaaaataagcccattccagccttaagagttgtgggtgagtatttttcaatatttaaataggtgtagttgaagtaagatgaactaataatgatggcacttttacagaagagaagaaaaagaaaaagaagaagaaaggccgaatgaaaaaggaagacaatatccaagccaaagaagaaaacatggacacaagcaacaccagcatcagtaaaatgaaaagatccagacccacatctgagggctctgacattgagtccactgaaccccaaaagcagtgctcaaagaaaaagaaaaaacgggacagagttgaagcatctagcttacctgaagtcagaacagggaagaggaagagaagcagctctgaagatgcagaatccctagctccccgatcaaaagtaaagaaaattattcagaaagacatcattaaggaagcatcagaagcttccaaggaaaatagaggtaaaactacaaggttttaattagataaaactaattaattttaattaattagtttttaattaattaggttttaattggcttctgtttcacccatttcacagccccatgtcttaacggagagcttttttatttatttcaagatatagaaatctctactgaagaggaaaaggatactggagatctaaaagatagctctctcttgaaaacaaaaaggaaacataagaaaaaacataaagagagacataaaatgggagaagaagttataccattaagagtgctatcaaagtaagtctgtggtttaaattctgtcattggcttaacaatccatcaccattgctaaagtgcaattccaatttatattcaacagagttgcatattagcaacagtaatggcctgtagccaagaactgcacacagtgtgggcgttaacgcaattgctgattaggtaggaaccaccacactcaaacatggaagcacttatttttgtcatgtcacagcaagtgcctccatgttaaagtagagggggccccttaacagatgtaaaaatacaaaataaagcttaaatatatgagctgcggtcaatacaataaagttattttctaaaaaaataataaaaatgtaaaaggaagacttaccatcaccaaaacatggaagcacttacttctttagtttcaaagcaagtacatccacgtttaagtggtggggagcccagtcttggaaaaagttagaatcctttaacctgtaacaagcttagtaaccttaaaacacaataacaaaaaaattttgtaacaaaaggtgtgctggcttggagacacctccactgaaacatggaagcacttacttttgtttcacacagcaggtacccccatgttaaagcaaaggggatcccttcaaatgaggttagcgtgttctattttggagaagtaaattggattcactcctactaaaacatggaagcacttacttttaaagtcacagaaagcacttccatgttaaagttgaagggagcccacccaacatacaacttctttggacttcagagtatttagagctgaggagaaagaaaacaaaatggcataactttagaagaaaaaaatttttttaccttcctgaactagttcccaaagattcgtgttctcctccagaagggtaaaaggcagggacttcagccacttctatttatactattcttaactcttgaattccttttgcctttttatctcagagaatcattacaagggccttttgttattttaatgtatcagctctcagggaatgtatgatcctgggtgggtctggatccttttttttttttttgaagtatacagatgtcaatgttaacagctaaaaccattaccacaagatatcttcctcttaaaaaaaaaaaagaaaaagaaaaagaaaatctcctatctgcttgtttgatggcatagattagggtaacaatgagtgctcccactgagccgagaaaggcattgtgtttctatctggaggaactctgtttgaagaagcatctacatgttaaatgtatgtaaataaatagattgcttccacggggtgttttgttctacttagaaattctttttgattcaagtaaatactaaggaatgttatctctcaaattggaagcagtttaacaaatctttaatctcgcccttttcccacagagatgactgatttagtaaatgttactagttaaggaattaatgctaaaattttacttttataaattaaaatacttcagacactcaaaaatttaattggcaatcttaaaacatttaatctgaatattgggggaagaggaactcccttagcttattttgctaaatgtctttagaacctaggaaatattttgaatatgtgtttaaagaaacaggaaagttggtggaggagttgctccaagtcattgtgaatgtatatatttagatatttccctatttactttttatatttagtcatctgttatcaccatttctttccttgtaggagcgaatggatggatttgaaaaaagagtatttagcgctacaaaaagctagcatggcttctttaaaaaaaacaatatcccaaataaaatcagagtcagaaatggaaacagacagtggagtacctcaaaacactggaatgaaaaatgaaaaaagtaaagatcactgatagttttgacaacattataatgtacttatatatgtaaatgctatctctgagttgttataagataaattttaattttaaaaaacttgattattctatttcattattagaacaattcttgatttgttaagttatccagatgtgttacttactcttgatataagaatatttaaaaggctcatttaaaacaattttttaaataacctgagttttctctacagttttcatcaagcacatgagtgcagagtttgcagactgagcaagtttgtaggaatgaagattgtagtttctcacctgttaatttcattctgtagtatgcaccacaagcaggaacaagttaaagcagaattcctatgaattcaaaattaggataca

SEQ ID NO: 1881628 - DNA, 4001 bp, Homo sapiens
taatgtttaacacaaaaggatgtcttcaaggagaatggatgaggggacttgactacacactaggaggagagtggtaggggggcactcggggaggggagggtttggacaacacagagctgccttacaatacgtgcatggccacgcggggacatcacaaccccctcagggagaaatgatgacatgcggggctaaataaaacctactgttacaaatcatttcacctgtttcttttttaaatgtggctaccaggaaatttcaacgccacatgaggctcacattatacactggacgtggctgtcttagggagggggagaccctggtcccaggtgggatttaaggggtgagtgggggaagtgaagatgtcaaaagtgaggccttcactcagctcagcaggtgtcctgtgcatggggcccccgtggtccctcagtacggccagcagcgcagctggtgtttgctggatggaaggagacccacaactcttccgggccacctgtctagaagcacagaggctacttagccctggggactgaagccaggggacagcctgtgaggtggcccatggagccccgaaccatgggtggtccctgccaaggcctgggggcggaagtcaccttggatcttgactctggtttccgggtcactcagggtccaaacatacaccatcatgtccatgccaccggaggcaaagtgttcattgtctggggaccaggccaggcagacgatttttgcatggtgtccataaaaaacattgttctcctagttgcaggttgaaaacaagagaggtggcaggtcaggttcaggccgcagttgcccatatcacctcgcttatccctcatggcgacaataaggaccgaggtttctcacgcgctaactctatgccagcgacccctgcaaacccactgactcctcagaagcatggcacgaggcacctgctacttgtagaggcaagaaaactacagctcagacaggctcagctcaaggtcaccaagtcacagataacctcccactgccacctgcaccgcccagcacggggacagaggaggagcccgccgccactcaccgagtagccgtcagcaacgctgaacactgtgaccaccttgctggcgtcgcacaccgcgaggaaggcgccgtcgtgggagtaggccacgtcggtcacggggcccttggcctctaggagcttgccctcatccttcagcgtggtgcccaggatggaatacaggcggacgttgccgtcctacggcagggacagagaggaagtgagccacccctgaacacacacaccacacccatcctttgtgaagggggggtcgagggcttaagaaactgtgccgttcccactgactgctgctctgctgggcccatgccaggagctgggcatggctcttcccgtggatgggcctgaaacctacgcagctctatgaaaacagctgttggtacctcggggcaccgctggtctcatgaggccctcaagctggctggtggaggaagccactccatgccctggtcacatccggcacctgaaggacctggcagcacatagacccacccagcccctagcatggagggcactgccacgcctgctgcaggactgggttatcagagggctgccctcctgggctggagaggggaaatgagctcttctacagagcactcaggacttggccaggcacactgtgaccagaccacacacacaaattcaagggcatgagaattatgccgaggcagaactcaagggaaactgtaaaatgtctggttagtaccgcaccttgaagatgctgggaaacttctgtcactcttccttcaacctgtgagccgagcccagccccaggggatgccattccttgatttcctgacctgctaccctcttgcgctcccctcctgccgccactcatggggctggctctgaggcacagctgtgccctcctcggcactccctctacctcactgtccacagtcttgtgggcacccgggcagtgaggtgggggaagtgccgaggaggggaggggaaggctccagccctgggtggcaggagatggcgtggctgggccccagagcaggtcccacgccccgactgcccccatccttcccctgacccctcgccttccctgagacagccccggtactcacacagctcacactgtccccaaatcacccagataccaaggacagagagcacgggggagaggaaagcgacttaccacacccccaattgccaccgtgtccccgccggggtgcactgccacaacttcgggctcgtagccggggttgtcgatgctgaagcacttcctctgatccttcagcaggacaatctgtggcacacacaggcagctggtcaggcggtccagcccttcgggacaaaaccctcagtggtaggaggggcgcgtccctgtcggggctcactggagctgggtttggctccatacccaacctctttgcagggccacctggggctctgagccacaccacctggactcatgtcccgtttgacagttgctctagccagtcaggtggggcaggaaacacaactaactgtgaccattactgtcatcactacattacttccaaggcagtcaccacagcaccacctcttggaaagtcacttggcctcgatgggaatcaacgttcagggtaagaaaggtactaacaacagtaaacaaaaacagcgacagcccctaggcacgtgccagcgctctgctgtgagtgttccagccccacaaggcagggatcgggttccccgtttcagagaagaaaatggggtacggtgcttatgctgcacgcccaaggctccagttcccacaggctgagccgggactcgcccagaatccaagcctcggcacccgcactgggcctttgcctctggtacatgcagcagaggctctgcagcgggggccttccttccatctcccttccttgtcaattcttccggttctaacttactcaactgctcccagacagtggccttcatctctgagttttgcctttatcccagtgtgcccctacccaagccaccagctgtcatgagggaaggcagcctctgcccctaccgtctgggcttctgtttctgcgtggattgtgggtggatcgcgatgaatggtagcagcaccctgactaaaacctactactgaagaggcacctctgtcatctgcccggctctggaggtggccttacctactcacaggtgaagaatgagggcctaagcatttgcctgaagcttcgtccgacatgagacttgaacctggttgtttcctgatctaaaatcccaggcccctcctagcaccctcctaactctttgactggtgacagggagctctgcagaaaattctgacccagagcaggggttccagatgccctgggaggatcaggtaacagcagatcacagagaaatgccacatgaggaggtgcagagacctggagcctgtcccctgcacaccacaaccctaccggggtcctttctaacctcctgggcagcaggcgccagctgggccagtctgaacatcctctcagcctcaggggaaagggtggcctatgatgaccacaactttacagatgaggaaacctgggtctggagacacagggcacgctgccctaggcctcatcccctcacccacaaagccccatgtgcagaccccttggctgggaagagccctgctgtgcagagataggccacctgccagccttctagaactccgctttgtagcgtttcccccaggccccgaggcgctccatgtgtggattccctttgcacctccccacccccactggctgtccaggctgtttgcaataattacttggcagggatttcttattatctaggacacagagaaatccactgtccctaacgcaattaagttcacaaggcaaaggagggccagagggtgctgaaagcagctttctttagcagggctcgccactcgtgccaacaggtgccccttgacttccccggtctacatgccagcaagcctaggcccgccaacagataatatcttctgcagggcagaatt

SEQ ID NO: 1881629 - DNA, 4001 bp, Homo sapiens
aggcttaatatttttacattgaaatgtttggactcttggtatgttgtttttaattcatgagacaatgtggccatttgttttttcctcttaggacattgttttttgaacacataacttaagagaactacctaggccaagtatgaattcaaagtaaaaagctgggagaaaagaaaaccaccatcagaaaagcacttggtaaatttggcattctttctaatatataaaaataaaagaaaactcagtttagaaagatgataaacattattgaaacacacactaagaggtgaggaaagaatgattaaatggtagaaaaaagttaactcacatttctccttctagaagctctattcctttataacttatatccttcacgtgcagtttgcatatagtagctctgctaaaaacaaccacatggaaaatttttgttccagataatactgcaggacagggcttggcagctacaagttgtaatcagaatgcttcaagagctaatgtaacagagataacaaccaaacatgcattacagtgcatagtcttaattctttttaaaaacgggctgggagaaggtcaaaagctcttaggttatagtgtactttattcagtaatgcgaccttttaaactagggagaacttcgctcctatgaataagtgaattgcttaaaagagaaatgattcttttttccagttagggcattcttctattatttaagatgctcaaacatagaagcctagaatgagcaaaaaattccagttcctaaaaatgacttttctcagcaattctacaggcctaaattgtcatctacaatttattgaggctcctatagccatcccactggcaacggaagagcctagttatttaataaatatggaaatccacagtacaatgggccactttttgccaggggtaatataaaaaagaaagaatgctaattttatgtgtgttataccccaagaggggagaataaagagaactgtgacttgataagttttctgtattagttggcagactgagataaaaggagtcacagaaagatcgtgacttcaatccaagttcaaatggcaaattcagatggagctctaacttggtggaaattaggcgccatgttgatgcgaggaatgtgaaatgagagaaacccctccatccacagggagagggggtttcatgtgatccgttggtgttattctctcccccccaacacgagctggcactcacacagctgggctaagatggcttccaaagtccgaaataagacgctagcccaaggcagccctggtcctgctgctggaactcagaagcaaatgaatcaaaggctcttttattctccctcccaccagaacatgctccctctctgttgtaaactaactgcttgccagaatgaattacttagcttaaaacagacataaagaaatcttaaacaactcatgtcccttggaattttaataagttcaggtgaccaaacaagttgttttgttcatttctagtttgatgcagaaaattcacttgtgctcaggaacccatgaggaacattagatcttagcagaaacaaaaacttctcaaactagaagatacagctgacagccaaactcctcacatgaaactggggtgctgggaagcagtttttttcatgaggacatctaaactcaacacaaatctttgttcttcctttaaaaccagccctcccttaagattttgctgttgctgccagcagtacaccagctcttctaaaagcaaagtgtaaaattcatttgcggagtcttccctggcatctcgtacccctgcatcccctgttctcactctaaactttcatttggcaactaatcatatatcatagctcctataaaatgactgacagcttgtcttcacaaacagattagaaactccttaagggcagagagtgggcctttccttccttgcattccacacatggcacataacaaaagctcctgcgatacctgtttattattcagtcaacaggcatctgttgagctcctactctgagccaggcattgcacaggggctcaagacacagcacccagcccaggagcacagcagccaaaggccctgcatgcaggtctgccttcagttaaaaaccaagagtccccaaagaatactgcttaagcagtcactaaactatttaagataaatagtaaagatttccccacaaggaagatttatgtcccccaaaaatttatgttgcagcttattgaagagctccccatttgtcccttccacccaagaaaatgtctgagaagaggaacgctaaactgcaacagggcttctgctgaagatctacagctcctccctcccccattttacaggtaaggaaactgaggatcagaatggtcaaatgctcctgtgggtgggtaatggcaaaaccaagtagaatccgggtcctgacactcagtctgagtttccttccactatagcaaaacatccccactaaaagcatcagtgggtgcatcaaattacattttaatacaaaattcttcaaaagtaaagtagtagcccatctactacaatgctccttctggctgtcagtctctgtaagaaaattaggactgctgagtacctaacacatgttttgaatctatcacctctggctgggcacggtggctcacacctgtaatcccagcactttgggaggctgaggcgggcggatcacctgaggtcaggagttcgagaccagcctggccaacatggcaaaaccccatctctactaaaaatacaaaaaaaaaatttgccgggcgtggtggcaggagcctgtaatcccagctacttgggaggttgaggcaggagaatcagttaaatccgggagatggaggttgcagtgagccatgagccaagatcatgccattgtactccagcctggacaagagcgaaactccatctcaaaaaaaaaaaaaaaaaaaaaaaaaaagaatctatcacctctgaaactttctcagtctgcaaattgtcaatagcttatctacatatttttatgttaagtctaaaatatgggattttacttactctcaaaaaacgctgtgtgttttactccttacatttttaagcaggttatggcaaaatacactgaaataaccagtcacttgtcaaacagattatccaactataactcttgccactttttgttccaagatgatctcttaaaaaaataattttaaagagccagcagaattctcaaactaccccctccaaactaatgcaccttcctaacagtaattctgaatctcaaaaggtagcaatcagatttggagattcagcaagttgcacgtggagagttctacacttatcattcagcccaggcacaacaaatgaactatcattaaccatcataaaggcttaatgtaattgcaagttgatgatctctgttaacagaaaaaacattcttgctacacttgaaaaggtaaaaacattgggagtctgaattatgtttactaacatgaggatggcaagaaaaaatttccttcaatagaataattatgcttattcagtcactgtaagcagaaacatcagaatccattgattgctagtggtaattgtcaaaaaaggataggaagagcttctagacatgacagtcctctttgttgtagtgacactattgagcaggggtttcatgcttagcacaggtcctgggttgtccttgaaccaaggagatgctgacacttggcctgcccacgcccctctcctccatgtcagatgtcaggtgcccacccagtaggagaggctatttctgtttctaggcccatttccagaaccaggggtgtgtttttgaagtccagacaagagttgtcctgttaattgacagctgcagagcagacagagagcccacgctgggtacagattacctacctaagaactggctggggccttgctaccaggctggctgtcagctaacaggccaccttgctctggcctcagaagcaggttctcctgctgagattgtgcacctgcccaatgctgacagctgggctatggaggagcccaaacttagtgtttgg

SEQ ID NO: 1881630 - DNA, 4001 bp, Homo sapiens
aatatcaacatgaataaatcttgatgtaaataaacactgagtgaaaaaagcaagttaaaaagttatgccaacagtatattattattcacattttaaaaggaaatcagtactgtttatctttttatacaaatatgtggtaaaaagtattgaaaacttacaggatacctttagaaaagtaattacctctgagaagagaggcaaaagaatgagattagtaatcttcaattatatttttaatttattttaaaaagttctgaaacagtgatagcaaaaagttaacatttgttaaattttggcagtacagatacataagcatcttatattcttccttgtattttttatattttgaagtatcatttaaaattgttaaatttaaaatggactgctgctacataattttcagttttaatagctatacaatacttagttctgtaattcttgctgtttaaaacaaccgttttgaagaactttgatttagaaggtcaccagtggttcctattttaatctttaatgtaaattaacagaagcaaattggcacttccaaaatgattctaataagcaaaatgcattccatttaaacaaataaaaaataatgttaaaagtatgccatccaagtggcattacatctccagtttaatacttcctgtatctcatattgcttttaaaactgaacattctttggagaattgaaagtttgactattttaataatttgcttttgtcaatcactttgactaactctacaaaatcatcctattaaagttattattttaaatatcaattaataggtctataaaaaacctactgttataagactggtgcataaaaaaatataaatttttcaagtgatttagcagtaatttagttcttcatcatgttccttaaaaggctttaatctataatctatttgtaaaaactttctattttctccttaagagaaggtcaacggctttcacttcacttgtctaacataatcatgaattgaaataagaactctcagctctttggaacgacaatgctaccagtatgcctaggccaataaagcgattcgttcattaatgctgctaataaagcaaccttttgttagtctatgaaacatcagaaaccttacagactctaactttgcaatttttccctgttttgccacatgaacttaaaagttctcttacatgccatttactttaataactaaaacactatcattcaaaaattcaatcttccactctaggtaagttaataacttaaaaaatattcgctccaactgcagaaatttctagatgaaattatgttttaattaattattctcttgtgttttcccataaaaaccaatctgtatagaagtctgtgctatcttctattaaacaactaaaggaactacccatataatattctcaaaaagaaaagcataaatgttcatttattcaattagcaccaatcaactacagtaagcaaggcaaagaaaatacagcaaagattaatacacaattcctgccctcaagcaactcaatttagggagtaagccaggtatctgtaaaaattactgtaaggtagtttataatattaactactaaatataatagtataaagaatataattaacagagcttagacaggattttttaaaaccttccatgagacttttgaggctaaatagagaatagtctattttaggtaaataaacagcacgtatagaaacacagatgcatcaaacaccaaggtaaattcagaaattcttaattctgtaaggctcaagggtatcatgtatgtaaggaattattaggaaatgtctgtcagttcacaaagggccatgtttgtgttgccctcgaatttgaactttattctaggcaattggcagtaattaaaaggctataagaagtagtgtatggtgctcagttctgttttttagaaaagtcactcctgaactacctgaattcccaaaagctcttattttcaataacttcagaatacataaagcttttggtaattcaggtacctcaagaggacataaatggtaggcttccaagcctaccaagacattcatactcagtataactatatacctactctatactgctaacttaagtttagcattttctaaactaactgtcacttaaagagaaaaatcaatacatgaaatattggttctaatattagtcaactatttttaaacctcttcaaagtattgggaaaatatcagtttccaggaattataaagtcatgttattgatacattttaagagttgcagttaaagtcaacaggatgtgtttagaatttataaaattaatcttaaaatttagcccactgtaatccttactgtgaacatccctggaactgaaacctggcacccttatcttcttctgagcactgtcttttatgcttactaccctcccctcaataccacccccatgcctaccttgaaaactccatgttcttacatgaccctgggctacagtgaattagtccaacttgacccagccataccaatgttttcagttgttacctattatgactaaatccataagcattctttaaaaaaagccttgcaaacatgttttcatttctattagggaagtactttcttcaaccacaaaaaatggaactagaagtcgctacaacatgaattaactttgaaaatattatgccaaatgaaatgagaggacaataagacaaacactgtatgattctatttatgaggtacctagaatagtcataatcataaagacagagtataacatacgttaccaggaaatcaggggaggaaagatgggagttattgtttaatgggtatcaagtttttatttgcgatgatgaaaaacttctggaaatggacagagatggatggttgcaaaatattgtgaatgtacttgatgccactgaattgtatatttaaaaatggttgaaatgtaaattttatactatgtatattttgccaccaataaagaaaaaaaccttagaggaaaaatttgttacttattggactccctagaacccaagaaagtaaaaaagatctaacatttaataagtaccaggcattacatatactacctcaaatagccctcccaacaacactataaggtacacttagtatctctgttttaatgaggaagaaacaggcaaaaagcagataactcaaaagtcacagagctaggaaatattgggcataggactcaaaccctggcagtctgactctgtctctcaagcagcagcataagttaaaaaaacattcattacagaaatctatgttgttaaaattgcctaaatactccatggaaatatgaactggcaaaaatcaaaacataatcctgcacctacaataccaatagtgtgtatctgcattaaggacaacatgtttaatggtataattataagcaaagcagattttttctatctttattacttatgagctcacaccttcatttggcagtaagatatatcaaaatttaaaacatacagcaagcagtacaaaaaataacaaaacaacaagctcttaaagatcgctgtccctgataaataccaaaactaatagtcaaaggaagaagcacattagagaagagagaaaaaagaggtgatttagaatattctttgtaaagaggaaaggggtctttcactcacacggcttaatacattaataaggaagaagcataataaagctcaagggcatttgagaaccaactgacaggactttccggatatagttccagatctaataacacagttttattgccccttgtttttatcagatgccaataaaatcagaaagaaaccattatcatttctcagtcattctctcacattcatacattttataacatactgaccttacaacataagcagtaatagaatagctcttcaatttgggtatccttcaatttttttaaaaaactacaccaacataatcattcaataaatgtattattattctagacattaaaacagcaagaatagatatatctttccctccaaaaacttaggcttagtctagtgtagaggttgataatagtt

SEQ ID NO: 1881631 - DNA, 4001 bp, Homo sapiens
aaatgtgtcattttaggtcgccaaatatgcaatgccatttagaccctcatacagtttttttttgtttgttttgtttgagtctctttctcccaggctggagtgatctcagctcactgcaacctctgcctcctgggttcaagcgattctcctacctcactctcgagtagctgggattacaggcgtgcaccactacacccagctaattctttgtatttttagtagagatggggtttcactatgttggccaggctggtcttgaactcccccatccacccgccttggcctcccaaagtactaggattacaggcatgagccaccgagcctgagggcctgaggggcaggttaaattgtaccaaattgaattaatcctgctgatacactaacatattaactttttcattttctttagatgttgatatatcactacttgtgtcttttaacaaaatgaaaaaattgactactgatgggaagttaattgccagagcattgagaagttcagctgttgtagaggtaagaatcaagaataactactgtttatatttatagtttataattataaagaatgttaacgtaatgattattatatgattatagcttacaattataaataatattagttttattaatgtaatatactattttaaagcttgatttggaaggcaccagaatccggaggaaaaaacctctgggggaaagaccaaaggatgaggatgaacgcacagtgtatgtggtaagcttaagaacccgggtccccagtcagaaactggcacagaaacaatataattaagttaaaaatttattgacattctgattgtgaaaaactctaatattgcttttaatttataataggagttacttcccaaaaatgttaatcacagctggattgaaagagtatttgggaaatgtggcaatgttgtttatataagtataccacattataagtctactggagatccaaagggatttgcgtttgtggaatttgaaacaaaagaacaagcagcaaaagcaattgaggtaagtccagatcctaaaaaaaaaaaaagaaagaaaagaaaacaagtattaaaatagtaacttttgcaatcatttcagtttcttaacaacccaccagaagaagcaccaagaaaacctggcatatttcctaaaacagtgaaaaataagcccattccagccttaagagttgtgggtgagtatttttcaatatttaaataggtgtagttgaagtaagatgaactaataatgatggcacttttacagaagagaagaaaaagaaaaagaagaagaaaggccgaatgaaaaaggaagacaatatccaagccaaagaagaaaacatggacacaagcaacaccagcatcagtaaaatgaaaagatccagacccacatctgagggctctgacattgagtccactgaaccccaaaagcagtgctcaaagaaaaagaaaaaacgggacagagttgaagcatctagcttacctgaagtcagaacagggaagaggaagagaagcagctctgaagatgcagaatccctagctccccgatcaaaagtaaagaaaattattcagaaagacatcattaaggaagcatcagaagcttccaaggaaaatagaggtaaaactacaaggttttaattagataaaactaattaattttaattaattagtttttaattaattaggttttaattggcttctgtttcacccatttcacagccccatgtcttaacggagagcttttttatttatttcaagatatagaaatctctactgaagaggaaaaggatactggagatctaaaagatagctctctcttgaaaacaaaaaggaaacataagaaaaaacataaagagagacataaaatgggagaagaagttataccattaagagtgctatcaaagtaagtctgtggtttaaattctgtcattggcttaacaatccatcaccattgctaaagtgcaattccaatttatattcaacagagttgcatattagcaacagtaatggcctgtagccaagaactgcacacagtgtgggcgttaacgcaattgctgattaggtaggaaccaccacactcaaacatggaagcacttatttttgtcatgtcacagcaagtgcctccatgttaaagtagagggggccccttaacagatgtaaaaatacaaaataaagcttaaatatatgagctgcggtcaatacaataaagttattttctaaaaaaataataaaaatgtaaaaggaagacttaccatcaccaaaacatggaagcacttacttctttagtttcaaagcaagtacatccacgtttaagtggtggggagcccagtcttggaaaaagttagaatcctttaacctgtaacaagcttagtaaccttaaaacacaataacaaaaaaattttgtaacaaaaggtgtgctggcttggagacacctccactgaaacatggaagcacttacttttgtttcacacagcaggtacccccatgttaaagcaaaggggatcccttcaaatgaggttagcgtgttctattttggagaagtaaattggattcactcctactaaaacatggaagcacttacttttaaagtcacagaaagcacttccatgttaaagttgaagggagcccacccaacatacaacttctttggacttcagagtatttagagctgaggagaaagaaaacaaaatggcataactttagaagaaaaaaatttttttaccttcctgaactagttcccaaagattcgtgttctcctccagaagggtaaaaggcagggacttcagccacttctatttatactattcttaactcttgaattccttttgcctttttatctcagagaatcattacaagggccttttgttattttaatgtatcagctctcagggaatgtatgatcctgggtgggtctggatccttttttttttttttgaagtatacagatgtcaatgttaacagctaaaaccattaccacaagatatcttcctcttaaaaaaaaaaaagaaaaagaaaaagaaaatctcctatctgcttgtttgatggcatagattagggtaacaatgagtgctcccactgagccgagaaaggcattgtgtttctatctggaggaactctgtttgaagaagcatctacatgttaaatgtatgtaaataaatagattgcttccacggggtgttttgttctacttagaaattctttttgattcaagtaaatactaaggaatgttatctctcaaattggaagcagtttaacaaatctttaatctcgcccttttcccacagagatgactgatttagtaaatgttactagttaaggaattaatgctaaaattttacttttataaattaaaatacttcagacactcaaaaatttaattggcaatcttaaaacatttaatctgaatattgggggaagaggaactcccttagcttattttgctaaatgtctttagaacctaggaaatattttgaatatgtgtttaaagaaacaggaaagttggtggaggagttgctccaagtcattgtgaatgtatatatttagatatttccctatttactttttatatttagtcatctgttatcaccatttctttccttgtaggagcgaatggatggatttgaaaaaagagtatttagcgctacaaaaagctagcatggcttctttaaaaaaaacaatatcccaaataaaatcagagtcagaaatggaaacagacagtggagtacctcaaaacactggaatgaaaaatgaaaaaagtaaagatcactgatagttttgacaacattataatgtacttatatatgtaaatgctatctctgagttgttataagataaattttaattttaaaaaacttgattattctatttcattattagaacaattcttgatttgttaagttatccagatgtgttacttactcttgatataagaatatttaaaaggctcatttaaaacaattttttaaataacctgagttttctctacagttttcatcaagcacatgagtgcag

SEQ ID NO: 1881632 - DNA, 4001 bp, Homo sapiens
ttcatcaaaaccctgagataggtattattaatagccccattttaaaaagatacagctgaaaaagagaggttatttgcccaagtcacataactagtaaatgatggagctgtgattcaaacacagcagtatacctctctattttgatgcatttatccattaattcaaacatttaatggccacctactgcatacagagcatcatactgggaaatgagaacagggcagtgaacaagataggatcattcatgaagttcaccttccgactaaaaaacagacattctcggccgggcatggtggctcacgcctgtaatcccagcactttgggaggccaaggagggtggatcacctgaggtcagcagttcgagaccagcctcaacatggagaaaccccatctctgctaaaaatacaaaattagctgagcgtggtggtgcatgcctgtaattccatctacttgcgaggctgaggcaggagaactgcttgaacctgggaggcggaggttgcggtgagtcgagatcgcaccattgcactccagcctgggcaacaaaagcgaaactccgtctcaaaaaaaaaaaaaatcctcatttttctaacaggtgaggtaatcatagattgcacaaaaggtcataaaggaataaacaaggtggtgtgacagagtaactgggaatgccttacttctgttaatggtgtgatagaaaggcctcttgcagttttgttctgtttgttcccaaagacaagctggccagacagccaggccagggaccagagcagtagaaagaaagacctcctagtgatcacagaagtgttaaggaaaatccctaatttcttctttttggttttttgttttgttttgtttttgtttttttcttgagacggagtcttgctctgttgcccaggatagagtgcagtggtgcaacctcggctcactgcaacctccaccacccaggttcaagtgattcttgtgtctcagcctcctgagtagctgggactacaggcgtgtgccaccacgcccagctaatttttgtatttttagtagagacagggttttgacatgttgcccagtctggtctcaaactcctgacctcaggtgatccacccgcctaggcctcccaaagtgctgagattacaggtgtgagccaccatgcccagccaagcccatatttcatcacagatgtataaagcgcttagaataagttacagtgacttgatcaaggtctcaagctgggattgggggaacagctgtgatttcagaagacaggtgacacttcggaaaggaaagaatgtaaacatagcctttggctagagcaagaggctcagaagaggggccctgaatgtggggctggaatcctgaaagcaatgagggatacgcataatcagactgcgggaaaaataacttctgtacaaaaggttttgtttgatagggttttttgtgggcgtttgtttgcaaggggaggaattacagtagagaaataaattaagagagtatgacaactgatttggtgggaaattttaaaagctgaccataggaggtggtaacagaaatgaagaaaaagagacagttgggacagccactctgggaatatttgagtgcatgtctaacagtgataccagaaatatacctgcagaatccaacatgtaaatacctccaatcctaacacacggaataaaccctagatgttttgttttcacaaatttgtctagcatttttccacaaaccccagtgattcaccttctttctacctgtttcatgaatgtggtttcacactacctttttaaaatcttaacagaagattgtaatacatattaattcaaaatgccacctacttttaaagttattctactcagatggtacaactgtcaaaagcaaacactgtttcttaatttcaggtcccacacaggccacaacaagatagaatttgggaattttaaagaatctaaaggacgtgtactaggtctaacatgagtaatgctcaacatgttaaacctagtacaggtcctttagattgttcggtaatgctatttttagatcaagcaacactcctccacgtgcaagtttttccaaattatactaacaaggtcaaggatcatatcctatctaaaaacaagactgtataacacagctaagaccttttgcaatcgcttatctacaaatattgtgacgtaaagattgtatttatttatatctttacgtttttatgttttatgttggaaaacacttttattatttgtattgtgttcatatatctgccttcattcttattcatatttttatttatggcagagttaaatcgtactagaatcctttaaaaaataaaggactttacattataacagcatttcacgttccttggataatctgggtctcagaagaagcttgtgaaacttacaaagaaagctataatcatcccctctgtacagtgtaacactggaactcagaaagattaagtaactttactaattcaagatcgcacaataactggcaagggcagggccccaatcaggccttctctttattccggctctcctccccacaggacgctaccaatttaatatttgaatattcatgtgcctctcttcactaaacctggactgtaactaagagccatactattgccgcccagccctcatcctgggtctcgaaatgcagcagcaacactagtactcttcagtaaacagaaacacgagcacacgcttcagtctggaccccattcaacgctgggtttgctctactgcacaaaacttaaaatacactacagcattcacgcctaaccctcaatggaactgtccttttcactctgggaaattcagtcacaggtgactcatcccgttagcttacagttttgtaaattaataattttatataccgaaagaaaagaatgaattacacagacctctcccttccccacccccaaagttgcttaagtgtcaaagcacggtagtaaagcacaaagaagtggggctggagctagctagcgttcctcctctctgcgactccgacggtcctcgggccacccatctctcagagcccggcaggtagcttcagccccccaccccgcagggacccgacggacggcccggcgcctccagcgcccagacccgagccccgccggtgctgcggatgtggaggctcgcgacgctcgggctgccctccttcccggcgccgctacctgcctccggcagcccgcacacctggcggcccccgccccagcgcggggaaccggccccagaacgcggaggtctagcgcggccacgcgaccccgcacagcccgcttccgccccagcccacatggccgcggcgggtggcgcccccgcccccgcgtgagcccagcgcggttcccgaggacccagggaccccaggaggcaggagggggcggtggcgacgcgggtggggggaggaggaaacgcggccggggggaagaggaggagcgcgtcccgactcgccgcaagggcgggaggagccagcaggggagaagcgaggaggggtcccgcagcggcggcatatccgcggggcagcgggcgcctacctgcgagcagaagtacgagccctggatgcccagcttgatgcaagtgggacactggagcttggcctcactgctgcagccgtctgtctcgcacacccgcgtctccacggccgccatgctgcctgcccgctggaagagcgcctcaccgaggaagaggcggcggcgggagggaggaactgccgggcggaggggaggggagagagaccgagtcgggggaggagctgggcccgccgctggcctgggcgcgggagggggaggagccagggccggccgggaccacgcagcgcgccccgccccggccccgcccccgccccgcgcgcgcagctggtgccccgccccgccggcttcgccccgccccccgccggcggtgcctgcgtgcccaagcctcccggcggcgcgcacattggggctgtaagggagctcggcagggcccccccattcggcgccttcgggcgtcggccagcagagaacgcgacctgccggc

SEQ ID NO: 1881633 - DNA, 4001 bp, Homo sapiens
atatttgtaaccacaaagaacaataatctcacactatcttctgggtaaactgctcctacgtttgaattgattttgtaaagaggtaactgtggtttgtggatgaaaacatttgtttatttgcattttttgttgttgttgtttgttttcttgagacggagttttgctcttgtcgcccaggctggagtgcagtggtgctatcttggctcactacaacctccgcctcctgggttcaagcgattctcctgcctcagcctcctgagtagctgggattacaggcacacgccaccacaccagggtaatttttgtattgttggtagagatggagtttcaccacattggccaggctggttttgaattcctgacctcaggtgatccgcctgccttggcctcccaaagtgctgggattacaggtgtgaaccaccgcacctggcctatttatttgtgttttatgatactatttaccttctcactgccaccattctcagggctttatcagtaccccacaaaaaacacaccttttgatttcctccctttttacctgtggtagtaactcatttaatgccatgttccccccttcatgaagcatcttctagttgcttagtctagaggttgaatttttctttatgctgtcactgtttttagcttgcgtttcttctgggcattccttggcaatgcataatttcgtaattattaagtgtacatatctcatttttaaactgcagaattcctcaaaggttaaactacctttatgacctttatgtctccatggcgttttataataccttagcattccttaaatattcaaatgtataatatgaagtgtgtttgacattctcatagtaatagaataagaatactaatggggtatatagctcagtttggtgcagtttttaaaatttaattcataggcagttatttttattatttgaatacaacattgttcaggcttgtaaattattttaagacagtcaaaattgattcttagaaaattgcctggttaggtgatagcaattcaaattttacttagtcaccatgatttgtgtaagttacagaagcaagtcagaagcaaagtcctgaattctaggcatggtgttatgaatctctatgccctggactgcagtttattgccttggattatatttaggtatgtatatatatgtttgctttccttgaattttgaactccctgttttatacatgtaccttataacctttcttttgttaggagatactttaaattgtacgttctatttcatctagtaaaatccaagaagaaaaaatactgagactaataatgtcttaacttttacattactgtcaatctaatagtacattttggggcctaattctactgaggaagactagctggaagagagggactgatgttgtatccagttactctccacgtgaccctggaaattttcattggatcttagttttctcacctgtaaaatggaacacaatgctttccatacctattttcagggttacgtaagtttaatatatgagaaagtacttcgcaatggaaaagtctacatgaatgtaaagtattactattgctgacataataaaaatattagtgtcagtagaaattgtgagtcatttataaagataataggctaagatcttcttaatattcttaacatttggctagtagtttattcacccctctttttggtgaatacaaagcagtaaaaccatgttttcaaattattatttggttatgcaggttaatacttatatggattattttagaagtacaggcttcatgttgagttttgtaaagagctttctctttgccaaaacattttcagacttcaaagaaccattgtgtaaaaactcttttacaccaatgtatcttaaatagttttgatcattttatttaaataaagaagctgaaccaaaagttcttcactttaaagagtggcaaagtctttccatatgtgtaacagacatacatacatacatatggaaagactttgccactcttgaaagtgaagagtgtgtgtatatatatacatatggggggtgtgtgtgtgtgtgtgtgtgtgtatatatatatatatataaatctattttaagtatattttttggaatacatatttgtagaagaaaagatttgtaattgtatgatatgaatggatgcagtcttttgattattgaaatctgtcatcattctgtatttaaatttgaatgctgctatgtgatcttagacatggaggcagaaacttgcatagaaatgtaataagaataagaatcttgaatagaaatcttatcgctttctttttgaagaatttgaaaagcaattagaattgctttcatattataaatgctcaccattgaaaggtgcaatattaatgaatctttatattatgcctctagttatctcttaagagttactttgataatatagaccttttgaaagtgccacactgatggtttcaggttgcctgtcagtgtaataatacataatgcttacagttatggtgtcagttctttattttatgtttagggagcacatatctcagaacagttcaggaaagacatagaaaagcagttgtcatttataaagtgtgtgttatgtgccagaaagtcacctagatgttttcttatggtttattcagttctaacatcaaccttataaagcatgaggtactattatcaatttaccaatgaagaaactgagatgcagggattaagtaatttgcttaagaacaaataactgatttcaaagtccctattctatccactctactccccctataataagagcaggtgtaaatgtctatgttgttgttaataaagacttttacaaaatgaagttctaatttagttaggatgtttttctctttttcgagacagtgttactggaaaggggtcccaatccggaccctgaaaagagggttcttggatcttgggcaagaaagaatttggggtgagttcatagaataaagtgaaagcaagtttattaagaaagtatgggaataaaagaacggctactccatagagcagccctgaggactggtggctggctgtttttatggttatttcttgattatatactaaacaaggggtgaattatttatgagttttcctggaaaggggtggggattttccccagaactgaggtgttcctccctattttagaccatacagggaaacttccagacattgccatggcatttgtaaactgtcatggcgctagtgggagtgtcttttagcaatctaatgcattataattaatgaataatgaacagtgagcactaccagaggtcacttttgttgtcatcttggttttggtgggttttgtctgcttctttaccttgtcttatcagcagggtctttttgacctgtatcttgtggtgacctcttatctcatcctgtgaccaagaatgtctaacctcctgggaatgcagtccagtaggtctcagccttattttacccagcccctatttaagatggagttggctctggttcaaatgcctctgacaacagggtcttgccctgtcacctaggtggaattgcagtggtgtgattatagctcactgcagtgttaaattcttgagctcaagtgatcctcccacctcagccccccaagtagctagaactacaggcatgcacatttttctttattcaaatttctctgctaggtcatttttattttagagatgaatttcggatctaaagtctaattttattaaaattaaaaatttttaaacaattagagttagtagagtaggactggaagggcttcttttaatttagacccaggcttagcgaataaattactctaaataaaagttatctattattgttttattttattttattttttgggacaggatgttgctctgttgcctaggctggagtgcagtggcacaatctcggctcactgcaccctccgcctctcaggctcaggtgtcctcccaccacagcctcccaagtagctgggaccataggcgggcaccaccacgtctggctaatttttgtattttttgtaga

SEQ ID NO: 1881634 - DNA, 4001 bp, Homo sapiens
ctgagaggcggagggtgcagtgagccgagattgtgccactgcactccagcctaggcaacagagcaacatcctgtcccaaaaaataaaataaaataaaacaataatagataacttttatttagagtaatttattcgctaagcctgggtctaaattaaaagaagcccttccagtcctactctactaactctaattgtttaaaaatttttaattttaataaaattagactttagatccgaaattcatctctaaaataaaaatgacctagcagagaaatttgaataaagaaaaatgtgcatgcctgtagttctagctacttggggggctgaggtgggaggatcacttgagctcaagaatttaacactgcagtgagctataatcacaccactgcaattccacctaggtgacagggcaagaccctgttgtcagaggcatttgaaccagagccaactccatcttaaataggggctgggtaaaataaggctgagacctactggactgcattcccaggaggttagacattcttggtcacaggatgagataagaggtcaccacaagatacaggtcaaaaagaccctgctgataagacaaggtaaagaagcagacaaaacccaccaaaaccaagatgacaacaaaagtgacctctggtagtgctcactgttcattattcattaattataatgcattagattgctaaaagacactcccactagcgccatgacagtttacaaatgccatggcaatgtctggaagtttccctgtatggtctaaaatagggaggaacacctcagttctggggaaaatccccacccctttccaggaaaactcataaataattcaccccttgtttagtatataatcaagaaataaccataaaaacagccagccaccagtcctcagggctgctctatggagtagccgttcttttattcccatactttcttaataaacttgctttcactttattctatgaactcaccccaaattctttcttgcccaagatccaagaaccctcttttcagggtccggattgggacccctttccagtaacactgtctcgaaaaagagaaaaacatcctaactaaattagaacttcattttgtaaaagtctttattaacaacaacatagacatttacacctgctcttattatagggggagtagagtggatagaatagggactttgaaatcagttatttgttcttaagcaaattacttaatccctgcatctcagtttcttcattggtaaattgataatagtacctcatgctttataaggttgatgttagaactgaataaaccataagaaaacatctaggtgactttctggcacataacacacactttataaatgacaactgcttttctatgtctttcctgaactgttctgagatatgtgctccctaaacataaaataaagaactgacaccataactgtaagcattatgtattattacactgacaggcaacctgaaaccatcagtgtggcactttcaaaaggtctatattatcaaagtaactcttaagagataactagaggcataatataaagattcattaatattgcacctttcaatggtgagcatttataatatgaaagcaattctaattgcttttcaaattcttcaaaaagaaagcgataagatttctattcaagattcttattcttattacatttctatgcaagtttctgcctccatgtctaagatcacatagcagcattcaaatttaaatacagaatgatgacagatttcaataatcaaaagactgcatccattcatatcatacaattacaaatcttttcttctacaaatatgtattccaaaaaatatacttaaaatagatttatatatatatatatatacacacacacacacacacacacaccccccatatgtatatatatacacacactcttcactttcaagagtggcaaagtctttccatatgtatgtatgtatgtctgttacacatatggaaagactttgccactctttaaagtgaagaacttttggttcagcttctttatttaaataaaatgatcaaaactatttaagatacattggtgtaaaagagtttttacacaatggttctttgaagtctgaaaatgttttggcaaagagaaagctctttacaaaactcaacatgaagcctgtacttctaaaataatccatataagtattaacctgcataaccaaataataatttgaaaacatggttttactgctttgtattcaccaaaaagaggggtgaataaactactagccaaatgttaagaatattaagaagatcttagcctattatctttataaatgactcacaatttctactgacactaatatttttattatgtcagcaatagtaatactttacattcatgtagacttttccattgcgaagtactttctcatatattaaacttacgtaaccctgaaaataggtatggaaagcattgtgttccattttacaggtgagaaaactaagatccaatgaaaatttccagggtcacgtggagagtaactggatacaacatcagtccctctcttccagctagtcttcctcagtagaattaggccccaaaatgtactattagattgacagtaatgtaaaagttaagacattattagtctcagtattttttcttcttggattttactagatgaaatagaacgtacaatttaaagtatctcctaacaaaagaaaggttataaggtacatgtataaaacagggagttcaaaattcaaggaaagcaaacatatatatacatacctaaatataatccaaggcaataaactgcagtccagggcatagagattcataacaccatgcctagaattcaggactttgcttctgacttgcttctgtaacttacacaaatcatggtgactaagtaaaatttgaattgctatcacctaaccaggcaattttctaagaatcaattttgactgtcttaaaataatttacaagcctgaacaatgttgtattcaaataataaaaataactgcctatgaattaaattttaaaaactgcaccaaactgagctatataccccattagtattcttattctattactatgagaatgtcaaacacacttcatattatacatttgaatatttaaggaatgctaaggtattataaaacgccatggagacataaaggtcataaaggtagtttaacctttgaggaattctgcagtttaaaaatgagatatgtacacttaataattacgaaattatgcattgccaaggaatgcccagaagaaacgcaagctaaaaacagtgacagcataaagaaaaattcaacctctagactaagcaactagaagatgcttcatgaaggggggaacatggcattaaatgagttactaccacaggtaaaaagggaggaaatcaaaaggtgtgttttttgtggggtactgataaagccctgagaatggtggcagtgagaaggtaaatagtatcataaaacacaaataaataggccaggtgcggtggttcacacctgtaatcccagcactttgggaggccaaggcaggcggatcacctgaggtcaggaattcaaaaccagcctggccaatgtggtgaaactccatctctaccaacaatacaaaaattaccctggtgtggtggcgtgtgcctgtaatcccagctactcaggaggctgaggcaggagaatcgcttgaacccaggaggcggaggttgtagtgagccaagatagcaccactgcactccagcctgggcgacaagagcaaaactccgtctcaagaaaacaaacaacaacaacaaaaaatgcaaataaacaaatgttttcatccacaaaccacagttacctctttacaaaatcaattcaaacgtaggagcagtttacccagaagatagtgtgagattattgttctttgtggttacaaatatgattcttgacaattaccatgcacatgaatggggttctacttgacaatgagaaatgaggactcgggttttttcctctaaaagaccatccta

SEQ ID NO: 1881635 - DNA, 4001 bp, Homo sapiens
gctgcctcccagtcaggcggtgggctgggggaggagcctgaggccctgggacaaatggcctccaggatatatatacacacatgcgtgtctgcatatgtagacggtggcacatgttatgtgcacatataggggaagggatgaatgccgtgagacagtgcagataaagtaacagaatgcaaagttagagttggcttccagctgacagaccctgccagcatcaaaaagcaggagggcttcgatgtggggaaagcttccagggaggctcaggggtggggagatgctgagtgtgtttcgggaggagccaccgggtgggtaagttggcaggcagagctggagagaggaggaggaggggacactcgagagggtggaaagcttccatgcaaaggtagagagtttggattttaccctgcagataagagtgggtggatataagaagtatttttgcacacaggagtgatataaaaagtgctgcctttctaaagaaagagcagtctgacggccggtgctgggaggtgaggaaatggggccagggaaagctgtgataagggtgtggccagaggctgcctgtgaaggcagagaaggctcagctactgcatcaggcacaaaaagcagcagagtgtctctctgatcccatttggaaaaaagcccccgaaggaacctaataactaggaacagcagccccctgctctgcccccagtatgctggtttctggtcaagcaggaaagtgatgagagcccagaggagatacacacttgagagatcccagggtggctgcctcagctcagatcccagtggctggaagacaagcctgcagggtggaggctgtcagagcccagagcacagggaccacatgcagggaaagctaatcccagagtggtgggccggggcccactgcgatgcacgtgacagtgatgcacggggacagaggatgggccctcccatctcctcagaatcccaggaggtgtgtctttcaaaacaactgcctgaaaagatgcaaaccttaagtccgtgtttcctacacaatgaaaaacaaataaccttgtgggtcgggtaactcatacctggccctctactgcacagtagtcagctttcactgacttggtccaatttgtcacttacttatcgaacaccttctaggtgctgggccctgcatcaggtgttggggctatgctgggaaataagacagagtccttgggggaattggacccacgggaaggggcaggcgtggcatgccatgggtaactctgcagaagagggcttcggggagagtgccttgcttgtaaactgcctatctaaccatctcacctgtagatggtaagcaccatgagggcaggagaagggttgtcctcctgtcccctccagctcctgcatccatggcagtgcccagcctgcagcggccctcgtggcatgctcatcaaatgggcagatggatgccagactctagggtgggaaaggacccagggagtttgctggactccagcctcctggctccaagtaacacacaactcatggtctcctcattagctctctctcctcccaaccctgtcccatggctctgagagacctttgaaaggcaggagcctagaccttcacctcaccccagcttctctcccagctgccctaaactgtcattagtaatcatcattctaaacattttgacagcacttcagcattcacaatccacttttcacacattttctccctgggagcccaaagaaactctaaggagggacacagagtgaactttcctggagtagacgcgattttccctgttccaggagggaaagggacctgacattttgcacgtgtaattaacttaattatctcagcaacaatgcaagggagcgattataatccctgttttacagatgagaaactgatattcagggaggttacaaatgtggccgaaggatcgcagctaaagggtggtagagttgggattcgaacctgtttctgactccaagtccagtaataacaacaagaacaaggacagaaacagtgatggcaatgagccctgagtgtgaactctggaccaagcgcagagcccacatgtgctactaattgtgttcattgctaacaaggggaagggggatgcggattagatagactcagggaggaggcttttgtggcgggggcggctggggacaggtgtgcattagtgcctgcctggaccccaccccaccagcacaggtgcaagcagatggagagaatgatagaaaggaggcagaacccacagggctgggcgagggatcgggggtagggatggaggggagaaggctggcctggtgccaggcatgatccatcagtagggaatgtgggaggctgtgtggtcactcctaacccagcccctcccacaaatttccttccaatggctccggcctgtagacttaggccacacacattgagagttgtcatggttaatactgagtgtcaacttgattgggttgaaggatgcaaagtattgttcctgggtgtgtctgtgagggtgttgccaaaggagattaacatttgagtcagtgggctgggagaggcagacctaccctccatctgggtgggcaccatctgatcagctgccagcgtcgctagaataaagcaggcaggagaagatggaagagcagacttgctgagtcttccagccttcatctttctcccatgctggatgcttcccgctcctgaacattaggctccaagttcttcagcttttggactctgggacctacaccagtggtttgccaggggctctcgggccttgggccacagattgaagtctgcactgtcagcttccctgcttttgaggttttgggactcagactggcttcctggctcctcagtttgtagatggcctattgtgggtcttcaccttctaatcatgtaagtcaatactccttaataaactccccttcatatatgcatctatcctattatttctgtccctttagagaaccctgactaatacaagagccaagagtcaaatggaaaccaaaatagtcgatttctgattaaactgcaggagctgatggcttaggtttgaggccaaaagtgggggctcctggaccctccccacatccagccctggaggcctatcttagcgagaactgggacaggcacagcacattcccagcctgccccacacccagggccagcaggagcagagagcaggaaaggccagacggtttgttggaggctgagcaagggtagagaaacctcctggcctggccccgagcatgagccgctgtgaaccgtcaatccctggctatagggccctcagtgctgagaacccagggcgggcctggagcagcagcccaggtcttctgccatcagagtggctggccgcctctctcggggaggaaggaggagggactcctgggctgggaactgagatcaagttccacgtggatgtggggagaggggtatccacttgcacaatatgaagcggctttatagaggaagatgccaagtccagctgtagctctttcagttgcccatggaacatccaagtgggaacaggaaggtgcattattacagaacagcaggtcagagggtccggagcttagcagggaggtcccagtggccgccaggtgccagggcaagggtggaaccctgggaaggagcacttgggtggcaggtgtgcagctcaggaggaagtctgggaattccctggccaggaaggggagtgggagaggtttggggggtggggcaggaggttcgcagtggtggccatgcaccaggtaggagaggaccaggaagctgcttttgggtttgccaagatgttggtctgggccacttgggttgggagggagaggccagcagagggagtggagacagacttcactgagtggggaagagaagggaccagctgatggagggccttctgagatgggcagagggaagggatatggcgctcggcaaggggagacccgcaacccctgaagcagcaaggaggtgtggtggggggtgggctctagtggggagggctgttgggggacccccaggccgctgga

SEQ ID NO: 1881636 - DNA, 4001 bp, Homo sapiens
tttcacttttagagcccctcactagcactgacaccttcttccgaggccccagaggggacccagaattgtgttcacatggtcatatgtttcgtaaatgttcagaggtaaagtatctttactacaactagttaagtctgctgtaccttcacttcagcctcccttccatcacatccccttgcgtcaggtgttactgggcattttggagacccagctaaggggaaattgagttatagctatatttagttttggtggagtaggttataatgatgtggttttcagtaacttcaacacatggttaagttattactgggcaccccagtgtagaaatgacttccaggaatactcctatggcttactgactaactcaaacagcattgtgacactaaagtccaggaccagaggtcatactgtggtatgactgtatctcctagtacccagaattcgcatgaaaatatatgggtagtggagaaaaacaaggtttgaaaagtacatcgccagaagctagtctgtggagaattcttccaatcagatataaaattacaaggacaatacctttgtgtatagttctggcttttaaaatctttttaatgtttcacatattcaaagaacaaacttaaaatgaataaggtccggcaaggttacaggattaagagcaatgtacaaatattaattgtattgtatacagtagcaatgagcaaaccaaaaatgaaattaagaaagtaatttcacttaagataaaaattctaaaatacttagaagtaaatttaacaaagatgtacaaaacttatactgtgaaaactacaaagctttgttgaaataaatcaaagaagaaaccaaataaatgtaaaaacagtctatgttcatggattggaagatttaatattctcaagatgtcagtgttaacataacaagatgtgtgttatactttagtttttaaaaaatggccaaaaacgtggtgggatagttgaatatgattcatccttcccagacccacatgacctgaacactgtgatgcgttataatggcagggagaggaattttggattcaacctgatctgaattggaaccctggctttattatttactaatgtatgtctttcctcattttttcttgatgttgctggttctgattttcttcatttgctcaataaggatgataaatagctactcctcagggttgctgtggggatcagatatgatacgagtaaagggctggcactactggtttcctaaacccaactcccttccatcttgcccatgtcccatgcaggtattggaaaacccaagcattgactctccagaccagcctcgcacctaagaacgccgtgggatgcagtttcagacagtgagaaatctgctggggatgcctgggaaagggacatacctggcaggtgccgctccatggccttcttgctgccttgaattgggacatgagcctgagtcgcagcagccgtcttgtgactgagaggtggcaagcaggaggaagaggctaagagaatagagacactgttgagctgctgaagcacagcaagcggccacttctctatgcttcttgctatttgactgttaagctagtgcaagttacttttctggtcagaatgaattcataactgaaacatgctttaaagtatgactattattattaaatgcagcataagctttccatagctgctacacgatcacacccactgctgtctcagactgaccagtggccgactaaacatgacagcaagtactgttgccagcctctgccttcttatacttgtggagtttgtttaaatctaaattcaggactcaccctgttaaattttatctccttagcttgtccccttcttttcagagatttgcaattcaaattagtattataacctcaattgatatatggctgtggaccagtcaggaatcattgaatcatcccccactttggaaagcataagaggctgtaattgcattttatatcaaccctctcctatgccctccccgtcacgtgcatcaacatctcttttctctcagaaagacctcatcttatttgaggtgatatttgagtacatagttccttttagggtactggggacctttttggtggtagggtggagagtgtgcaccacagagactagtcaccaagagtccctgcagttaagtctgcgtatcctgtgctggtgaagggtggatgggctttatgcaaatctctgcttggctgcagaatctcccagtgagatgagcaagggtgctttgcagtcagtgttgaaaccccagaagagcaggaaatgatgctgttcctgcccaaaggcagaatgaaatgcaaggaaaggagaaaaacattatgacataagtattaagaaagatgctgtttacgggaactctgaaagactggaattcagagccgctaccaattaagaaagttaatgatgacttgcagcaggtttgcagaaagtgaaaggaaggtgaggctatttaattgccaccataacagaagaacttgtagaaaataggaatgggatcacaatcattattaactcataaaaaatttatagggtgccatttctaatacgacactgtgcagggatactgcagtctagcgttacctccagtttagacaggctgaaatacatacagtttctcatctgtatgagataaggtgatataaaatgaagctgatcgggctagtttattggataaaaccaacaacgaagggaaataagtaactatttatacaacatggtaactatctacattgttcattagcagacgatgtttgtaactggagatgaaatgcattaagcatgtttgggaaaggaataaatgggatgtaaccatggaagtcctatgcttaaccagggtggggaggggggcagggatatagagaacttcaactagacaggcctggtggagaaagtgtgtgtctaagaattacttgcaaagtgagctgtgtcagggagcatcctggtgcatgctccaagatatgttggataacagttgagtacaactcatgatggaattacaaaactccaagatacagttggatagttgggtaacagttgagcatcaccatgatggaagagatgaagagactttttgaatgtgtttgagaggagtgaaatgaatcctacaatgataataataataattgctattattttttcagacacgtgtgaaaccagaaaaaaataaattaggtgaaagaatcttcattcctggtgacaccttagaagaagaaacagacaatcttggatggatttgttaaagatcagaggatccataatgtcatgcaaaatggtgggattgggggcaaacagatcaagttgatgagtggggttagcaacagtgagacctgaaagagaaaacaagttaacagaagccagactaagtgcaggactaacctgcaccctaagagggtgcaggctcaggaaccagtccatgaggagttgcaccatagtaaggggtagagatgaactgaagctcgctcatgattaccagcggtattggcctctccaagaactaaaaataacctccttctttgtcttgctgttacttccaagccacagccgagttctctctctatacttacacctcagatgaatgagcagtgcctgtggctgtggccagtgtcttttattcccacctggttcctcccagtctgtgttccatgttgtcactgccccaactgcacaagccttttcctagtcctcaatcttttctccccacagcagccctgggcacagtagacctccctagccttttgaggaacctcttctgttacctgactgctgtggtctacgtgaccatcttacctcttcctctgcattttccttgtgtctgtcactgactctctcccgtgtcccgctccccaactgtgggtgccccagatgtgtcaatcctcattctccgatcttctctctttatactagattctaattcacctttattcatctatactcccagagtcaagttttgattatgtatatataaccaaatggcatataactctatctatctatcta

SEQ ID NO: 1881637 - DNA, 4001 bp, Homo sapiens
agaactttgggcacagagacaggtgagcctgatgcggtgcctttcagatgccagctgtgtccagctgccgtgggacagcagaggcactgaagcctgcaggacagcagaggcactgaagcctgcgggacagcacctcccaggtgtgcctggaagctccaggggtcttgttaatatgcagatgacaggtgggcagatgtggggtggggcttgatgtgtgggttcccaggccatattttgggcagcaggggttggggagctaagaaggggtcagaggtgaggcacccagaacgccctgtccaagcctctgggctatatcctgaggatggctgcagaccgtggaagggccggggagagagctcctcgctgggttttctctgtcaccccagcagcgaggctgctgctacgctcctcggatcatgcaaacatgctacagtgccacttcatttctcattatgtccttggaaattttctgtgtgggatgtgattttgtcacgtgcatgaaaatcccagcacagtgcggcgtgagtccatgtacacatgttgctcgcgggggtgctacaggtttccccactgatcacacgcagtgtgcagccaccatgcagaggcggccttggcgcggccaggctgacagcccagaggtcaagctggaagctcggccatccccctgctggtgaggcgggactttgggggaggaagataaaggcagaggggaaggagggcgggggctccagctccaggggctgcagacgcccccacagcatctttcacgttcagagatggaagcaagtcctgtgacggcagagggaaagagcgaaggcagtaattattttattaaggaccaggaaatgatgaataatttaatttggggagagagctcatcactgatcgaatcaccgcatcctcagtcctgacatggcctcctctctaatgtcctctgatgtttgtggcagggcatcttgaagaagcttccagcaagcttcaggtctgcctgcagcctggcatttctgacactccccgggcagcaggtggcaaggagcagcacgaggatgatggaaagagaggggggagaaatgaaatcctcgatggaaaccgggtgcctgtgttgagtgtggtcccatgaaaaattcaagctgcgagcttggccgtgtgtagccgatgcacggcccaggcttcaggaggcgactgtgagttcacggcagggtcacggccacagatgtgaaaatgcaacatcgagctgtcacgtgaccgctgaaaagtgacctcatgggacacccaggattagggagcgtgttgagttactcccaagagctgaatatccagccaggtcctattccctttccctccacattcccacctacaagaaactaatgtcaccaaatctcgattacacagctctcggcatgcaattccgacatgcctgcagctgttcccacagacacggatgccactccagtcatggaaatgcaccatggggtctaagcggccagagggccttggagcggctctagacacaatggcgcaaggtgggcttgggaaagctgtgggggtacgttggaattcactgaggctgcaactccaggctgccttttgaccaccgagctgttctgaagctgggggagtctggcaccccgaatgtctggaccttagaagtgtgcaggggcccgtggaagctgcgttggccaccgactggggttggctggttagtgcccaggtgggccccatcagaaagatggcagcatcggggaccatgtcctctggggcttagggcatggcatcgctcagtgtgaggaccccaaggtaccactgcctcatttcccttgggcccgcccaggattctactagctggcacgctgggtggggagcgggggtactctcaacccattggctggctcagaccctcaaatagcactgggcaccatgcagggggagggactgctgggtcacctgacaaggtagaggagcgccaggccccggcagcagctcagttaccctaaatgcccctcgcctaccagattggatgctcagggccactgggctctgcaggggtggccctggatgacatgaaggacgtggtctcccccaccacccactctgccaatgctcccagctgctccttgcctctctccctccctaccaattgggggcagaagccacctgcccgggtacttctccccaaagtggatggccctggctaatgccctcaatgtgaccaggctggcttcacaggaccctcaaggctcctgaacccaaccaggcgacatcccagagggtgatgggagcagggctggccatggagaggcttgtctggagatgggacacttgaggccatgctgggaagtcctcctgagcactctgagaccagagagaccagtggcctggacaccccaggctgggccaggacagatgcccggggaattcagagctctgagaggcggctgcctcacttcccggggccaggcatcgtggcatcatcatcatgggcttcactaaccaccatggggcccggccatcatgggtgtcaccttattcaactctcacgtccacctgggagagaggaactgaatggtaaagcccattttacagataaggaaactgagccagacaggggctcaaactcagcagctgggctcaagcctgcagcctcaacaccaccgcctttctgtgcctgacccccacctcatgtctccctagtacaaggcctgccatatgcttggggttgggagagatgccttctccatagcaatacttaggggtgcaaaggatcctccctcttctatagttgaggaaacagagactcggagaagggtggagagactcgccagcgtcccatggtggggcagggagggctcggatctgagctctgtgtggctgggtgagtccaaagccacacggtcttcactgcacccctcagggccacacctttgcgcacacagaagagtgtgcccccagcccaggggagcaatatcggggaggacgtggcctttgccacgcgccttaggagcccagcaggcttctctctgacccctccatgcaccccctgccggcccccacactccaccaggcccaagcccagtccccgcagccagcagagaagcctttgcacacatggtcccacagccagttatacccttttctcctggtcccaaaggccaacttctgctcattccttagggctccattaagcattgcctccaccaagaagactcccctgacccctggggacaccaccactgctcccgctatggtgcccgggacccccttggggtggcctgagccccaggctgtcccacaggacagtgggctcctcctggctgggaccttgtctcggtcacctgagtctcctgtccagcctaggccctagagaaaggacactcaggtcaagtttgatgagcaaataaatgaaagcgagatcatcccacatcaatctcattaggcaaaggtgtttaacaagttttaagcagcaggaagttttgtccaaaatgaagtctaacctgaaagggctatgtaggagtgaagcatgaatgtcaggctgcttggtttggggaatggggaccatgggggaattctccacggtttccccacatccttctttgctcaggggcccccaaaggactcaggggagcacagctggaaaactactagcattaacacgcaagaccagacctgcacccagccctgctccgctgaggcacagccctccccctgctcaacaaccctcagtgtctccctagtacctacagtagtgagtaccgtctccctgcctccaacctacagcctgtgccagcctctggcgtcaaacttccctgccagccccgcctccccccgccccacaggaggactcagcaatgccttcccaggcctcggtgctgcccacaagatcttccctctttccggaagacccttccctccctcaaacttttcgcagaagtactgtgtcacctatggcacccctgaggggagttgggcacccactcaaccaggtcaatgggcagttttgtttt

SEQ ID NO: 1881638 - DNA, 4001 bp, Homo sapiens
gagctaattatttctacgatttacctaccaccagaaatccccattactatgaatgcttgaatgttcctgatctaatgttcaaatgcaaagttatagacttgagtttaaattctggtacccccacattaaaattatagaatgttggtcaaattaatttcctttcctcatttgtgaaaaagagacaatgtaagtaccttcctcatggagttactgcagaatgaaatgagttaatacatataaagagtttggcacattcaaataatagaatgtggagtttggaagagactgtggaggtgatttccacatactttgaccgtcttaattgcaaatcattgaattagattgtgatgtctctaaagacagcatcagattcatgactctgtctcaaaaatctagaaaaaagaggcagttcagaagtctgttaatagtatatagatttttcaatatttattctaatctgttatcctcagatccaatccctagggctgtaatgtttctagatttctgaaattaatgcagattaccctcattcagtacaagtaccaaagattatttgatataaattttcctcctgtatatgtattttccaatggatattcaatagaaagttaattttataagaagcttcatactcaaaaatgttgaataatgccacatcctttatacagtctcagaaatataccattcatattaaaagctacaagaaatcctatagcaaaaaaaaaaattttgatttacttctttaactcaggatttctgaaaattacttggtaaaggaacattttcactgcataatatctaacaacattttttagtataagtgatcatctctggtcactcttttgttcatataatgtttaaaaactattctttgttcctcagtcatttttgtatttagaaaagctgacaatgaagttgtgatctagtgcagaagcatgtctagcttcaaatcctgatgcctcacttagtagctaagttatgttaggcaagctaatccaactttcaggacctctaattttcacatctgcaaaatggagccaatatttgctttgaagtatttttgtgagtattctattctatgatatacataaagtagttattccagtctaggagttataaaaatggcctattaatttccttctgtgttgatctcattgttgcctggaattacaacagcaatgtaaaacatcctaattatgctttcataatagcttccttccttctttcctccattccttccttccttccttccttccttatttctttctttctttctttttttgagacggattttcactcttgtttgttgcccaggctggagtgcaatggcgcaatctcagctcactgcaacctccgcctcccaggttcaagcgattctcctgcctcagcctcctgagctgctgcgattacaggcttgcaccaccacaccaggctaatttttttttttttttttttttagtagagatagggtttctccatgttggtcaggctggtcttgaactcccgacctcaggtgattcacccgcctgagcttcccaaagtgctgggattacaagcatgagtcaccacaccctggcttataatagtttcaaatcacccctttatctttaaataatttcacttatcaaataaaatagactttttctgacagtgagaatgagacaggccatgcataatcactcagagggagagagagattaactaatgaagtattagaatccaaaactcttagtccaacatagggccttttccagttatatccttatatttgtcactgctttatcttctgctatggctgatatcaatgtctgctaaattctatgtcaggtgttagagggaaatgaaagccaaggtcagaaaaaaacatgcattttgtatgtgttttgttcctttgaagcgaaatgtgacctggttagacattaacttcccattatcacttttttatgctgactgctgactgtgctcaggtggcaaaaagaagtggtaattggacaaaaatgttctaaccctcatggtaattaaaaaaaaaaaagtagtgaaagcagcttcctcctgaagtctccattgtgtagttaaggcaaaatgtcaccaggaacaataaagcaaaaatggggcctttcaaaatgattgatcagtacttcaggtcccactcattggtcatctgacttggaataagccacactaattcacagcctactttccaaaggcaatgtcccccattgtgacctccagtggcacttctagtctggatttcacatcttgtacctgtaatgtttcaaacgtacttcatactgaaggaatatctttctaatactatgtgaaaagtttgtgatcaaagacagtttgacaaaacttcttctaggacctcatgcagaagaaaaaccttagtaagctagatgtccccagtatatggttctcagcttttctgtctcattttttccctctctctgcatgtattaacattctaacaatagaccatgttttgagaacagattcacattaatcaagttcatcaaagccatttttccattttatcaattgagaatgaaatacataaactgttaaattatcttaaatgattaaacttacccagttagcaggagtacctgggaagatagattgtaatatggaaattgagaagtgcagaatcagaacttctatagatagaaagtacatcgtatcttacttgttggtcattgcacaccttaagtgaattattaatttttttatttttttaattggtacataataattatatatatttatgggatacagtgtaatatttagataactatatgctttgtgtaatgattaaatcattataattagcatatttatcacctcaaacacttctcatttgtttgcaatgagaacattcaaaattctctcttctagctattttgaagtatacaatacactattgttgactagtcactctaattttcaagagaataccagaacttattcctgtctaactatgactttctaccctttgaccaacctctccttatatccttccctgaatactctcctcagccttggggaaccgcttttctactgttcacttctatgagatcaggttttttcagattccacatatgagtgtgataatgtggtatctgtcttctgtgccgtacttaactttatatgtcctctagtttcatccatgttgttgcaagtcgtagggtttcattttttaaagctaaatacaattccattgtgtgtatatatatatatcacatttattttattcattcattcatcgatggacacatatgtttagtccatgtcttggctattgtgaataatgctgcaataaacatgggagtgcagattctttttgacatactgatttcattacttttgaatatacagccagaagtgggatttttgggtcatttggtacttctatttttaaattttgtggaaccttcatgctgattttcatagtggatgtactaatttacattctcaccaacagtgtataaaagttctcctttctccacatcctccccaagttttgttacctttttttttctttttttatagcaactagtctaacttgggtgaggtgatacttcattgtgaatttgatttgcacttccctgatgattagtgatggtgagcattttttgtagacacctgttggctacttgtacttttttttcccaaaatgtttattcacattcctgcccaattttaaactggattatttgttgttttgctattgatttgagtttctttatattctgaatattaaccactagtcagatacatagtttatgaatattttctcccattctgtaggttgtctcttcagtcttgatgatttcctttgctgttcagtggctttttagttttatataattctacatgtctaattttgctttcattgactgtacttttgatgttttattcaaacactctgcccagtccaacatcatgaagagtttctcctatgttttcttttaggaatttcaaagtttcaagtcttacattta

SEQ ID NO: 1881639 - DNA, 4001 bp, Homo sapiens
acaattcttaccactgagttaaattttagaccaggaaaaaaaacacaggacattgttgggataatggactaaatttgaatattggctctggaagaggtattcctattatataaatggtatatatatttttttactctggtaattttactagttattcaagagaatgtgtttttcttaggaaacacacactgttcgaaaggttaaaaaatgtttattaagagagtaaatgataaagcaaccagagcaaaaatgttaataatttgtgaatctaggtaaagaataaaatgaggatcatttgttctattcggataatctctctgtaaaacttgaaattatggtaaaataaaacgtttaaaaaattcttgttctactttattaaaaatagaaaattctgatattttccttttaaaaaaataatctctgaagttagataactggaaacaaaaatttacaaagcttccccacagatccttatgaaataagtttatggtagaattaaacatatccaggtaactcaatcttttgcttttaagccaaattaattgagccaaaaacaatacagagctcttaaaacattttgttgatttttgataaattaagttgtcccagtattgccaaaatgtttacaacaataatacaacaaaactggccaggcacagggactgacacctgtaatcccagaactttgggaggccaaggtgggaggatcacttgagcccaggagttcaagaccagcctggacaacacagtgagaccctgctgtgattgcaccactgcattccagcctaagcaacagagtgaaaccctgtctccaaaaaaaaaaaaaagaaaataaaagaaaagaaaaaaaatcataaaactaacactcttcagtcattatatgattttcattattgaagttttatatttgctaaaatacctgtttttattgatccatctagtattaataggtgtaactgcaacatgtccttttgtttatgagcttaaaaatatagcagaaactactataaattgaggatttacttatgctaggtatggtgtaaggaaaattttaaaaatagcattctgttttttgatcttaaaaaatcctataggtatgattagtactttatctatttataaataaggaactgaagataaagaaggtaaagaacttagacctaacttcacacagtttgtagtttgtaactggcagaggtgaggttctaaacctagtcaacaaggctagaaagctagtaggtttcctagcaccctatgtagtacatatgcttgctagtactattagtaattccaatgatttttactttgggatttggcaaaatctctcaggataaataattcaaaatcatcaattgttaagtaattttcctagatgaattcttggaatcaagatgatagtctgcttaacatacgattccattatcttatcatgtcggactacagcctggcaaaggtacactgctctgttgaaaaataatttttaaatatactgttattaatctggaagaaactgcaatgtaggagatctagaaatagataatattaatttattctgaaaaattaaaaggacagacttgagtaacagacaaaatttccaaataagcagatcttgattttgaagttcaggtttttattctattttaattaaaaatctaataacaaaatcaaaaaacccagaaacaaaatccttgcaaatatttttcgttttgaacttcttttttattactattataattttttgttgttgtttttacatgcagagatagggtcttgcgaggctgcccagggtggtctcaagattctgggctcaaatgatcctcccaccccagcctcccaaagtactgggattgcaggcatgagccaccacacccagcctgttttgaaattctttaagttttcatatgagctgtcaaaaaggtttctagctacccattgctttcagacacagtagctctatttacgtggccactgccagcacatgagtcactgagtcagactgtgacatgcccacagcatatcccattatttaactcattgactcaaggaacacataagaaaaaatacacagtctacaaattaatcactttagcaaaattggctttacacatattccaggatacgtgcatgattaagcaagctatatttatgtcagcagagaactataaatagaatatttatttagagtcatcttatctaaggagatgtctaatttttgttgaatttacacctcagatgtcagactcaacagaaaaacaggcaagacatgcagttttgttttatcttcctccaccagccccaatgccaaatgtcacatgacacacacacatatacacacacacacacacacacgcaaaaaggttgtatttctccggtagtcagaatagcaatagcgaattcaatggttctatgaatgtctggatcatgttttggaaagaagtaacacttctgcagaaattttgtttccctgtttctcttagattcaaagagctggcaaactgccaaatcggaaattctgcaaactggaagtgcaaattgtgttatttgtattgtaatctttaacatgtgtcatttcaatgattcccaaatcacactatgaatcaaaattaaaactaaaaatgcaggttttgataaaataggattcaatggaaatgtaaaattacattttagcacagtgtcctccattgaatatgtttccttctttccctcttcctcttttcagtttagtctcacacaggttttagattttatctgaggtttgagagtaaagtgttgcataccttccaaaaagcttttgccttatttccaattattgcaatgcaatattagataagaatccaaataagtgtgatttatgggtattgttacatttatctggaaaaaaatgcaaacttaaaagtgtttgacagggctcaccacatgagaaacatctagacccttctagcttgtcaaagaaatggaagacaattgaaagagtttgtagtaaagcgtggaaaggaccaatttaatgattttgttaaaagaaatgaaaacaattatgtcattataatattactgctataatattatatgttatatgttgttataacagaaaaaagtcaacatctttcatcattcatttttgaaattaacttctgtcatacaattgaacatttgtttttgcttccttttttttctccaaatatttgggtttagttgaggttctggaaaaaacttagtgttttactttagactaaataagcttaaaattcactcaatatcagcataaaaacttttaccggaacattttgcataggaccatattcctgttttccataaatttaatctactaaaatctaagagccagatcagaattctttttttggcaggcgagcttagagaaaaattaaaacaatcagattgttttcttgagtctctataagcatacctcctctgcacagtgaattgaaaatccttttgcttccacatctgataaataatacaattagtaactctaataatttttatttttgatggaatgaaaatgcagtcatcactttgtgaattttttttttttttttttttgagacatggtcttgctctgtcccccaggctggagtgcagtggcacgatctcagcccactgcaacctctgcctcctgggttcaagcgattctcctgtttcagcctcctgagtagctggggctacaggcagctcctgtgccacgatgctggctaatttttgtatttttagtagagacagggttttaccatgttggccaggctggtctcaaactcctgacctccagtgttccacccacctcagcctcccaaagtgctgggattacaggcatgagccaccgtgcccttctgctttgtgaaataatttaagtgaattcacatgcatgcaacttctcccatgtgtgaagcaagtcaaacacaagaaacatgatctccacattctgaacagtaaatggaatgtgaatatggaatgaacaaatgtaattaaacacttattcactggaa

SEQ ID NO: 1881640 - DNA, 4001 bp, Homo sapiens
tcacgtcccaccaggcccctcctctaacatcgggattacaattcaacattatccaaacttgtgagcaattacctaaatttatgaggctagactttacaatatggaacataaaagtttagataaaaaggtaagaacaatgctatgaattaagaatgactccaagataaatattaatacttgctacatagacacacacaaaaaaacagaatatgctgacagatactccttctgtgccaaattttgtgaaccttcttaggctcaatgcaatgaaataatatgaagagtttatattcttaacagctcgactgtggtcctttcctagtttggttgaaataattcttaactgttacaccaggacaccaaatctcaagagacaagtgactttccagaagtcacattgcctaaaagttatacatgtgaagcctctcattcagagatactcacaggtgatgaaacttgagttatcactaatccatttctttacctgtgaaatgggagaatagaatctgtaaggttagccgagagaaaagacaagagacccaaggtcaggccaagtaagtttattaacctgccaggcttctccaccagtcggaggtggcagccctgagcttacaaaatgaggggtttatatgggggagagagaccctggggttgttagtcaattaactttaccacatataatctcatgaccggcttacaatatattatcttgtgaaaataggaatttacaagggggtgtaatccacgtttctcatgacctcccccgtgccacccagagggcttcggtgtagcaagtctggtgaccttgctatagcgcctagataacggttcaggaatgcagctgcagagtattcagggtaagggtcagctgcattgagttagcgggggcggagtggtcctggggcagcctgtccctaacagaatccacctccgagttgtgacaattaaatgaaaaggttgaaaaggtgaacatgaagcacctgctacactgccctgttgccaccagcattgtcactgctctagctcctgtggcactgcacggacacgtggttgctacaagttagtacgcatatttggccttattagaggcactttcctattgtaactgaagggatagttggcttaagtcaattgaaataccagcaacaggacattccagcttcaatggcttgtgcctgtagttgtcaacctatagaaagaaaagttttaaaatgacgttttaaccaaagaaaactgaaatgtattgcttgttctataaactgtaaagaaaatcacaaaggcgctcaagttgtaacgaaactttttctggttcagttgtgactccagacaggatccaaagaggagctttccagtctcttctctgggttttatggagacttactttacccttctgtgttagcctcttaaagcactgggtcaaccttaaaagggcacaggaaagggtgctttgtgattttttttctttgatttttacagggttcactactattttccgcgttgctctcaatacctcgtggatctctgcttctctaagtctgaaaccacactagaaacacagctgttttgtttggtgagcccctacatggatgtttccttccagttaaggggagccggattcggaccttggcgacaaacagacgccggggaaccctccggtcccactggccacgtgctccaggctgactcattccttcccccaccccgctcaaggctaggaacatacctgcgctaagaactgaggcagctgcacttccgcagacgtaagagacgaactcctggagctcaaggtcggctggggttgggttcctgtcccgcacgcgtggcccgcccgaaacccgctacatagtggcgcgtcagccctggggaagcaaagcgcaaaattgttacggtgcccagacctgcgccgggaacctccggctgttccgctgggcgcggcgcctgtgcctcgcgcagccccgggacgggcaccgccgcccgccccccgggccgccgagggctgctctacccctccgttctggccgccgggagcagaggagctcgaggcgggcaaagctcgtggggacaccgggcgagcccagcccctgatcggacccacgggccggccgggcgccctccccgcgggagaccgaaagccgaagactggagatgcactcaccgcgcaactccagctgacaaagaggcctgcgacctgcgacgggcgcacaaaccagagaggcggcgcggggcggggagggaagcaggagggtcgcgaggcccgcagccaatcccgggaagactctgggcaagggcggggcgcgcagccgatcccctggagaggtcgggtagctcagccaatcccgggaagatcctgagcggggcggggtggagggccgcggcacgcacagccaatcccggatggggcgggacgggcccggccattggctgtcggtgtccggggccggcctaggtgtggctcatgcagtagcacggggataagccatgtctgcgcgcggagcatccttctctgaattagatttttcaggctacctaccaatccccggcgttggtgattttggtgctcttgggccctagacccttcctcgggtgcccttctggagagggcatcgaggttactccagggttggcctaaggccctgggattccctttcttaaagccacactaatccggtgtgtgttcatcatctgtgtccgcctaaaccgtaagcttaaagagaagccacgaccatgtcttgttcaacaagctcactcccgtggcctctcctaaagctagaaggactacctcctttcctcatgctccctctttattcatttacagagtccaataagtagaccataatcagctggagggtaggagttggggaggttgagaaggcaaccatagcaatctcaaggtaacaggctcaaacttggcaaacaaataagtagaagaaaattggagtatatgctaaaaggagaacttctattgctgtttcacgtacttaccatctgctaacaaatctaatcctcaaaatatatttaatcatctccaaattatagatggggaaataattatgttatgtaacttgcccaaagtcacagagcagctagccagtggtagatccaggatttgaactcaagcagcctgaaggcagagcccctcaaacaacatgctacctagcctttccccaggtgttgggggtggagcaggaagggaaaccaaaaaatagcctacacttggttaacagatcaagacaggcagctctggtggggtgtggctttgtaaacagaaagaacaactcgtccagagccccaagataaaacaggaaagggctttacctgtttaaggactcccagaaatggaacttaaggagcagagtggcctgagatgagaatggcttggggccagaccatgcaggaaaccctggaagagtttttttgttttgttttgtttttgagatggagtctcgctctgttgcccagactggagtatagtggcacgatcttggctcactgcagcctccacctcccaagttcaaactattctcgtctcggcctcccgggtagttgggattacaggcatgcaccaccatgcctggttaatttttgtatttgtgaaagagtttatactttgtgctaagaatgatggaaagctgttcaagtgttttgtttgtttgttgtgtgtgtgtgtgtgtgttttaacaggggaatgataggatctgatgtagggtgtggtttcgggtgtgattaaggtggttttggtgggaagaagaagttgagtaaaatttaccaataaaccctagcacctagtcatcatcttgcagatattcataggatcttgttgaaattggagagtgaataccagtttgttgtcccttcacctttctcaagagtcttccaaacatatctctagttggaatctgttctttttatagtccctttggatagctgagagatattacctttcctttaactatggcaatgcatgtggtcaggcaacatgggaaaatataggaaaagagaag

SEQ ID NO: 1881641 - DNA, 4001 bp, Homo sapiens
tcacttttgcaccaacctaatagaaatgctgctgattttggtatgttgattttgtatcctgtgacttgactgaatttgtttatcaattctgctagtttttttggtggagtctttaggtttttccaaatataagatcatcttatctgcaaataaaaataatttgctttcttccttttcagtttggatgccttttctttctcttgtctaattgctctagctaggacttccagtactatgttgaataccagtagtgaaagtgggtagccttgttgtgcttcagatcttagaggaaaggctttcaatttttttcccattcagtgtgatactagttgtgggtctgtcatctatggcttttattatgttgaagtatgtttctcctatacccagttttttgaaggacttttatcatgaagggatgtttatcatgaaaggatcaaatgctttttcagcttcacttgaaatgatcatctggttttgttcttcattctattgagaagatatatagtattgattgatttatatatgttgagccatccttgcatcccagagataaatcccgcttggttgtgatgaatgatcttgttggtgtactattgaatttggtttgctggtatacccgttttttaagggtgcacttcagtggcattaagtatattcccatttttgtagatccaatgtccagaactcttttcatctcgcagaactgaaactctgtacctactcaacaaaactccctaatctcccctcccccaacctgtggcaactgccattctacattttttgtgtatgaatttgactaccctgggtaccttatacaagtggaatcatttacagtatttgtctttttgtgactggcttatttcacttagcataatgtccttagggttcatccatgttgtagcatatatcagaatttcctttgcttttaaggctatacatttctttttttaatcacaaaatgatttgagtttatgtagctaatcaatcaattagattaagagggagtatccggtctgtctaataagagtttaggcatgaaaaatggtaagaaaggcgttggtagagagggagagagagaatttgctgaaatatttaatgccatggttctttagggtgcatcagaatcatggggaagacttggtaaatcagattgctaggctcaaactccagagttcccaattcattaggcttagagcagggcctgggaatttgtattttccagaagttcctgggcatgatcacacttttgacaaccattgtaacctatccagggtgaggcctagaggattctaattgccaaaattttcccatcgtgcaaagaagatacccctcccaactaagacaagaagcttgaagttatagaagtagggaagcacagagaagagtgagaaatagtgagaaaacccagccctcaagatcccagcaacttgtggaaatgagggaaaagatggtggcaagtcaagctgtgaggaccaagttctgatttctcttctagcctcagggaggagagggaaagtgtgtgagctaagtgaggagaatgtcaaagggctcagggaaccctggctccactgcaccatttgagaccctaggagaaggtcactggagtaggtctggcctggctcaatttcgaggtctctagaggtccagacagaaggaagaatctcagacatcagacggcaaccagcagacttgcaaggaggcaactatggtggggtgagatgatcctaggatgggccctgggtcaggagttgctgggatgagagtttggcagatgctaagttgtctgaagctaaggggagctgagcagagactgaatctgtaagtgtggggttgccagcaatcccaggggcattgcccaggccatggctgaccatggatttaccagctgcaggattcagcgttggaggccagcagtggctgggaaggctatggacagagccaagggaccaggggagatggtgccaaagacctgcgctcaccacttctccaaatccccagacactgtttagcaagacagctgggcagtggagaaaaaagatgacatctgagcaagggaggattttatttcagactgagccccttaagggactattcaaattgattggaccaggtgagcttttaacttggccaggaataaaaattattattattattattattattattattattattattattattattgccaaccagcagaagtgggtttgtaaggaagacaaggaacctacatttttttctatacatctaaattgtcatgtgactaggtttggtagataaaattgggtacctactttgactaaaataaattcaatgattatcagaaattcaaatttaataggacatctgtatttttaattgttaaatctggccaccttaccttgttgtgcctgttgagggcaagtgacagatctaaatctcaattttattgagtttcaagcttgtgttcatatttctttctttcttttttcttttttattttttttttgagacagtgtctagctctgtcacccaggctggagtgcagtggtgcaatctcagctcactgcaacctctcctcttgggttcaagcaattctcctgcctcagcctcccaagcagctgggactacaggcgtgtgctaccacacctggctaatcttttgtatttttagtagagacagggtttaaccgtgttgaccaggctggtctcgaactcctgacctcaagtgatccacctgctttggcctcccaaagcgctgggattacaggcttgagccactgaacccagcctgtgttcatatttcataagcagttgggtagcagagaaaactagttcagaataaatctcttcctacccacaaaccataaaggggcaaacccgtacactgttatactgctagagctgcccctaaaacatgccaatcacttttttccagtatattcaagatgcagatatttacatttgaacgatcacaatatccctagaaaacaactcccaaaattatgaaatgagtctttaaactgtatatactattaggatatctgacacatcctctgtccctcacctccctggcccaccatcattgaccactaaggtttcctactgactgcactgggaatagtcctcaggggaagtgtcagtcacacagggagacctcaggatgccccagaacatgcaggctgcagtggccaaggtcagcctttattaagatcactttctgcccatgacctgaaggtcctgtcacctatcacggtatacagtttgtcactgagattacaccattgggaactcactcctttagggtaagatgttgacaacctgcaaaattgccctttaaaatatgaatagtaactttattattcccgttgtatgttagtgcaagattgtattgttctcaaaggacatttactattcttagccatgtcaaagattagcaaatcatctcctagcaaggctctgagggagtaagaaatgcaaaggcaagtttggatgaggatccaggaaagaggcagatatggaggaacaattctcaggaaggaaagattttagggagattgggctggggggcgcagtatggaggaagcagagagaagatgggagtagcttgagtgcttcattaggatgctgttaatagcagagcacaaagacaaatctcaacttcttcagaagctgtatttgacccacgtacagcccatctcacaatggacacagagacttctagatctatgaataagtactagtaagactagtacagaatcctaacatcatttatcaggcttccactatttggaagagaaatgataaaatcttattggaagtctcaactattctcttacaaaataatgaatgttacaacatttcagtattaatcaggcatttcaaccacataaaatcacagaacaaactgtgattggaatcaagctgtggggttttgctttgttttgttttgaaaggagtgtagaaaatgatgagcttgtgttcatgtcttggtgcactctaacgcctctgccacttctctct

SEQ ID NO: 1881642 - DNA, 4001 bp, Homo sapiens
catacagtgcacatatggataaactgtattcgtaacacacacacaaatgtgtacgtatgcatatagtgctaaaatatatggcaaagagcttgctagaggcttttgttagttttgttggaaatcattatgggcagatgaaattaaaatatgtaatcctctcctactcactcataaactctggagagttaggcttgagttagctatccgtaaagatagacacttgttgggtttgtaagcatcatctttatgatagattttcagaagtggcaattgaaagaattttatagagaaagccaatctagaataaatatgctttatgaggatctgctgccaggtaggcccacggcctgccgagggttctatacacattaccaaccacatttctgcaatccttgctgcctcctatgcattctgacaaataaaaacactctgttgtaacatcccaaattatcatgttaaacaattacaccattgaaaaaattgaaaaatattatcttgtcattcccatttgcaaagataaagtaattgttatgttatccctaaataaccccaataatgcaaatattgatgaaaataacctgatacagatcccacattatcacagaagtacaaaagcatttgcctagaaatgccatcctgatgtcaagggcacaccagtaaagccccagtgaccaggatgaatgacacagacactggattctcaatgtagtgctttgtctttccagctctgtcttcaaagatacatttggaacacttctcttcacactccgtaagatgatttagaattataaaacctaatttagcagctattacatactgtattaataattcaggaagcatcttttcaaatgatctactcacatactatatttaagtccataattacagaagcaagcttgaatttcctataaatttgtttgaaaggacaaccttcatattccatattacacagtcttaaacttcttaggctttgttcatcaaaagccattatgtcatacgcactgcatgtgaaacagatgatttagaatagcaatgttggagaagaggttttatctgttacttcctggtcttgaagacatggctctctctaaaacagtattgaaaatatccgtctatattacttgagaacttcttcaccaaaagatgaaacctccttgcagctagcagactgaatggaaaagtagacctctagcattattggagataaagagtcaaccatcagttcaataccacgctgatttaaaagccaacatgcgctattgtctgagaataaatcggaaaagacatttcctctactgatacttcaaagactttgtaacatctggaatctggttctatacagggtattccactaagaagtaagaataaaaggattttaataaggcaaataagattcaggtttcttaaaatatgttctccctggagggaaacaaataacacattgcatctgactaacctttctgcacttcagctgcattaattcacatttagtcatggattccatcatgagccagatgaacttagtgccacagctgttttcatcgaggggaaaatatgcttttccattttagattcccagcatttaatataaatataggaaaaatacattttattgactgcattattgataagaactccacattacttacccaaataaattcacatccaccctagactgtgatcaaatcaatatcaatattacacaaacggtcaaccggagccagattcctacctccctttttcttacattgagggataaggaaaagttgaagaattgatcaaagaggtagacaacatggccttggaggaattgttgctgggttagtcaaagactttagtggagatcaggttcactaagaggaatgaatacagatgactaggaaaaacgaaaggatgtttcaaaagtttaactgagggatttgatgtcttggcagagctgtcctcagctctaccagcaaaacatgtggaagtggttggttgggagcaaagctgaggtacagaactgtaatacttggtcagtattacaagtattaagtagtaagagttgtttttttttgtttgtttgttttttgtttttttttttgttttttgcaaaacctccttgaagatacaattttgtgaggaaatatgtcagtgattccactgggcaaagcattcaacctataaccccttgtcaaatttcacatcacaagagcgctgtaaaatcaaattcatctccaatagtcctgaacaaatactgtatcatgacttgtggtcaactatggagtctcatggacaaatgaaaatccagtagttatgtggtcagagtatgtgtgtgtgagtgcattcatttgtactagtatataaacctgcagtcattatctgcgtcaacactaaccaagcctcaaattaaggttctcagtcatgattcaaaaaagaatgaaacctgtctgacccatcttcacctttaccaacacaggatgacaataatttaatcagactaggaaaatatcttacctggaactacttcaaaaaggaacttccctgggttctcttcattgcagggatgctcagaaactttatttccaggcagaaaaatagtaccctgtgaaaacaaatacccaaaacatcaacatcatcagagagcaaacatcatatatcatcattataatcagtgaatatccaaggtgtagctataacccagtatacagtaagatgcatcagaatcttttatattcccaataatcaaaaattatgtgccagaatcatgttcactcaagatttaacgaatacttgttgagcatctaatatgtataagactaatatgtatgttagctgctagattcatcttaagcaccaatttattaaacacattctgtgtgccagaaattttactaagcattctacccgcaccatattatttaattggtagtataatcttatgaggtagatattcttttccccattttatagctgtgaaaacaaggtagacttagacatagttgtgataagccttctcttgattatctcttctctcttctctttctttccttttctttcttttccttttcttttttttttttgtttgttttttgagatggagttttgctcttgtcacccaggtgggattgtaatggcatgatcttggctcgctgcaacctctgccttccgggttcaagaattccactgcctcagcctcctgagtagctgggattacaggcatctgccagcacacccggccaatttttgtattttcagtagagatggggtttcaccatgttggccaggctagtctcgaactcctgaccttaggtgatccacctgcctcggcttcccaaaatgctgggattacaggcatgagccaccacgcccagctatcctttctctatctttaaatttctctctttagtggatcatttcattcagtgctgagatatacttaaaagtctgtgtcattaaaaaaagtactttgacttcccgctattctatttttttgtttgcctactgtctatactgaatctatttcttcactgtacccactgcagcctggttgatgcacccagcattccacttacatgactcacaagctgcgtgtttgataatgttcacttttcagtgacttgactttctagaagtgttcatcactattgaccactctttccttgaagcaccttctttcctttgtttctttgttttctctaggtttttccctaatttctctgttgtctgaatgtcttttgctgactctaattgacctttaaatattagagtttttaaaaagatttatccaataatttcttctcttctgactctagtactctctttctccaggctatctcatccaggcctatgatttcaataaccaactgtaagccaatgaatatcggagtaatatttctaatctaggacactctgagcttcagatacattcaaaagcttatttgacatttccacttatctcaaagatgtcttaaactcaacttagtcaaattaaaatgcaagtaaatctggctctcattatg

SEQ ID NO: 1881643 - DNA, 4001 bp, Homo sapiens
taaaaacgaacatgattggaaaactgatgcagaatctagaagacgagagcacagagattacaaaagttaatcacagaataaaaataatgcagtacttaatatattcttgcctgatagcaaggaagaagaataattcccttcctgggctgcagggaagagcatggagaaagagggaaaaaagagaagaaagtcagatgtaggaaaagtccctgaggggactggcctctttccaaataggtttcttgacatgagaaaagaaggtactttggggtaggcgtggtggctcattcctgaaatcccagcactttgcgaggctgaggtgggaggatcacttgagcccagaagtttgagaccagcctgggcaacatggcaagaccctatcttgaacaacaaaagcagaggtacttttgttagatttcctacatgaaatcagggaggagccactttcagaatgcccactgataacgcagggtggctgcaaagagtatgaatggcaccaagtcaggattggggtggggtgggggctgagagaggctcctaccctaccagcccctacaatccccatggggcattcttgaaatcttgaaaggggcatgggagagatctgggaacaatgcgacagctggcttatggggaaagtggggagtgggggcaggggagacatagcagagaattgggaggtcccacactaaagccaggggtagttggttctcagcagcagcaggagaagataaccaaactcctgggagtaattgctctgcactgcactgcccagtgtccagaacaaacccataggcaaaatccatgtaaacaagacttcacagccaggaaggaatggagggtcacacaaagaccagatatgccttccttgcagcagggtggtagcgtgagctttttctattcccaaagaccgccaccaggaaggggagaagaagtggtagaaaggaaaaatcttgagagggaaaaatagccctgagagggaggctgaacttcaaatgtgataataacctcgaagagacagacagagttgcactgaactagtgacaaaataaattcagttacagagaaatttaaagaaactctgtactcatccaagatatgattgtgaatttcaaagctgggacatctatctacagtgctattttggtctacccagtaattattctctattctgagaaaaaagcagctctgagtttctgctgcagagctccctgaaccttcctgggtcctaatcttccaaagcctgggtgttttttattctgtggactgccaagaaattcctttccttccttaagtttgtaactgggtcagtttctgttatttgcactaaagaaagaagcccagctgatacaaaatatataatcccaattttgtaaatgcacatgaatacaccggcacacacacacacacacacacacacacacacacacacacacacaggtggggaaaaagaaagaaataaaatattaatagtgatcctatctggataatcaagttataaaatattattttcttctatgtttccaagtttcctattctccataatgagtatgcattatatttttattcagaatattgagagatagaagtattatccataatgtccagaaaaataacattaagaagcccaattacattaaaaaggtatgtcacgtcattggcctttgtctcttggcaccctgggccagccagcagatgcaagcacaagcactgttgggcagtgtgttataatgcaaagaatactaggccaggagttcagagaccagagttttagctctggctctgccactgacaagttgtgtgatgtttaataagtctttcaacctcctttagccccaaatttctttatctgtaacatgaaggcttcaactccctagctggacacagtggtgtgtacctgtagtcccagctattcaggaggctgggacagggatcacttaaggccaagaattcaaggctgtgcacactacagccttgcactcttggcctcaagtgatccatgatcgcacctgtgaatagccactgcactctagcctgggcaacgtgagactctctctaaaaaaaagaaactccctatgataatacagagttcactgacctgtcaaccgtaccctagctcaggttccaactgtcaacatttctcagatatatgtatgagaagacaaaatttcccagtatgctagccaaagtcttagagaaaactttcaagggaacactacagacactgcttgctttgcttttgagactgaaacatagcaatagcactgatgttttccatcttgttttcatgcaatctctgtctgaagggacacttcacaacctagcattgcctgtcaccagcatgaaagtgcagctagtgcttgtcgctggcatcagccccagatccagcataagaacccaaataccatcatgctggggggcaccttgagcacactgcctcaccatgcagctggtcatcagagcctcagagggcaaggaaggttcacgtatagagggaaccagtgaaaggcaaatttactactgctgcttcaatctgtgaaatcgcaaagccaaggaagttaaagggatgtggtgcaatatttcacactagatacctgatccgtccaggtggggggacttagatggattcccaaagaagtaggtgcattgagaagagtacaccaggaattgagctataggaataacagagaccaaactagcaattttacatctgttcaaaactatgacctcatcaaactaatttctcagctagcttttttcttcttccattcttgtatccatgtcttgcagcttcctctgggaatcttcttcctctccctgtagtatatgatgtctaaaaatcctccctggcttgttgggaacaaacttcccatacaccagagtgacatatgccctgagactctacacgatggctgaagagacacctaactcacaggactaaggaaaatgtaagccctaaaccacttagctctgtgtcataaaaatctactgtcctttattctgtttatctttatttctaacctaagagaaaaagtagaatggaacagactgggtaatctattctaagaaaaacttgaatgttttaaacacaaaaaagagaagaactaaaatttgaatgcagaaaagatacaattaagcacatttgcaaccttggcaagtacatgaagaggagtgtaaagggaattagattgtgtgggagtcaagctgggtccaaaaaaaacaggaacgggaatgtttcaagaagggatctgaagagatacaatgagttactaagtgaagaagggaaaggagaacagaaaacactggaagaaaaagtcatttcactaaacaaacaaacaaaaataccaacaacaaaacctcactgtaactagcagtaaggaagtttaatgactctgcatactgggtatattctggatcccttcagtagaaatgtcatttaaactaagactgaagaaaagcaaagaaggagaaacagtggtttgtctctttgtccaatatagtgttgctcatgtggagggagagaatggggaatgtgggaagggttgaggaattccaataagaagattatcacccacaaagaatgccggagacaggtttttttccacaagagattaagtcattattcttaacccaagaggtgatggattgtctttctggtgcttactagtataatagctaagcagaaaataattgtctaatgtgaagtaggggagctggagataacatagaaaggataaaagtccctcaaattaaaaacaaaaaggcatcgacatgatttgtggtttcaaaaaaacttttttgggggaataaaacaatgctgactttgcagatgaagctgacatcacagatatattgtagttactgcctacatactattcttactggaaatggagcagtgtaggaagccacaaacatctaaatagtcatttctctctctttcttgtcagttgcttcaagtcacaaatgcagtttcaattcaacaaatcaaagtgtcacctgtt

SEQ ID NO: 1881644 - DNA, 4001 bp, Homo sapiens
tttaacacagtatttagatccttatcttaaattgatgaaccagggaagtaactattagctaaaacttcagattttttggaatttttaattaactagctgttttctcctctggattaataagcaatacaaggaactaaagagatgcagaccaagttggaaatgtatgaacttccttctctccagtctccagttccagctgtttcctcctgttatcaagctgggtgctgaggtgggtatctagcccagtaagcttagtgtgctgttattaaatactttctaagtaagtggctcaggctctcctgagtgcccttctgttcctcagcactgaggttgtaaggtggagccactgacaatgaaaacagaagatcacgctgctgaaaaaccctatgtggtacacacttaactggaggtgttctctgctgggctgcagaactctgatgtttgcactcttttccttcaaagcctacaaaggttaaactctctgaggtgtttagcttcacaaaatcccctaaatctgtgtgttttactcctttaatttccaccattcccctgttgtaagataggaagagggggaaaaacaaaaaatatttattttgtagccatgtgagaccatcacttgttggtctgattacctgtgagtcttatttggaaggctgtagcaggggattggtcacgtaaagacagaaaaatccagggtaatttaagcaggatatttaacctggctcttggaacttcaggtcaagggcagtagggtcaggtgctagtctgtgagtctctccttggttttgccacatcctcctttgcccctctcaccacctttcccgcagcattttaatgaacacgagcccttggatttacccagttaaaagtttccttagtttactgtttgcagatggtagtggcagtagtgggagaaacccagagcttcccacatttgtctataatacacttgctcctaccttaccccctcctccaggtggaaagacttgtaaaatccattactactgcttcccaaggaggtagagtgtactagggtccagggacagaattgtggaatctgctttcatcattgctgctgctttaatctttttctcatactattcactgaagacagatttctgaggattctggtccttttatcttaaatttgttttcctagagaactacactttaaacttcatgagtttctacttaactttcctttccaggataacatctgtaggaaaagctgcataatagtaataacacttattttagaaagaaaataacctttgagtcagacctgaaacaggccaacatttcttgatgacaacgtacactgatgaaccaagaccagaagctctcgaaagctccaaaccgtaagaaagaaccattcgtaaaagtgagggactattaaattcttcccctgacagtcaaaaatccttcagcaatctcccagaggatggctcccttccaatcctcccttcccgccgccctaacaatctgcgcgaggatgggtcccttcccttgctcggcatttcgtctccttttccactaaagactcaggttgtgactctgtactcaagccgcacccctgtttcctttcatggctagggggaggggaggaatgtattacaactcatttttacaatgcactgcagtttacaaagcgcttgcacttccaccatatcctctgagcttcacgagtgccacgtgagagaggcattcattcattcattcattcatcaaacatttgctcggcccgaccacacgttatccaacgctgggtctcaccccacgccacgggaagggtggggcgctctctccctggagcaggtgcagatcaggctgtagggtaactcctcgatcagtccggcttttcgagggtctgtttggggccaaatgcctcaccttcgggtggtgcgcgcagctgcctgaagacgcggcctgggcctcctccttcctcccaaaggagcagtccccacctgccccgaaggaaaccgctacagaccaagctctccaggccgccctcgggtcaggggtaagatcgggcggcagcttaggctcgactcggctcctccccttcctctcttcagttctgacgcggccgtagaggcggcagcggcggtggcggctgcgagtcccgcggcccgaggcgcacccacccgctcgccgatccccacttcctcttcccttggagcgtcatcagagcgcgccagaggcgcccagggcggggtggctggaagggggaaaaaggccagcggaggaagcctcagagcggaaagaagagggagggggaagagagcggttgctaggtgacttgcgtcatcggcaggcgccgctctcctcccgcccctctctctggagtgaggcgagagccccgcacagagcgagggagacagcgagctgagctccgggcgctgccgctgccgctgccgccgccgccgccgctgagactgagagcgaaggagcatccgagagatccagtccccctgcactggccgccgccgagaccttcgctctcacctgggccagcgggagccgcggccgcactcctttccccccctcaccttcccggccggcagcggcggctgcacacgccggagccggagccagagccggagcccgagcctgagccggagccggcggcttggggggcagggaggcggctaccacgggccgggagtgggtagctgctccgcggtgagagaacgctgaggaggcgccagagcttctgcctcgtcccgtggggcgtggggcgagacccccaaggtgtagggaggggggtcccagccgcagcgacacatgcgggagccgggagcgggggcggcgccgagcggagccggccgggtccctcgccttgccgccgactcggccacccgcccggggccgtagcatcttgccccggagtgtatgaaccggggccccaaccaagctcggcaaccaccccccggccgggggggcggggaccccgatgtgaagcggcggctggggcggcggagagaacaggaccgacgccgccgtcctttcctcaccttccccctcccctcagccccctccgggggtcttctcccttggccagtcgccggccccccggctccttggctggactccgggaggagttcctagagcccccctcccccgccccagtcccgagggcggcggggccgggggggacccggggggccggccgcagcctccacccagaggaaactttacaaaaacaaaatccggagtctcccaaacctgactgtcccgggagaagtggccctggacgggcagaagccgcagcctgaaaagacccaggaagaggaaaagaggaggtaagcggggccgccgcctcccctcccctggcagcgcggaagagacccgggttgccgcctggtttagcgacacgagcaccgcttcttcctcagtaccgcgccggagccttccgcagctgccgcttcagtccgaaggaggaagggaaccaacccactttctcggcgccgcggctcttttctaaaagtgtgagtggccccgggagagggaattgagggggagaaagtgggaggatgccggcgcttcctcctggagttttgctgatgttctccagtagtgttgggagtctatcaatgagggagtctagctttattcacggaggggggaaggtgttagggaggcctgtattttgtaactttttagctctttgtacgagtaatgcaagtatgcaggtttctgtcggaggagtcttttctccaaagtgaatactcgcacctttctggccagcagttggcaaagggaaattgaggaagccagagcatatgtgcgcacagaggccatctgtatctgtaaccttttcctggtactgtgggtgtgtgcggtgtactttttgtttcgggggtactctcatataggttcccgaatgagaactacttaacctgtggacccctgaaagtaaaattccttttttaaaaaacaacaacaaacctgttttgagagaggttcatttcagtacctattggtacaggagttaaccttct

SEQ ID NO: 1881645 - DNA, 4001 bp, Homo sapiens
aggagacagcaagttgactgagtttgttggtaaattctctagaatccagccacaaaacatataaaaaagaaagacgagaatatttcaagattaacatggcatttttatcataaagcaatgccacgcctggtgaaagaagtaaagtaagcctcagtgtcttggaggctgatagatataccagggcggcagctcctctttcttagctgagtgctaggaggtgagtgggaaggacggagcagaaatgtcttcctcctacaccacttaaccatgacctaagagaacagccacactagcttagactagaatacaggtccctgaaatggtctcctttcttttttctctctcgctttttttttttttggagacagagtctcagtcacccaggctgtaatacagtgatgccatcacagctcactgcagccttgaccttctggactcaagccatcctcccacctcagcctcctgaatagctgggactacaggcacatactatgccttgctaaatttttatttttgtagagacaaggtctcgctatgttgcctaggctggtctcaaactcctggacacaagcaatcctcccacctcaacctcccaaagtgctgggattacaggtgtgaaccactgcacccagtctctttcttgacagatcaaagtgggtgtcattacaaaggcaaaactacagaaacttctcttctcattgatgcattactttcatttttatttactacagtttatctttgttttaacagggtgaaaggaaaacaaacggtaaaatatttggctgaaactgaagttcattgtgaatttaaggatgaacttcacacttaaagtataaggcccatgtataaaaatgtataaatatgctaccagtttccatttttaaagattaattgaaaaagatttactaaagatgtaacgattgtgagttttcctagaatcaagctgaatataaccaaaataatgctgtgatttcatagtcatgcttttacactactctctgttttagtagatactgtagcctattctgagtgctatttttttctttttgtcagcctggaagattcctacttagtctttaagctacagcataagtgtcacttcctctgtgttgccctttccctgttctctcctttagtatctactgtgccccataattatttatacgaaggaacctatatcattgaatggaaatcattcatttttttctctgtcatccctgataaactatcagatccttaagagtatagttctgagtttagtcattcgtatgtctccaaaacttaaaacaatgtcctgatcatgggtgctcaataaatacttatagagtaaataaagaaaaatataagtctttttcttatgcttctgattcatcaacttgaaccagaaatgataaggcagttaaagggagcttatcgtaagggatatcatctctttaaagggccaggttggggggaaattccaataaccagaacgtctcatagatagagagctcatgaaatttgaaaattgatgccagtatcaaaatgtcaggaatactgattgtcaggcctctgagcccaagccaagccatcgcatcccctgtgacttgcacatatacatccagatggcctgaagtaactgaagatccacaaaagaagtaaaaatagccttaactgatgacattccaccattgtgatttgttcctgccccactctaactaatcaatgtactttgtaatctcccccaccgttaagaaggttctttgtaattctccccacccttgagaatgtactttgtgagatccacccctgcccgcaaaacattgctcttaacttcatcgcctatccatcccaaaacctataagaactaataataatccaccactctttgctgactctcttttcggactcagcccacctgcacccaggtgaaataaacagctttattgttcacacaaagcctgtttggtggtctcttcacacggacacgcatgaaatttggtgccgtgactcggatccggggacctcccttgggagatcaatcccccgtcctcctgctctttgctccatgagaaagatccacctacgacctcaggtcctcagaccgaccagcccaagaaacatctcaccaatttcaaatctggtaagcggcctccttttactctcttctccaacttccctcactatccctcaacctctttctcctttcaatcttggcgctacacttcaatctctcccttctcttaatttcaattcctttcattttttggtagagacaaaagagacacattttatccgtggacccaaaactctggcgtgggtgatggaatgggaaggcagccttcccttggtgtttaatcattgcagggatgcctctctgattatacacccacgtttcaagggtgtcagaccacgcagggaggcctgccttggtccttcacccttagcggcaagtcccgctttcctggggcaggggcaagtacctcaaccccttctctccttgtctctaccccttctctgctttcctggggcagggtcaagtaccccaaccccttctctccttgtctctaccccttctccttcacccttagcagcaagtcccgctttcctggggcaggggcaagtacccctcaaccccttctccttcacccttagtggcaagtcccgcttttctagggggcaagaacccccaaaccccttccctctgtgtctctacgctctcttttctctgggtttgcttccttcactatgggcaaccttccaccctccattcctccttgttctcccttagcctgtgtgctcaagaatttaaaacctcttcaacttacacctgacctaaaacctaaacgccttattttcttctgcaacactgcttggccccaatacaaactcgacagtagttccaaatagctggaaaatggcactttcaatttttccatcctacaagatctaaataattcttgtcgtaaaaggggcaaatggtctgaggtgcctgacgtccaggcattcttttacacatcagtcccttcctagtctctgtgcccagtgcaactcctcccaaatcttccttctttccctcccgcctgtcccctcagtcccaaccccaagcgtcgctgagtctttctaatcttccttttctacagacccatctgacctctcccctcctcgccagcccaagctaggtcccaattcttcctcagcctccactcctccaccctgtaatctttttatcgcctcccctcctcacacctggtctggcttacagtttcgttctgtgactagccctcccctacctgcccagcaatttattcttaaaaaggtggctggagctaaaggcatagtcaaggttaatgctcctttttctttatcccaaatcagatagcgtttaggctttttcatcaaatataaaaacccagcccagttcatggctcgttcggcagcaaccctgagacgctttacagccctagaccctaaaaggtcaaaaggccatcttattctcaatatacattttattacccaatctgctcccgacattaaataaaactccaaaaattaaattccggccctcaaaccccacaacaggatttaattaaccttgcctacaaggtgtacaataatagaaaaaagttgcaattccttgcctccactgtgagacaaaccccagccacatctccagcacacaagaacttccaaacgcctgaaccacagcggccaggtgttcctccagaacctcctcccccaggagcttgctacaagtgccagaaatctgaccaccaggccaaggaatgcccgcagcccaggattcctcctaagccgtgtcccatctgtgcgggaccccactggaaattggactgttcaactcacctggcagccactcccagagcccctggaactctgggccaaggctctctgactgactccttctcggcttagcagctgaagactgatgctgcccgatcacctcggaagccctgtagaccatcacggactttgggtaactctcacagtggaaggtaaaccca

SEQ ID NO: 1881646 - DNA, 4001 bp, Homo sapiens
catgtggggtctcctctttcagctttggagcccccctccctctgtctctgtatggaggagcttcttccttctgacttctcccatctttcttgcctattaaactctctgctccttaaaatcacaccaggtgtgtccgtgtcgttttttccaattcaactcgagaggaagaacctggtattcctccattcatcagagctgtatcaatatgatacgataatatgggtgaatctcaaatatattatgctaagtgaaagaagctaggcacaagaggctacatcccaaattacttcatttatatgacactctggaaaaggtcggactagggacagaggatggatcagtggttcccagggattccaggtggggcagcacgagggtgtataggatgatagagctgtcctgtatcctctctgtggtggtaattacttgaatctatgtatgtgttaaaacttgaagaactgtgcaccaaaaagagtgaattttactatacatacatttaaaagtaaactttaaaaagtggcttgtcagcaatgcacagaacagctcatttctattgcaacaaactattgtgattacttttgtataagttacacatttggtcttcacaatttgaaccccaattgtgacactatgcaaagggggaaaagttccctgagattgtgtgatcagtaaaagattatatttacatttaaatatcttcagtgtttttgactttagcaagacaaatgagaatctttgatggtgtttggtttgttgaccagccagttcaaattacagctgggtggttaccaaagctggacagattacagtatggaattaaagtctgaacagagtatgggaatgctagcttgaaacaaaaatagagttttggggaaaaagagcttgggaattaattgcattccttgaattcattccttggaagtgtttcatgctggctcccacagtggctcaggtgtacatgctttgtttagtagttgatcctttgagccataggaattttggaatgtaatatgtttgttctccacccaccccgtgcccatgaatctcttttagtaggttgatttattcactctttaacttctattgcacctgagtataccaacagtaggattaggctagaaagtatgcagtcataagctgaaatcaacagggacaagtgattaacaggtggacagtgttgagcttgccaggtcaccactctcatggtcaatattttctttgtgctatttttggcttggttccacatcagagagttcaaactctgaagttgtaaagatactgcttttaagaaaaatcagctcatgtctggaccttgatttaatcgtttattcatctttttatagtactctctgttcccaagataagctactttataaggcaaaatttccacctcggcatcatttcatataaacatttaatgctgaaactccaggttacatctggcgtctaatgatgaacgcagacagatgctcctatccagccatgccctctgccactccgcggggtgctgctttccatttcctctctgtgtctgtcagcaccagggccgagcttttcttccgggatagatgctgagctgactctgcactcaaagcgcttcaaatgatgctgattgaaatcagatgctataaaatgttcatcacttagtttcatttattagtttagagtggcgtgctatgcaagctttttgctgtttatttatatttttactttaacttttattaaagtaatacaagcatgaattttatagagccaaacaattctacaatgttcattaacacaaatagtagttgctccttgcctcttctccagaaacaccactttcaattatcttagctaatgctattgtcagtaacctctacatctctaaataaaatgcttatattgctttccttgatttttcagctttatgcattcatctattggcttatccctttgcaaatgaagaatttggctgtccttccttctcttattctcaggaaaaacacacacacccttctcatctgcttatctttctaatctggttatatcataatttttgttagctctttgttgagcatttatatgattacaaccatgaaaatactaaactaagccatgcatcaaactataatgacttttcctatcctagccactctttgcttccctggattaaaattttattattattattgatgcttatcactaattcaaacacaaactcacttaattatacaaacatcctcttaagacagtcagagcatcacatatcttatcaatccaatcttcacaaaatctctcccagattctccaacatacttcagtctagatcggcagtccccaacctttttggcaccagggaccggtttcatggaagacaatttttccacagacaatgggggatggttttggaatgaaactggtccaccctagatcatcaggcattagattctcataggagcatgcaacctagaccactcgcatgtgcagttcagagtagggttcatgcccctgtgagaatctaatgccaccagtgattcgacaggaggctgagctcgggcagtaatgctcactcacctgtcatctatctcctgctgtgtggcccggttcctaacaggccaccgaccagtaccagtccacagcccaggagttggggacccctagtctagaccgttctcaacaactggggccaaactgtcaacctgggacttctccatcttcctgggaattcccttcacttctctcatgttggatctcctgtttcctgtacgtcttctttcctgatttactcctttatcttggtgaagcatatcttttagcaacttcctactatgaaggaataaaggtgcataggaaatacaatatctggaacattgcctttctaagatgtctttattcaatcctcatactcaattgattttttttttttttttttttgagatagagtctcgccgtgtcgcccaggctggagtgcaatggcgtgatcttggcttactacaacctccgccgcccaggttcaagtgattcttgtgcctcagcctcccaagtagctggtactacaggcgcccgccaccaagcccggctaatttgtttgtatttttagtagagacagggtttcaccatgttggtcaggctggtctcgaactcctgacgtcaggtgatccgcccacattggcctcccaaagtgctaggattacaggtgtaagctaacacacccagcccttaattgatattttgactatgtatagaattctggctgggtggggtggctcacacctgtaatcccagcactttgggaggccgaggtgggcagatcacgaggtcaggagatcgagaccatcctggctaactcggtgaaaccccgtctctactaaaaatacaaaaaattagccgggcgtggtggcaggcgcctgtggcccaactacttgggaggctgaggcaagagaatggcgtgaacccaggaggcggagcttgcagtgagccgagatctcaccactgcactccagcctgggcaacagagcgagactctgtctcaacaaacaaacaaacaacaaaaaaaaagaattctaagatagtagttatttttcttcaaatgtttgaaggccttgctgtcttgtcttctagcctctgccattactgttgagaagcctgatgacattctgatttgatcctttgtatcctttaatcttctcagatcctttctttatcccagcagttctaaagtttcccagtgacatgccttgatttatgtctgtttttatctaccatgcgtcagtctaaaagcttacatcattcttgtctgggaaactgttcaaattacttaccaaaatattaacgaatgattttttcctttccatttttttctgttctctttttctgaatctcctattatttagatattggacctcctggactagtcttctaattttttaatttgttctttttttttttttttttttgctctactttttgggagagttcttcaattttatctttcaatttattaagtaagctttaaacat

SEQ ID NO: 1881647 - DNA, 4001 bp, Homo sapiens
aaatgggcagaggcatcagaggggtcattgtgccctgatccgagcaaaacccatgaggggcatcccagcttgggtgcagagccaggacaagatcaatagaccggagtgggagcttctcagggtccagctgagggttgatcggtgcttgagtgtgagaagctttcttagctataacaccaaatgcacaatgcacagacaaaaacactgataaattatacttcaccaaatgaagtacttacgctcttcagcagccaccgttaagagaatgaaaaagacggctgggtgcggtggctcatgcctataatcccagcactttgggaggccaaggtgggcggatcacagggtcaagatatagagaccatcctggccaacatggtgaaactccatctctactaaaaatacaaaacattagctggctgtggtggtgcgtgcctgtaatcccagctacttgggaggctgaggtaggagaatcacttgaacccaggaggcgccaattgcagtgagctgagattgtgccactccactccagcctggcaacagagtgaggctccgtctcaaaataaaaataataaaaataaaaataaactaaaaaaagaatgaaaaagacaagccacaaactgggagaaaatatttgcaaatcacatacatgataaaggacgcatatcctgcatgtatacaaaattctcgaaacactataaccatgacaaaagcaaactcttttaaaatgacaaaggattctaatagacatttcaccaaagaatatacatggatgggaaataagcccccataaagaagctcgacatcattcatcatcacggaaatgcaaaccaaaaccgtaatgagatccactccacacctactgggggactaaaactaaaaacacgactctaaagtcttcacgaggacacagaggaattgagactcccattcattgctggtggagatataaaagggtaagtctggcagtctttgaaaaacctaaacatatcccggagatgattcagccattccactcccagatatttacccgagagaaatgaagacaggtgtctccacgaaagctcgtataggagtgttggcagcagcttcatttgttatagccaaagcctagaaacatcccagacagccatcaacaagcaaatggataagcaaattgtggtctgtagaaaggatggaataaaagggaacgaacaattgattgactgatgtgacaacatgtctgaatctgaaaacagcgatgctgagtagaggaggccagacaaggaggaggatactgcagagacgaaattctaggaaaggccaactgatctatagtggcgggaaggagacagtgggtgtctgggaggaggccaaggagggagggaagacagagataatcaaggggcaagaggagacttttaggggtaatgtatgtggcccctacctattgtggctaaagtttcaagagaaataaacacacgtcaaaattcagcacatcgtgcactttgaatctgcgtgatttattatatctctattatacctcaataaaactgttcttttgaaaccctgcagaaagctggtatgttgttctagctgatggtgagtgctttgctctgaaatacgctgacctgcattactgactcatgggagcagtttcattcacatctttctctttgcagattggccaagatttgctgatacaattctatcttcgcagcctagaatcttcagggacaaactcaaatccaaggtcagaaccgtggaagactctgcagactcagctccagctcccgtctgccttgtgcccccgccctggggtgtgtgcatcaggctgagcagatctccgggctgcgttttagcgtttctggaagtggaacttgatcctgtccgagggggcctcatggggcaactagtatggtggttcacaaaccatttttagttgtaatcaagtatgacttcggtatacttcgtgagttggtcttttgtaaaagccaattcacaaagtataccgaagttgtacttcattattatgaaaatgtatttaataaatgccatttttaaagccggtcaatgtggatagggaggctgctctgaggaacacacacctctggccctgctggtgtcactccccgcattcaaggctgtgtaaccttggacaactgtcttaacttctctgtgactgagtttcctcatttctaaaatgggggtgatgatagtgtctacctccatgagttgtggaggagattaaatgtgatgacacagttatgctgcccagcggaggcccagccagggcaggactccagagccgtcagctctccacgcacaagcatgactgctggctctccatcccccagggtcttccctgctgctcctgttcctgggagctctttctccccagttccaaattccccaaatccacccattccttacccttctctaagaagcctttcagaatggaaaactcatagcctttgagtttgaatccccccatttcccagcgcctgctccttgaacccccattctgagccctgcctactgcgggtgacacccctggcttgcagagctgctccggagagggcataagctcgcagaacatccagctgccacctaccaaggcctggcgaccacagcactcactgggtatctcctctcccggtgggttacgcgggcctcaggccctctccccagcctggacacagctacacaagggcacagctgggccaactctcgtccccgcccacgcttgaccccagcaggtagcccagagcctcgaggaaagaaggtgtatggtaaccactcctcaaaccgaattccattcccactgcttggcagctccatttcagaggcactaaaaaagctgaaaatacctcaaaaatcttcagcagcaagccaaagccacatgcctgtgtggagggcaggttctcactcctccatttcaaatgcttccgacaaagagcccatcgtctgtgtcgcccggtgtcaaccaggcccctctgctcaagtccaaactagcttttgatcgggacctgcctcaagggaaaggcctcagcgttctcacacttgctaaagatagatttggctgccagacgggctgaggctcccgtgtggtttacaggtacataaaaagagctctgggtccctgagtcctgcgttgctaggaaacgagaccagaagtcaggaagcctgagctccatcaccagtggcatctccgattcactgggcgaccgagggccaatcacttaacctctctggagcttccacacttgcacacaggagagaaaacacctgcagcacgggaggtgccacagaagtgccagcgtgcgcccggtgatttagacctttccaagtgctgacaaccctgacaaccaaggggctcccagcccgcctggtgctagacccaggcaccacggtccagtgtgcagggcaggatgggaagttgcagaggagagagaattctgcccagggctctgaaaagctccaaaataccagaaccatgggccccagaactcttctcagtaggagagggccagagagcaggaggtcttggcatggagggtgccacaccagaggtgtgtctctgctgctgctgctgtgcacgggcagggtctgtggctttatcctggggaggcacaaggaagagcagaaagaggacagacagggtgctggagagagaagacagggtgctagagagagaggacagggtgctggagcgagacgacagggtgctggagagagaggacagggtgctggagagagaggacagggtgctggtgggaagagggggagtgaagaagagatgtgtggggtgggcaaggagctgtgggtggccagtgggcacctttaggaactgccctgaggttgctggcatgtctgcaatatcaactccaactggtcacgcccttcattcaagttaccaaacccaccagtgctcagtgtaacaggccagtctgacaccgctctagaaacccaggaaggggatgggtttcatgtaagggtcaacctggcatcggaagaagagcagg

SEQ ID NO: 1881648 - DNA, 4001 bp, Homo sapiens
tatatttataatatatattttataaattgcataatatatataatatatactataaaatatatgttttatattatatatattttgcagtatatattatatataaattaaatatatatataaatataaattatataatatatatcatatataacttatatattatgtaatttaaaaattatatataactttatattatataatttataaattatatataatttaatatgtattatataatttataaattatatataatttaatgttatgtaaattatgtaatataaaatttaatgttatgtaaattatataatttaatgttatgtaaattatataatacacaatttaatgttatgtaaattatataatacacaatttaatgttatgtaaaatatataatacacaatttaatgttatgtaaaatatataatacacaatttaatgttatgtaaaatatataatacacaatttaatgttatgtaaattatataatacacaatttaatgttatgtaaattatataatacacaatttaatgttatgtaaaatatataatatataatttaatgtgtgttatataattatataataatttaatgtgttatataaattatataataatgtgtgttatataaatataatacacaatttaatgtgtgttatataaatataatacacaatttaatgtgtgttatataaatataatacacaatttaatgtgtgttatataaatataatacacaatttaatgtgtgttatataaatataatacacaatttaatgtgtgttatataaatataatacataatttaatgtgtgttatataaatataataatttaatgtgttctataaattatacaatacataatttaatgtgttctataaattatacaatacataatttaatgtgttctataaattatacaatacacaatttaatgtgttctataaattatacaatacacaatttaatgtgttctataaattatacaatacacaatttaatgtgttctataaattatacaatacacaatttaatgtgtgttctataaattatacaatacataatttaatgtgtgttctataaattatacaatacataatttaatgtgtgctatataaattatacaatacataatttaatgtgtgctatataaattatacaatacataatttaatgtgtgctatataaattatacaatacataatttaatgtgtgctatataaattatacaatacataatttaatgtgtgctatataaattatacaatacataatttaatgtgtgttatataaattatacaatacataatttaatgtgtgttatataaattatacaatacataatttaatgtgtgttatataaattatacaatacataatttaatgtgttatataaattatacaatatataatttaatgtgttatataaattatacaatatataatttaatgtgtgttatataaattatataatatataatttaacatataatttacataatatataatttaacacataatttatataatatatataatttaacatatagtatataatttatatatataatttaacatatagtatataatttatataatatatataatttatataatatataatttaatatattatatataatttatataatatataattttatatattatataatttatatattatatataatacgtaatatatgttatatatattttatgttgtttttatatatatatgaaaatttttcctgggtctttggagtctttagagactagctgagctgtgaataactcaggaatgctgtcaaactaaccaggaagtctttacacacataaattttccagaagtctcttctttcctgtttgcaaactggtctgacccctcagaacaagttgtaccacagtcagtactgggcatctcagactgctaatatataaatgcagcatgccagtccctgcatctcaggactggcatgctgcatttagatattagcagtgactgaaccgattaccacacagggctttacaaaacaccttcaggtcatttgacccagcgatgtacacagttctcacaaagcagatttctcagctttagttcttgctgatgttaagacgactctttctgctgacaactgtttccacaaagtattctctaactagtaaatgactcataccggaagaacccactcctgaaaatgtattaatttcatgctgataataaaacgcatatgccatgtggaaaatgccaccagcactccatgacactacacaacttcaaagacatagagtcttgctcctcatgaaaactcaacgtagttcaacacgcccaatacatgatctttcaaccatactgtgccaaactgtcaattttcagagtcaagtatttgtatgcctaaaccccacacacccaccacaattaaattcagtatgattcagtctctctgcaggacattcaccttatggcaatgtggcaaatgctgcactagcaataaaactgttctcttcattcaagttgttactttgctatattacccctttgcaaggcaaggtcacaagagacatactaagcggtaaaactattcagcgactttttaaaagccacttattttaccgtatttcagaaatcaatgaaactcaactgtcagttttccaatgtggaaactcagatttaaaatagatacctagagtttagcaatatgtatcaagaattatacaaatctgactaagaatttaactatggaaatactgacgcgtaaagatgtactttgctatcacttataataacaaatagctggaaagaaatctagattagtaattgtatgcaattaataaagaaaactaagccgagattgcgccactgcactccagcctgggcgacagagcaagactgtctcaaaaaaaaaaaaaaaagaaaagaaaagaaaaaaatgaaagaaaactggtacatttagaaggtgaaacacttagccattaacgatattcttagtaaaacatttagtatggcaacatagtcataataaggactactatacccttttttaaaaatggagaacaaaacaaaaatgtcatagtatgaacatagttgagggtcttgacaaggcggtatttaagatgtaaaagtagctccccgtatttttaaatgtgtatatatgacttgcatattccccatatgtagggtgagcctacatcctggcttgccaggtccagcccaatgtaaatatgaaatcatgtcccagtttggtcaaaaattaaacggttgccacacctacctatcccccaatagtttctggcacaatcttagctcactgcaacccccacctcccgggttcaagtgattctcctgcctcagcctcttgagtagctgggactacaggcacagctaaattttgtattttttagtagagacggggtttcaccatgttagccagaatggtctcgatctcttgacctcgtgatccgcccgcctcagcctcccgaaatgctggtattacaggcgtgaatcaccttgcccggccccgccagtagtcctaggttaggtcactaacagttactccctaaatctatagggttaagtttcccaccatcaaatgcaaatctgagcccttgcgtcttctctcattctctggagcgtcttctctcattctcccaaaagtgggaggtggaggacaaatggcttaacccacacaaaattgatgataccagcctagtgaggcatcttcccttggcccagtccaccctaggtggacttgctctcagaggatgccatgccggcagcactcctttaggtacctgctcaccctgctgtgtctcaagttctgttactacttgccttttctgtcaccccatggctgctgccctgcttataccacccacaagatgaggcaggcttgttatgacctgggtatttccttctctctggataggcaagtgacttccccttctcaagtccctctccatgcaaaggagaagaggggaatcccacaacagggctgcctgc

SEQ ID NO: 1881649 - DNA, 4001 bp, Homo sapiens
ctagcacgggcccccacccagtgggcaacccctcacccacctgctgatggcagggaggggcagctgaacagcaccccgggtggctgagactgcctcccagtccacgtgggaaccacggcctcaagagccacaggctgagctgccgggagggtgggctgaggggccaccactggtcaccgggtggattctgctggtcagagatgagagcagaagcccctagctgcctcaggcactggagggtggggcagggagctggtgcttcaagaattgagggcagggacacgaccacctcagggccctgcagtgctggctggggaagcaagcttttacacacggcccgccttgctcggaggtgccacggtgtttgaaatgaagcctggggggacagactcaggcaggcaggggaagctcctttctgggcacccctggaccccagtggggccggaaggagatgcagacaggcctcctcacaaccacccgcaacgcgttcggatgcccctcagctccaggcaccatgccccctacagcctgcagggcaggttctgtgccagagttgtttccagggacccccttccgccacagtgggccccccatcctggggcgtctatgcgtacgactgaaaatagacacgaattttccccatgatatgggaattggctacagatgtaccagaggcacggcaggcactgctatgggccagccccaaggacagaggacgtcaggaaggaaaggcgggtgcaagcctcctggtgccaggcctgcaccacccagcgagcacagtcttcattggctgccagtgtctgaaacctggaaccctcgcctaggccaggaagcagggggctcgagtcaggtgacaggtgagaatccatctctctagtgagcaagcaggcccctgccagccactggggagggcaacactggggaccaggtcacagcccctccgtgccacccacaggggcctggctgcatcgcctccaggaagccctggctgccgggaggggctgcccacaggagatgggaggacagcactagctgggcaggcctggggcaccctgagccacgagggacatgctggtgggaagggcaaggcctgacacaagacacaaggcacactttgacgacgtgacggagggacaggtccctgagacgctgggtggctcccacccctcagcaaacaaggacgcaacaacagctaggaaaatagaatacaaaaatctggtacaggaaacagaggcggcacacacggacgtccctaggccgagagtctttaggctttcttctttttaaaaatggttttttttttttttctgggaaagcctctctgccagctgaagctgccgcagcagagctcatgagaagccctttcctaaggtggctccaggagccctaaccgggctgctgggcagtgcagcattttacttttttgctttttgtttaaaaaagggagatgagtaagcccccgaggacccagcggctgcaacttaaccagcctccagttcaccccagccccagccaggaagagaagcccctctcctgtgcagacaggcaggactactgggtgggcgtgggtgagcaggagctagagggggatccaggcacagcccaggggctgtttgccagatgacccctgaaggccatcatccccagaacatgtgacctcgggacgcccaggtgtgtctgcatgtgtgagcatgtacatgagtgggtgtgtctaggtgcgtgcgcgtgtgcgtctgacagtcctaccagagcagacgctgcccagctcggcgtgggctgggctggcctgcctggccccgagagcccagccctaggttctgacacctgcgaagtgggaaggaccttaaccacccacctgccccaggtgctcacccagttcccgcccttcacagaccccttgtccacgccaggagcctatgtggactgacaggtaggtggacagacggacggatggacagacagccttgccttccttccttcctcggtccactcctttctcctgggatccagggttggggtctgagctccctgtggtggtcattaagcccctcacacggcacctgccgaggtttgcagcaatgacgtttaatacttctggaatgattaggaatctgagaacagaccgtgggcggctatgctgaccagggctccggatgtggaagctgggccctgcctccttgcaggggactctgcccagctggaaggggcaggcagctcggcaggccctgaccggcaagcgggcagtgccaggcagcccagcagcagctggagcttccagaatggcacagcagtgggcctgtggagaggctggcgtcaactgaaggagaactggagggctgacacgcgtggctggcgggcaggcaggccaaggagcagagggcacgggcctacgagagggcggggcggcccagccgccggcagtggggcccgaagccactgtcgccgccggtgccactctgcaggctgtagtggtcgtccgcgtcactgctgctgccaacactgtccagctcaccagggccaaactccatgccctctatgtccacttctagggagaatagagtggggatggggtcaggccactctgagggtgccagcccatttctcccttttctggaagcagaagctctaggcagaggggcagaagtgcggagggcgctgtctgggccctggggcagcagacgccaggagggctctggctgagaacccggcctcagaagcaccagtcctcagcgggccacacagcctctgcatcccaccctccctgtccagtcccttctgcgcttagtgacaaacacacaccccagtgcagcagggagctgggagggttctccccagccccagcaccaggcacctcctctccacccagggagctgcaccactgcgcacccggaggcccaggtgaggctgccccgcgccccacgccccaccttgctctgagtcgtccgtggagacagcagagcccgtgctatctgtgcgcacgcgctccacgctctgcaccgacagctgctccaggcgccgcttcaggaaacgatgctcctgctgcagctgctccttgatgctcagtgcccggcggtcctgctcctccagtttctggggtcgaggggggctgtgagctcacagcgggaagaggagtccccccatccccctggccaggcactggggcacccaggcctgggcccgggaggttccccatccctgccaagacctagccaaggctacaggccacagggtgcccagtctctgccagccccacagcctgaggtgggtccctccctgccccagccaggcggtcacagtcagatgccacctcccagccctgtggtttctgtctacggcccagctctaatacccgcagccaccaggcagccttggccaagttgagccatgtgtggcagcgggtcagtgctacccaatctttggctggcaccgtctccaggacagtcctgcttacagcgggtctcctcacacactcccagccctgcccgcccccatcgggctgtggcctatgccatgcctgtccctgcaacacctgtgccctgccctctctaaaccttcctgtgggccccactgagacactgcttgctctgtgagggcccccagggctctggttgtgcccctctcaaagctcctgacaccccagcctgaaggtgaccatgcctatgcaggcagaagaggccctcagagcagatagagatttgccctggttggtccaaatgtcacaaggcccccaaaccaacagggctgtcaaaagtcctttggggggcggtcccagggaatgtctccctgagcccagacccactgccagctcccgctgccccaaccccaccctggcacccccatcaggctgcctacttttagtctgccttctgatggcacccaggaaaccctggccccctctctccttccagcagctgcctcttcacagcccaggaccccagagagcaatctgtcccccgacctcctcctctccatcccagtctatgctgcgatgcggcttctta

SEQ ID NO: 1881650 - DNA, 4001 bp, Homo sapiens
ataaaatatttaatttagaaatacaaaataatctacaaacttttacttcaaacttctttaactttcttctactttgtgtggcatgcatagtgctctcatagcaatgtgtttagaaggttgtaagaggaaggctgctcaaaaaatacattacgcagatttggaagggggtggaggtaaagttagaatttctgagtcatgaaaacatcagagcgctttctgaaaggtgtaactttatttaaaactgtgctgctgtgaattctatcatgccacagacacctctgaatcaacagtctctgttggcaaattgttatgctgacaaattctcacaaagactgaaaatttccattttgtaaacaaataagtgggttcctaatgatctagcttaccacctagaactttgaaaagtggaaccctggcttgagtgaccctgaataatctatttctcacattagcaaagcagattcaattatttatcacccaaatcatagagccactgtatgaatgtaatattaagtctgatactcttcttcaagctagggaagcaagaacagcacatcactgacttcactgggtggagtccctaaaatagtaagagtggcatgatgtgctaatgtggtcttcttcatgacactaggggctctatttcacttctatccataacagaacaaatttatttcatggaagaatgatccacaggtttcctgaccaggatatttgatgtacacacatgggaatgcacctgcaggcaaatacaggttgggtgatgggcactctttctgctgggtcacagtcagtcacagggactctagttttgtgccttttgatcactacctccagcacctacgaggaatgaactggacatgtgacatagccacgaagctgggggaaaaatcatcagccatcacagtgaagggaagtaggtgaggtacatgtgcataccatagacttcggagcaagcaaagtgcacatatgttacaaaaggtaatgaatgcacataacaaaagatatacaggaacagtagtgtccaagaagggatgtcagacttggagataggaggtgctgggcccagaccctcgatgtagtgcgattaaatgagatgcctattaaaagcctaacagcaggtcaagaatatgggaaatcctcatatatcagtattattaggaagtaattttctttccactcatttaataaaattacaatttgggcatcacctacatattaaagggggtttcatttcatgatcacaaggctccttctagctcagtgagtagaatgaagctagtggtaattttacctttgggcacccttgttttataaagagctagctcccattgttttataaggataaggcacctgtctagcctactaattggtggtagcgtgagaggatggagaggggaatgcttgtttttgatcacagtcttggtcccaggctcattttttcatgtactttcaccttcccatttctagatgctttaaattctccagcccatgtctgggatggtacagatttacctgtggtctcatgaagaaagagcaggacccaaaagaaacacagaatctggaagtgtttgtcatcagatcaacaacctagaagttggaagagtctagtcctgtgtgatcatgaagacaatgatcttctttcctatctagaaagcagaaatgatatccagccttccacacctgtgaacacaggcctgagcacccactgtccaggttaacaaagatgtcctcaagggccagacctgagcaaaattagaaaatagaggtggtatgttgcaagaagcactggaacagaagctgtgatacctggatcctggctctgccattaactcattatgtgaccttgaacaagtcatttcacttgttttgagtcttggttttgagtcatttgacttggtttgagtcatttcattttttgagccttggttttcttgtgtaaagtgttttaaacataagaaatgttattacattttacacataagaaaaccaagcctcaaaaaagttaaatgacttgttcaaggtcacataactcattaatggtagagccaggatccaggtatcacggctcctgtcatggttcaaaaactcccagtatttatggacaagaagaaaacgtttagaaaatattttaatcggatataaaaaaaacaaagttgtcttgaaaatcagggtcagccttccacaatcatgccctctccctctcatttgtctctctctctctaattctttctttctggttcctcaggttaagaaataaatctaaataatttataataaagtgttatcaccataggtgacacctcctttattggtatttgtgtgctaagaaatcaatatctggtgttaggatgtcagatgcttgcaagctgaagaatgtggaagaagattgtttttgcatgtacatgcgtgtgtgtgtgtgtgtgtgtgtgtgtgtgtgtgtatgtgtgtgtgttttgagggaggtgagtaattggtatccttcttaggtagaatactccaaagacagcagcctctctagctgaggcaaagctggctgtgcaaagagccttttacagcgtggcccacagacaatgtgaaattctctctcctctgcagccttggtctgcagtgacactggcagatgctaaacttcggcctgtctagaacagttaattaggttatagaggctgccaaaaatcccaaagtcatccaaagaaaatgcaacactttgagatctgaagcaaaggtcagaagacacaaacactaatcctatttctgagaagagagaaacaaacaaagaagtaagagaaaaaagaaaggcaggaaggcaggtccctgacaatctggcaacttctaatcactcttttataaacaatattgagatcaggcataaagtgatcctagctcttttctccagtaatagatactgtatattcatacacgatgatatgcaataaataccgcatattcatgacctttccacagctctcagtccatacctcttgagacaatagaggatctttcagggacccccttcctgctgagaacatttccacccgagaatgactctggagtgaagaaattgaatcaattaaataactgggtatgttcaagccttctttacgggttgcatcaaattatcacaaagtaagaactgctgctgtctgccccctggttctcaggagtggagaggcagccttacaaacctagagacccaattcttccaaagaggttaccccagaacgtgtgtgttggggctggggtggggtaaaaaaatgaacagcagtgcataggacttcactgccaccagcaggccccagaggaagtgcaggcccagaggaggccgggctgcttaggttaggaccatccaggcaagaagagaacacttgcgtctgaactgcctcaccctgtgcccgcccaccccttccccaatctcagagatttggaaaaactgttcttcttccctaaaagacaggtgttcctgcccagaagcccagaataagtgatttattgactaaactgcaattaaggctacaaacactcccttctccctgcgccgttggcccccaacacaattacactttattttgcgaggtcttcgttcctgtcctggcttatgcagtatttccatgggtgcagtggagtggaagggagacggcgattttacatctgggtccctctgcgtctcatgtcacctaggacgtggactggacccctgcgccgtccaccttgagcccggaacccgaggacggccccgcgtcctctgtggccgccctggatcaacttcaggtggagctgacctacgcgttgcactgactttgaagagcggctgaagcgcacacaagaagctgctgcccacagccagctccgatttctcgcaccccggtcccaatccacggccacctgcactttgcgtaacgttgcgctggggggcgctccagagaacccacaccctcccgcccggcccaggtgcgcacccggccgcgcggggctccagcaacctggcggccgacgggccc

SEQ ID NO: 1881651 - DNA, 4001 bp, Homo sapiens
gcctcgccaacagagtgaaatcccgttctactaaaaatacaaaattagccgggtgtggtggtgcatgcctgtaatcccagctacttaggaggctgaggcaggagaatcacttgaaccctggaggtggaggttgcagtgagccgagatcgtgccactgcactccagcctgggcgacaagggccagacttcgtccccccccaaaaaaaaaagggctggactcagcggctcatgcctgtaatcccagcacttcgggaggccgagatgggcgaaatgcttgaatccaggagtcgagaccagcctgggcaacaaggtgaaaccccatctctacaaaaaatacaaacattagctgggtgtggtggtatgtgcctatagtcccagctattcaggaggctgaggcaggagaatcacctgagcccaggaggtcgaggctgcagtgagccatgactgtgcctgggtgataaagcaagaccctatctccaaatatatatatatataaaaccaacaaaagtttcatctacttgaccctaaacaacttgccttaattttgtacttaatgaattggtcataggtatagccttgcagggataacaacatagtacataaacttctgaattttaccaaatgaattagaaggtagtttaagtcattttaaaaaataatttagcaacttttcttatgctttctcaatacatttaaaacctgattgacttaccagatgttccttaaccacaattttttcagtaacaaatctatcacagaaaacactgaccatggtcgtgacattctttggttttctatcacgtctcttactcaggtttcacttgtttctgaatttcaaattctaaggtttgaaaaaatatctgcaagtcaatatttaaactggccactggcaatgattatgttcttcattaagttcctcaatgttaaaaaaaaaaacaaaacagcaatataaaacaagcgatcccgggtgactgaagttttaactcagagtccaaatgctgcatagaagagcagctgctggcttcatttatcgtgacgagtaaaataaaacataggaaaacagtcgcagttttaatttaagcataatctaaacttcaacttgatccttgcaatgtagcatcataccttatggagaaacatgaagacaaaggttgtaataaaatttggatgataaaaaaagttggatgacaaagaagatgtggaaagcagaaagaggattggtatgcaaaacccatttaggttctgctgctcacagttctaacctcagagggtggagagatacacagcccatacttcacatagtcagatgctgaaaacaagcatctaggccagtgccatccaacagagctttctgtaatgatggaaacactctgcgtctgcaccgtctaatacaaaagccactgatacgcatgtgccacaaagtccttggcatgtgtgtagtgcaaacaaggaattatttcatttaattttaaacaaatttaaataactgcactgcatgcagctatgggctaccatattggacaacacatgtctgtgttcacagggtagctcctggacagaagaatgagagatttggggcagagttagatcagtaagtcttagaaatgctgcacccactctggtggagaagctaatctaactaatgccttttccattgcaatggtgagcagaagcttccaatacactttaatacactattagaaatgtgtgatcaacttttctcaagagtcaacagatgctcagataagagtgaaataaagctcagaaactcagaaaatagtggccctattttcagtcttttagttcttcttctccagaggcagaattccctttctgatgctgacattaattacccactcaacaccaccacaagccccacagcgaggccctcaaatgcacacatcttcttccacctgtctcctgcttggcctgcttgaaggtttccatccatgtagacttgaacactaacatggtctagaacctccatacaagccagtcagctcaatagaatgaatttacagaggccaagcttgagcattttgtaactgtttctgacatatgtctaaagcaggttggactgcctcacttcttggatgagaagggtgggtacgtcacattggacaaatcacctgttatattgttttcatgttgacacatttcccacagcaaatttgtttgatgtgtccttgttattctgttcaaaaaatggagtccagaacgtcatttgatgaatatagcctggtctgaattgaagggaagtcaagcatgaaggaggaagtggactgaactccctgaatgctgctgagaaatgcttccccagctaagacagtgtttttcccatctctctggtaaggaggggtgagaagaggtgaggaagagaggccaatgagtgctcgtgaatcagtaagactccaacgacacagaacttgagaacagttgaatttgctgggtgcagtggctcaggcctgtaatcccagcattttgggaagctgaggcaggaagattgcttgagcccaggagttcaagaccagcctgggcaacatggggaaacgccatctttacaaaaaaatttaaaagtcagccaggtgtggtgacatgcacctgtagctccagctattcaggaggttgaggcaggaagatcacttgagcccaggaggttgaggctgcagtgagcagtaatcatattgctgtactccagcctgggttgagagagcaaaaccctgtccgaaaaaaaagacggctgggcgtggtggctcatgcctacgatcccagcactttgggaggccaaggcaggatgattgcttgaggctaggagttcaagaccatcctcgtcaacatagtgtaacattgtacaaccctgtctgtacaaaaaaaaaaaaaaaaaagaatggaaaaagaaaacagttgaatttgttaagcctggacagacagaggacagtgttacatcacagactcagaaacagtgactaaagtctgacatttctatcttccctcctccttcacttcctgtctttgaaacaagcactacaaagacatgaaatcagaacctaaaactgagaagaaagaaaaactgtcacaggagtatgatgagtctgcattaggcaaaggactctcctgacaaggtggcctcaaggtggaaggaggctgggtagatgcttttggaggtgctgatggccattagtaggtggtgggcattgggaagagtaggtgtacttcacatcatggatgaggggattattcatgagaggtgatttgcaggtttgcctctaagggaggacaagagtgaaagaggaggagtgggtaccagcaatgccagtcctggacgttctgaaaagatgcagaggattccagtttgagaagtgctactagcggtgtccactggaaggtcaaaaaggtgaaggtgaagggcagcagagacagtgactgtggttacccctcactgctgcccctcaccttggacagtgtttactgtcattgtcttgtagatttgccagcagaaggcttttaattatttcagttatttttagaaataatatgtattatatgctgcttctcattatataagaaactcatggaaagcatggaagagcctaagaggggggagagaagaatatatgtaaatatattacacacacacacacagacatatacacacacagatacatatatacatacatacacacacacagaggtatggccagagatttcatattaaagacaatagggacgcaaaagaggacacggaaataagcaaaattaacaatgaaattaggctgggcatggtggctcacacctgtaatcccagcactttgggaggctgaggtgggaggatctcttgaattcaggagttcaaggccagcctgggcaacatagtgagacccccgtcttggaaaaaaaagtgaaaaaaaaatttttttaaggaaatggtataccctctcattatgggtgggaattagagtgctcagattcttcagggatggttttctattttgcattctttc

SEQ ID NO: 1881652 - DNA, 4001 bp, Homo sapiens
ttttgttactggtcttgaacttgtggcttcaagccacccacctgccccagcctcacaaagctctaggattacaggggtttgctgccacgcccagccttgactgcatatagtaattaatcttttaagattcatatccatgactttctcctctctgctatcttcatcaaactcctcaaaacacacaggatactctgaattgaaacaatgaagtcaaattgtttctgatttaaagtaaatctgatttgtctagtttgacaatgaaaatgggctctgttaattaggttataaggtaaacatttaacattcttaacaaacctttttttttcttgtttttgagaagggtctcactctgttgctcaacctggagtgtactggccccatcatggctcactgcagacttgacttcttgggctcgggtgatcctcccacctaatcctcccaagtaggtaggactacaggtgcacgccactacaccgcctaatttcttttatttttttgtagaggtggggtcttgccatgttgcccaggctggtcttgaactctggactcaaccgatcctcccgcctcagcctcccaaagtgctaggattacaggcgtgagacactgtgcccagtgacaaagattttgaacttgaatgagctaaatctgcagttgcaaattttgacaaaaacataatttaaccacctgataacaaaaataaatcttatccaaaactatttatgaaaatgaaaaatgtttagatattctccaaactttcagtatatcaggtgaaaggtacacctcattgaaaaaatcaggtctaattcatagtcatttggtatcttggtaaaacctatctggtatatttcccagaatctgaaagagtgaaaaaataaggattaagtaaacaaatcctttggcaagccaggtggttttcagctctttgctttccataaaatagaaggagggcctaattgaagtcagctcatagataatcaaatctaattttttgaggtcaagaattgaatgatattgctacaacaaaactcttccattcctaggcacagtacttgtttatatgaacaaggtttctcagggcacacagctataaaaattacaaataggaatagaattgatgctcaacccttcttttcctactaataagatatattcagccacagatgtaggaactttaaaaagcaacaatatgcatttttcaataaagttacacacactatttagtaattatgaaattttctaatatttatgttgctttgaccacgtactaataataatttcaaagatgatgcagtccaaaagcaggtgatttgctagctgtgtaatcttactcaacatacttaatttatctgagccttggttccctgatttgcaaactggggacagtaatcagacctagctcttagtgtttgtccaaagattaaatgcgttaatacatgtaaaagcacttaacgccacgcttggtacataatatgtgctatagatgttttacctgctataatcatagtaatcaatagcaaatctcctaaaaataaaagcctgtcgatttgtcttcacagataggaagaacgggctggagggatcggatctaatccacaggcacactgccagaaacaagggacccccacggggaaatggtatgtgcaggcagaagagagacagaaggaacttggagctacctgctgggacaagaatagtgcaggatcacaggctaagaacgaagagggttgggcgaagttagaatgagcagatccacgtagggttcgcattacaaatgtctatggatctctatgcactgctccgggaaactggagcaagagaggcaggcctaaaatgccgtcgcggatgaagcggggccagaaacgcactgcccccgctcagacctagggccccaggtgtcgcgcgggtcgaagccctaacctccagggactccagacccctgccggtgacctaaaccccacaacccgcgaccagcacagtcttgtcgtctccgtcgccacagtcgccgccacttccggcgcagctcggcctcgcgagggcgcttgcgcccggcgacggtcgaaactggctcttcgcggcctccgtcgccggactttcgtcaatgttgtcaccgtcttttcctcctttcccccagttccctttcacttccggggttgctctggatccgctggttccgtaacaacatcccgttggcttccctcaggcggcgggaccagtgcagccgccgcctcccaggatcgtccgccggtcagggcccttgccctccccggcacaggccaccatggccaccaacccacagccgcagccgcctcctccggcgccgccgcctcccccgccgcagccgcagccgcagccaccgccgccgccgccgggccccggggctggccccggcgcgggcggggcgggcggcgcgggtgcgggcgccggggacccgcagctcgtggccatgatcgtgaaccacctcaagagccaggggctcttcgaccagttccgcagagactgcctggccgacgtggacaccaaggttaggagcgcgccgggtttgggggtctgcgagggaaggggaggacccaagggcgcgcttcttttgcagtggcttcctcttggagctgcagctgtgtgccacggactgtgcaaagcacagagtgttcattccttagcgtgtcctttggttcgttttaccgactagtgtttaagtacctactacgtgccagtcatggtttcggcacagtgattaccccggtctgatgagcaagactaaggcattgttcttacaggaactggtttggaaacagtggcgctaacagtagccagttttgtattcattctcatatctgatgattttactttgtatcgaagttatgtttgccttctttcttgaaggtttctgggcggtaagggcctttatcctttggagaaatgactaaatggtaattgaatcaagttatgtgtaatatgctttgctggacatcgtgggggtgggagcgcaaagataaggaggcaaacctgagacaggactttagtattgtttctagcagtgattgcctgatttaggtaacttaggccatgtcaccattctaaggtaagaagggacaggaaggtggggtagagagaaccgagtcattcagtggagaaaagatgcaggagaggtgacagcagatactgaagtggagaaaggacaggaaagagagcagattcaggagagtaatgtagagaagggaaaggacagcaacaaggttccctgtccagaaagagaggctggaaaggggaagggattttgtaccaaatgtcagagtgaaagggacattagcaggaacaagtaaacttagctggattggcaaagaattagccaaagacaccaggaaagagcagtcagtgagatggatggaaaaccacagtacagtctagaattctggaagcagaaagcatgttggaaaattaactggtttgtaggggttgtttttgtctgcttgttaaatctggttgggtccattggattggagttttgatgaaatgagggtttccttttttttttttttttttttttttgagacagagtctcgccctgtcgccaggctggaatgcaatggcgtgatctcggctcactgcaacctccgcctcccgggttcaagcgactctcctgtctcagcctcccaagtagctgggattacaagcgcgtgccaccacgccctgctaatttttgtatttttagtagacacaaggtttcaccgtgttggccaggatggtctcgatctcctgacctcgtgattcgcccagtaggcatgagccaccgcgcccggtcgagggttttctcatagtatgtttagttgttctgaggagctttgtatctttgagaaatgcatgtttacaacatccacagtttcttctaaagctttcaggtgaactgcacacagttccactatgtcttctggggaaactcttgaatatcctggtacatcttcctttataaggactcatactgggcccactatgtaaaacgtggt

SEQ ID NO: 1881653 - DNA, 4001 bp, Homo sapiens
atttctgtacacaaatcataagattattggcagtaaccacagactctacatatatatgtccaatttaatactgtaaagcatagttgttacattaatgctaaatgttataattccaaacatgaaattatgagagtattataaagcattctaaatgttctcaaaatcccataaaagcaaaattgtgacagatattgatctgatgaaattgatctgatgaaataaactgggatattgatctgatgaaataaaatgggaaataaatgtgtatttataaaagtaaataagaaaaataattggtatcttttgcactctataaactacataaattgtataactaaatatagaagtttcattcataggcatattctttaaagagcagtaattttcagcctcctccaacttttttcaagggtaggatataacatttacacatgaaataatttcataggacacctaatggaaatcttacctctggtctccacatacacacaaaaaaggtaaccagattaaaatgagagagtagttttgttaagccaatctaaaaatttgtttcaactaagaaaaatcataatggacaatcctccatctaatctcaagtgccagcccacccaggatatctctcaattgttatacactgtagtatggtagtaataaaataatgacaacatagtttacactcacttggaaaccactgctctagagatgccaagtctctgtaataactatatatgaacatatggcatatactgctacagactaacttcttcttgtaagccattatttattccttctattaagcaattatttttccatgctttgtcatttccatgctttaattaaatcatttttaatgtattggtgctttacatatttgtaactcccctcaaattcacttaaaaagataatgcaaaagaatgaaaagtgataaagccaatgtatctatccttcgtatctttcccacagttcctctggcatagttattaattgattaactagaggtacccaaaggagtagaaattgatcaataacaaaataatccttaaaacagagctaagtagttcactggcaaataggaaaactgacttaaagtcagtcagacctcttgatttgctaccccattccccacagccaggccaacactcgcccctatgcagtattaattaaaccagcagtatatatgggacatcaggaaacattctggggcatgggaatagaagaaaggtgagtgtagtcctaaaaaaacaaagaattaagtaaatgcctactgaaaagagaagccccccacctcaactcaagaccactgttcagctacaataacactggcagccagacatacaggggtagtcacaaatggaaattggaaacagtgttttttttctgggaaactggaaaaaacatacagataatgaaatgtgggagtcacacaatttaaaagtggctttctgcatcgtcacactaaagtgaagcctcaagtcaagaaacttgccccatttacacaaagcgcatcatcactttagaacttcactctttaaaaagaacagacataaaaagatgatcagacgttcaaagaaaccctttaagatgacaagatagtaaaacaagcaaacagaaaaaaagaactttgaagaggtgctgggagctaaagaaatcatccaaagaacctataaatattcttaagagtagaagaaagacattgcagtcatgaaataagagcagagttctacaaaagggatatttggagaatgagaaattacttttacaaaatagaataaagaaatcaaaagttaaagcttcaacagaggagctagaagataaaattagggaaatattccacaatttttttcagaggataaaagactgtaatattaaaaaaacagtccaggccgggtatggtggctcacgcctgtaatcccagcactttgggaggccgaggtggatggatcacctgaggtcaggagtttgagaccagcctgaccaacatggtgaaaccccacctctactaaaaatacaaaaattaactgggtgtgatggcacatgcctgtaatcccagctacttgggaggctgaggcaggagaattgcttgaacccaggaggcagaggttgcagtgagccacgatcacgccattgcactccagcctgggcaacaagagcaaaactccgtctcagaaaaaaaacagtccaccagatccagtatctaaacaacagactctccagaaaaagaaaagagaaaatgaggggagaaaaaaatgtatcaaagatataacacacacattcacacacacatcaaacttgaagtacatcggtttccatatgaaaagggctcaccaagcaaatacccagcacatagaacaaaaagatccacatcaaggctcatcatcatgaaatttcagaaggctcaagataacaagaaaaccctaaaagttaccagaagaagaaaatggttgtatatttgccttagaatggcttcagccctatagccatatccagtcatcgcacatagcaatagatgaatgtgtaagcacaagtaagctaatactattattaaatggggatattatatactgatggcattttaccaaatacttcctgctaaatttctaaatttcagttagactaaaattagcctaaaaacttttaaagttgcttcaagatttctccattttcacagttattatagtaagataaccaacataagataattgtacaataacattaataatgccagtaagtaatagtaagaatatccagaaaatacactagaatccacaccctactattagatgacaaaaaagacctagatattatatactgagcaagactgagtattgcaaaatcatttcaaagtgcccaacaagaaatgaaaggattttgtcctttatattaacaatgaatattatgggggttggaggttttgaagcaataagcacttgtatgcataatgcctggtaagtgaataggcatacaatattatttattgaatgaatgaatcaatgaaagatggaaaaaaatgttccgctaaatttcttcttggaatctagcatatcaaggggaaggtggaagcaaggctttcggagtcagacataaaagtgaatactaactccaccattactaattgtgtgaccaaatgcaaattaatttctgagccccagtttccttatacattcagcagagataataagatctcctcataggactattctaaagaataaatgagattatgtatgagccccagtttccttatactttcagcagagataataaggtctcctcataggactactctaaagaataaatgaggttctgtatgcaaagcattaatacaattcattccataaatggtagcttttgtaactactactaatacaattagtagtattaggctgctgctattactacttggccaggcacagtggctcacagctgtaatcccagcactttgggaggccaaggatggtggatcgcctaagatcacacctgtaataccaacactttgggaggccaaggagagtggatggcctgagctcaatatccattttctggatattcttactattacttttatgtctgaccccaaaagccttgcttccgccttccccttgattatgctagattccaagaagaaatttagcggaacatttttttccatctttcattgattcattcattcaataaataatattgtatgcctactcacttaccaggcattatacatagaagtgcttattgcttcaaaacctgaccagcctgggcaacatggtaaaaccttgtctctaatagaaatacaaaaaattagccaggcatggtggcatgcacttgtaatcccaacaactcaggaggcggaagcacaagaatcgcttgatcctaggagacagaggttgctgtgagctgacatcataccactgcactccagcctgggcgacaaagcaagactctgtctcaggaagaaaaaaaaaaaaaaaaaacactgcttcatcttacgaaggttagagttaaactacaca

SEQ ID NO: 1881654 - DNA, 4001 bp, Homo sapiens
ttttcagaaagcagaatagaaaaccaggactgtagtagtacaattcgaatgtcaccagattatttctccaaatatttgacccaactctcatatagagatatgctttacaaagatagcctttactaggaagtccaatttttcttaaattttcacattactttgataaccatttagactgtgctaaatatagatattctcacaattgtgtgataatttgaagtttgtgaatttcagtgcttgttattgtaaaaacaaacaaaacatccacttcttttctgaattgccaccctgaacactttttgtcagtgcttttccccccatattcttcatcaaattattgtaatttttttaaaaaaactatgtcttaactattccaccagtctgtgaaaacatttcaggaaacatagcacccagaatgtaaagttataatataaatttgatgagtgagtagatcaataattcctagtcaaacaataaatttttatatctataaaatatttgcctctatatgtcagagaaatttttaaaagtgtatacaatgaaatgcatgatagttttttgaaatatatactgtaatacttccagaagtaaagtatatgtatgttattttatactgtaattttataggtaattatataatatggtataattatatattatatatagtatatacaatatataagtatatgtaactatatatgtatatatttatatgtaatagacacacaaacatatattttaaatttaacaaatacttttagtccagacactgttccaagcactttacaaaatgttaactcatttgatttctaaaataatccaatgaagtaagagccattatttttctcattttaaaattgaaggaacagatacacagacatctatatagcaatttgttcagtcacacattgggtaagcaggggaatttgaacccaggcagtctaatattagaatcactactagtaactattacagaataatgcatatgaaattgttcttagtatggcatccacaagcactaggcaagtatattagactgaaccatcctttttacccataaaaatgtaatttcatgtttcaaccaatatagttaagggtggaattcgaccaagaaaaggataaataactttattttctgtgaataagtcacaataaggttgagaagaaaatagacaagttataggatagtacatcctcctaatgtcacagtgacagctttgtcttcaagaagcaatgtaaagagtgtttctttagtgtcttaactttctaatcaatttaacaatcacaggatgtgtactgagaagcagcaggactgaccataattgatatgtaaatacagctgcggagattcaattgctaaagagtgaaaccctgccctatgatgttttacagttaaagacaaatgtgtgatccaccagtctgggggtgactgatcaactgaaaagaaatccctgaacaagtagatattgctttggtaaggtactcttaattcagcaagagttaatacaacagcaccaaaagcattctgttttggactttttaggctgacaacacattattttactttgcttgaattttgacacgagatatatatttttatctagatgccaggcactgaatctttttttttttcttttcaggtagataaataacttttctcagaaatgtattctaaaggagagagaaagctggtgtctgtacttctggaatcaacgtctggcttttttagttcttaaaaaatagtgtgaccttaatcaaaacatttctttctatgagttagtgtactcaattacatttatttacttgagtttttcattacaatctaactgatcatgtgattaagtgataaggatatgtctatggctatgatttggctctatactaaaggaggatgaataagggactaagaaaatctaagaagaatatgtattaggttggtgcaaaagtaaatgtaatatttgccattacctttaaaagcagaaaccacaattacctttgcaccaacctaataatatctgcctctatatttcagagaaattctcagaagtatatgaaataaaacacataaaattatttttggaaatatacattgtaaatatcacagtattataaaacctaatgtgagtgcagtaataaaaataaagtatgcttattgagtatctactttgaggaagtctttaagtctcatcttggctataaaatgacaatcactgcaaacttctcttttattttgaagcacccagcattctccttttgacccaatactataagctaaagtttccagcagtggtactgttatggaacaacagggatcgctgagatttagaattactaacatgcataaataattatcaatttggtaagaacaaagtgataagatgaattttgcgtaagagatttaaagtatactttgttagggagtgtgatgagaaagatgaactaggcaaaatatttaaaagtatatccttatatacaatatacaatatatacaatataccagtccatagcctcttaggaactgagccacacagcgggaggtgagtgtcaggtaagcaagcaaaacttcatttatatttatggccactccccatcacttgcattagcacctgagctgtagctttcatcagagcagcagtgacatcagattctcataggcgcatgaattctattgtgaactgtgcatgccagggatctaggctgcatgctctttatgcctgatgatctatcactgtctccagtcacccccacatgggaccgtctagttgcaggaaaacaagcgcagggctcccactgattctacattatggtgagttgtataattatttcattatatattacaatgtaataataatagaaataaagtgcacaataaatgtaatgcacttgagtcatccgaaaaccatctcccacaacccccatggtccgtggaaaaattgtcttccatagaactgttccctggtgtcaaaaaggttgggggaccattgctatatagaagaaatgcctaattatgtaccctattactctagacatagattaatatatatccatatattattctatatgttgacttatttataaccgagatatgtaagacactttatcacataagctcaaatatatctattcaatataatttttcttaataaacaaatctgaggaaaaacaaagaaaaaattaaagactctcaaaggcaagcaaggaattcagcttgtaagtagcatggagaaaaatagtatctgccaaaggcttataaaacagtaaagaagattgactcagaaaatgagtccagtgtttaagcagcatgaaatgaaaaacaatatacagtgtactgttataatgttttaaagcattatggattttatattggtgttcatagcaacatctaatctgccttagaaacttattttgacagtgttttgtactcaggatgcatatcaaagctttgctaccacactttgatcagaatcagactcaggaatagatattatctaacttctaacttagcatcctcaattatcatattttatcagatctgaactgtgatgaagattttggatgatgtgtaataggagctaaacaatcatgaatttcactcaccaaattcaaaatgtaaacatggttgtgtgaaatacagtcattgccatgtatttgattgaaatatctcatttgactttctgataatttgggatacaataaaagtgaattagtggtgacatctaatatttttctaagggaaatatagctctatatgtctttctaaagaataaaaattgtatacttattcatttatgttttgagatgtttctttttttgtacaccagtcaatagccaagtactgcctaccatttgtcagtttcattttaagggaaaggtaggtaagaaatccttaaaattttcattctgaatatcttttcctatactttaaaaaataaggaccagcttattgtatagcttcactcaacaaaatagaagccaacagagcattactctacattctctga

SEQ ID NO: 1881655 - DNA, 4001 bp, Homo sapiens
attgggtagacaaataatacaggaggcagaggtattggtctacagccccaccatcttccaataccagtccctgtcctttattgctgcctctagggaggctggaaccattcacctgatgccaaatgattggaagaacagggcaatgaagggacttagaataattcctagttaaccaatgtactgctgacaacaatacacagtaaagagtaaacaatcagaccttccccagcacctcgtccctttggtggatggggaaatttgatttgcccatatttttaatgtagaaagatatagaccactaggaattaatttacacagagggctttttagcctgtgatatgcgaaaatttcaagtatagattatcttttatctcaacagacacactgacaccgattacccttttggaacgctagagtcagatctatttgaccagctccttcttatactttaggtagatcagaaattcaattaaggtttggtgaaatactcatgtttaccaggagcatttgttccagtattcagttctgaaccctaacctccaggattacgttcaatgaataatcagctgagttggccatgtcaccattcaccaaatcaatacctattgcttaaactgtttttaacccagtttttatttttgctttaatcaccaaagtcctttatttttatttttaaaaatttaatttaaaaattaaaaatatttataacaaaatttaccatcttacccattttttattttaacattttaatttttaatttttgtggttataaagtaggtgtatacatttatggggtacgtgagatgttttgatacaggcatgcaacacataataatcacatcatgaagaatggggtatccatctcctcaagccattatcttttgtgttacaaactacccaactacacgattttagttatttttaaatgtacaattacattattatggattatagtcaccttgttgtgctatcaaagagtaggtattagtcatcctacctttttgtatgcattaaccatccctacctccccaccagcctcctactacccttcccagcctctgtaaccatccttctactctctgtgtccatgagttccattgttttgatttttagatcccacaaacaagtgagaatatgcaaagtttgtctttctgtgcctggctcaattcacttaacatagtgatctccagtttgatctatgttgttgcaaatggcaggatctcatttttttaaatggctgaataatattccattgtgtgtaagtaccacattttctttatccattcatctgttgatggacacttaagttgcttccaaatcttagctattgtaaagaatgttgcaacaaacacaggagtccagatacctcttagaggtactgatttcctttctttggggtatataccccatagtgggattgctggatcgtatggtagctttctttttaggtttttgagaaaccttgaactgttctccgtagtggttgtactaatttgcattcctaccaacactgtacgagggttcccttttctccacatcctcactaggatttgttactgcctgtcttttggatataagccattttaacgggggtgggatgatataatatctcattgtagtttagatttgcgtttctctaataatcaatgatgttgagcacattttcatatatctgtttgccatttatatgtcttcttttgagaagtttaacaatattgattcttgcaatttgtgaacatggaatatctttccattttttgtatcttcttcaactcctttcatcagtgtattatattaatagtttttattatagagatctttcacttatttggttaattcctgggtatttaattttatttgtggctattgtaaatgggattactttttaaatttcttgttcagattgttcactgttggcatatattgggctggtgcaaaagtaactgcagtttttgtcattacttttattggcaaacactgcaatcacttttgcaccaacctaatagaaatgctgctgattttggtatgttgattttgtatcctgtgacttgactgaatttgtttatcaattctgctagtttttttggtggagtctttaggtttttccaaatataagatcatcttatctgcaaataaaaataatttgctttcttccttttcagtttggatgccttttctttctcttgtctaattgctctagctaggacttccagtactatgttgaataccagtagtgaaagtgggtagccttgttgtgcttcagatcttagaggaaaggctttcaatttttttcccattcagtgtgatactagttgtgggtctgtcatctatggcttttattatgttgaagtatgtttctcctatacccagttttttgaaggacttttatcatgaagggatgtttatcatgaaaggatcaaatgctttttcagcttcacttgaaatgatcatctggttttgttcttcattctattgagaagatatatagtattgattgatttatatatgttgagccatccttgcatcccagagataaatcccgcttggttgtgatgaatgatcttgttggtgtactattgaatttggtttgctggtatacccgttttttaagggtgcacttcagtggcattaagtatattcccatttttgtagatccaatgtccagaactcttttcatctcgcagaactgaaactctgtacctactcaacaaaactccctaatctcccctcccccaacctgtggcaactgccattctacattttttgtgtatgaatttgactaccctgggtaccttatacaagtggaatcatttacagtatttgtctttttgtgactggcttatttcacttagcataatgtccttagggttcatccatgttgtagcatatatcagaatttcctttgcttttaaggctatacatttctttttttaatcacaaaatgatttgagtttatgtagctaatcaatcaattagattaagagggagtatccggtctgtctaataagagtttaggcatgaaaaatggtaagaaaggcgttggtagagagggagagagagaatttgctgaaatatttaatgccatggttctttagggtgcatcagaatcatggggaagacttggtaaatcagattgctaggctcaaactccagagttcccaattcattaggcttagagcagggcctgggaatttgtattttccagaagttcctgggcatgatcacacttttgacaaccattgtaacctatccagggtgaggcctagaggattctaattgccaaaattttcccatcgtgcaaagaagatacccctcccaactaagacaagaagcttgaagttatagaagtagggaagcacagagaagagtgagaaatagtgagaaaacccagccctcaagatcccagcaacttgtggaaatgagggaaaagatggtggcaagtcaagctgtgaggaccaagttctgatttctcttctagcctcagggaggagagggaaagtgtgtgagctaagtgaggagaatgtcaaagggctcagggaaccctggctccactgcaccatttgagaccctaggagaaggtcactggagtaggtctggcctggctcaatttcgaggtctctagaggtccagacagaaggaagaatctcagacatcagacggcaaccagcagacttgcaaggaggcaactatggtggggtgagatgatcctaggatgggccctgggtcaggagttgctgggatgagagtttggcagatgctaagttgtctgaagctaaggggagctgagcagagactgaatctgtaagtgtggggttgccagcaatcccaggggcattgcccaggccatggctgaccatggatttaccagctgcaggattcagcgttggaggccagcagtggctgggaaggctatggacagagccaagggaccaggggagatggtgccaaagacctgcgctcaccacttctccaaatccccagacactgtttagcaagacagc

SEQ ID NO: 1881656 - DNA, 4001 bp, Homo sapiens
gaaaaattagccgggcgtggtggcgggcgcctgtagtcccagctactagagacgctgaggcaggagaatggcgtgaacccgaggggtggagcttgcggtgagccgaatcgcgccactgcactccaacctgggcgacagagtgagactccgtctcaaaaaaaaagaaaacaaacaaacaaacaaaaaactgtgcaaagaatggtgaatgagtcctgcaatcaattaatttcccagtaattgaacataactctttaaagcacagaaactaataagaacatcaacaataacaatttcggggccgggcgcggtggctcacgcctgtagtcccagcactttgggaggccgaggcgggcggatcacgaggtcaggagatcgagaccatcccggctaaaacggtgaaaccccgtctctactaaaaatacaaaaaattagccgggcgtagtggcgggcgcctgtggtcccagctacttgggaggctgaggcaggagaatggcgtgaacccgggaggcggagcttgcagtgagccgagatggtgccactgcactccagcctgggcgacagagcgagactccgtctcaaaaaaaaaaaaaaaaaaaaaaaaacaatttcggtggaaatcttcccatgtcttttaaaattgacaacttgaatgtaatataacattttcctggcaattctttgcttattacaggttggtgactgtgccctgggtggtagagtttgccagataagccatccctgaatcagtgaagtgtgattgaacaattaaatgactaaaatggtatagcctccatacccatttgcattctttgcacttctagtctaaaaagggcaagacaaatgcaattgtgttgtggagaaatatttggattcttttggagagaaaaggaaaatcaaagaaaaatattatgcatggtatgaattgggagtttataattcagaaatttactaaaaataatgacaagaaccgaaagtgaaaaaagtagctttatttttagatatctctcacatgtgagagaataacctgatattggccaataaccaaattaattatttgtttctccatgaagactcctttctgaattagaaggagaaagaggtgaattgaagagcagattgaaaatggagatataaaatcaatgactcttttttaaggatgagtcatcatggcttttctagatgattgattgtgaagtggaagaaatagaacgaattaaactataagcatttgagcccagtagttctctggggcactcttctccactatttgaactatctttatttcataagctaagactaaaaacattgccaaagtgaactggttctccagagtttctagagtgcattattatcattctctaaaatgaaaatacatctgatacttcaaaagacacattgttatgttttttaatgttttgcttatatttcatctcattttgaaaatgattgaagtagcttataataaatacacataaacaataagcaagtaaataattgcaattggaaactaattctaagtgaaagacaattatatctaagctaatatcaagaatggacaatgacattacatttaactctgagctttctagatgccaaaataagggccagtgatgaattatgcattgtttatctgaacaaaagaattatttatttaagagttacacatcttctaagacatatttatgcatttattgcatggatccttttacaaatgcatttagacaacataatagacaaccacaaacaactcctgtccaaatgtttataggttcactaatgcatacctacatattagtaaataatttatttatgcacaagtatgctatgtgtgcatacatgtatatttctgagttacagcatgtaatctatatacacacatgtacataaccatacatacagatatacatatatgaagtattatgttggtacaaaagtaattacagttttgccatagaacgtaatgcaaaaactgcaattacttttgcactaatctaataactcagagaaagtgtttctctaaaggggtaatgaagttgtgtagattgctggcaatgatggccccaattcttttcatccctgcgtgctaacacttggtaatgtgattttgtcactcccttgtcaagtggtagagtatagttctcttccccttgcatctgagctgtctctgtggccagctttggccaatagaaatgactttgtatggcttcctagcctgggcttcaagaggccttgcagcttctgctctcacactctagtccaggctagccctcttatggataaaagcacatgctagccctcttgaggataacaaccaccctcagagagaagcccagctgatggtcagcaccacctgccagacagttgaagaaagcttctttaggccatctcactccagtcgagataccagataactacagctgcatgagtgatcccaggagaagccagcagaagaactgcccagctgcaaacaactcaaactggtaaccaccagaatcataagctaaataaattattgttttaagccattgagctttagggtggtttttatatagcaactgttgatataagattcaaggtataaaatttccttatttaataacagaaaaaaagtggagtaatctagggaactatggttgctcacatcacatttccctaagttctttaaggagttctgagaaaagggagatgaagaatttacttagctacatgtttttaccccttgggtagaataagtgtaaacttacttttttttacaatacttgctcttctgacttttaaaaagatagattttagttaaaggaaagaattcctagcaacagcccacatattttctatttcctattgcagtcaatatgttcctaactttttggcctgaattttccaggatagtcctgagttgtcatcatcaatctatgcattattaggcctaatcttctgatttggagttggaacaatatagaagctatggtttggctgtgtccccactcaaatctcatcttgaattcccacgtgttgtggaagggacccagtaggaggtcattgaatcatgggggcaggtctttcctgtgctgttctcaagacagtgaataagtctcacagatctgatggttttataagggggattttctctgcacaagttctctgtctttgcctgctgccattcatgcatgatgtgacttgttcctccttgccttccaccatgactgtgaggcatccccagccatgtggaactgtaagtccattaaaccctttctcctatataaattacccagtctctggtatgtatcagcagcataaaaactaactaatacagatgctatatctatatattttgaataccaaaagtataattggcaagttaggcattttcttaaggcattttcaaagcctgatctgtattctcgccagatggacaacaccccccaacttttcacaaaagcatgttattcttttaatgcatgcagatcaacaaagcatgcacattgaaggacgtgctgtcactggtattgaagataagactcacgtggactgtggcaaaaatagaaatgggagaccaaaaaatatgtctaatctattagtccaacctagtgatgatggtgacttgaactagagtgttggcaatggaactggggagaagggatgacttcaaggttttctttgaaataaaaatgacaggcctcacagagaaaagaaacgagtaaccactaattctgctctgaacaattaagtgggtggtaaaggcacaaggtgtgtgtgtgtgtgtgtgtgtgtgtgtgtgtgtgtgtgtgtgtgtgtaggcaggttaagtttgagatgcttgtgagacatccaagtatacatgtcaagtatatagttagatagatgggcctggaatgcagatgaaaaattaaaatgggaatattaagtgtagtgggcaaaggggctagcagaggatagtgaagttaaagaaatcaagtgtcaaatcagttagagctttataggatccatagtaagagctttgg

SEQ ID NO: 1881657 - DNA, 4001 bp, Homo sapiens
ttaaaaaaagagctcagaaatactgtattctttaagttcttgaacatgtgatagtgtcttttgcctattttgattgggcaaaaatttagctggctataaaattcttggattatactctatttcccttagaaattataggcacccatccactgacatttcattgtgttttctttctttttcttttcttttttttttttttttttgagatggagtctttctctgtcacccaggcttgagtgcagtggtgtgatctcggcccactgcaagctctgcttcccgggttcacaccattctcctgcctcagcctcctgagtagctgggactacaggtgcccacctccatgcctcgctaacttttttgtattttcagtagagacggggtttcaccgtgttagccaggatggtctcgatctcctgacctcgtgatccactggccttggcctcccaaagtgctgggattacaggtgtgagccactgtatgagcccagcctcattgtgctttgtactaaccccctttccctgtcctcttccagcttgtcttcttctatcacagtagtttcttcatgaagaggccatgtgctatattccatgagatatttcacactcaaagaagacttcttttatactcttttgataatttgtctgggaatcactctcttgatttataagggagtttgtagtaaatacagtaaaagggaaacacacaacgtattttgagacatcagagaagggagaaaccaattctattaatatttggggttagcagggaaggcttagttaagaggtaacatttgaactaagccttgagataagggaaggatttgaccatgcagtaatggcgagagagtagaagcaagacattatggttagtgttatgtaacaatttgactgggttgtggggtgcccagatatttggctacacattattctgggtgtgtctctgtggtattctggatgaggataacatttaattgctagactgaataaagcagattttcctccccagtgtgggtgagcctcatccaatccactgaaggcctgaacaaaacaaaaaggtagagtcacagagaatttgctctttttacctgattatatttgagctgggacatcaatcttctcctgagtgtagatgtggactcgagttggaactatatcattgactgtcctgggtccccagcttgctggctgcagactccaggactccttagcctccataaccatgtgagccatcccttacaactaatcaatctgtctctctctatgtgtatagctctacctctatctctctgctctttctctggagaacctagagtaatacacaaggttatattagagaagaggatgacccaaggaaaagcatgcaggcagaaaaatgcaaagagggtttgggaagactggggtcctgatggggagtttggatttcactgtgtgtagcatggagaatccttgaaaatattcaagaggtgaaaattgtatatgtggaagaacaccaggagtatgtgaaaagaaaaacactcacacaattttaactccactgaaggggacatcaaagggatgtactggggacatgggttggagggtaattgaggccatatctggaggatctttacttctaggttgagtctgaagttatctttctgggaagtgggagattacaaatctttgagctccactcaagagaaggttttgctaacaatggcagggcaacagtggtggtggtggtggtgggaaactggtagcatgaattctaattgggcttctgttattctagctgagaaagttggggaatggactttcagtagaataatacagatctgggaatcaactgcatggaggaggtagttataggtgatgagatggatcagggacgaactttgttagaaggagaaaagatactaggctggtacaaaaataattgctatttttgccattacttttaatggcaaaatccgcaattacttttgcaccaaactaataggatgcaaacttcggagccatctacatcagagggattgatgaagatcaacgaagtttgggaacacaggaaaggagcggggaggataatgacttgagggcatagcagggtaatcaaggtttttcttgttagcatgtggagacttaagcatgattatatgttaaacgcctggcacatacagggtgaaaatatttataagtgaaatgaggagtgtgaaggtggtgagtcatgggagttccaagggaatgggtgataaagggaggtctcaaatgaggcacaagtggagaaggtagcttgggaaaggagaaggatgcttctccttataagatgggaaaggcagaggaagagggtcaagatacagtgatctaggggtgatatggaagtgagttgagagaactcaactctgggttctgaaacccctaggtttggggggctttgagatagggaagaggtttaaagtcagttgttctagcaaatatggtttggaatttatttgtgatgcttaaaaatattgctgaagagaagtgaagtctaccctagagttggatggtgagattatttagcggaactaccagatccatgttgtgattctttccagtatcattcagctgcccttgggcagttgcgaggcaagtcatcagtggggtatggagattttccaggtgggtgtggttgaaggaagggaagaatgagttcaggagcacattacaaaaagaaggtgactgtaaggtctaggctgaacaggaaggtaaagcaagaaagaaacatgaggttgtgaagagaagtttagagggatgaggaggcaggagagttgaagagttgcaggatgtagctagagtggcgatgttaaatcttggggccagagagctttacagtgatgatgaagatcaagtggcattagaatcaagctataaagagccactgtttgatgttgggatgtgaggatgctgcaggtggatgtctgcacattgatggtgagaacgtggtcaccctggccctgctgggtctttgctaaagagactgtactctgttcttggggccgttttcatcacctgattagagcagtggtccccacatggtgttctttggaccatctgtataaaatgttcataggtcaaggataaaatggaaaaacagagaaaatatcagagaagtgtgcccattggtgagagaccaccagctgtcctttttggaggattgttctttattctaaaaatgtatatattctattctattaaaacatatttgtatttgcatgttttctcttttatgaaatgccatggggtagaaatttgtaatgtatccatttctcctgacttcatgcattgccctgtggtggggaaggggatgtggctagaattggccaagaggctgggggcagaggtgcagtgtgagacttctagcctggagcatttaattcctagtacagggctctctagcattcttctccctctgttccctgcttggtgatactcgaggtaatgcaacccccattagccttagtcttagggcaagtttgatggaaaacagagcaccccacacctccctgcagatgtagcatgagtgaggaaaacaacttctgatgtttgaagttgccaagatttaggaattatttgttattgcagcaaaacctaacctattctgaccaatcatggtgtaatttctgtgtgtatgtgtgtgtcgtgtttgtgtgtgtgtgtgtgtgtgtgcgtggtacaaaactggtagtttaaaaaatttccttcttacaaaaacaaaaatagcaactttatgttggttctcaaattaaaaaaaatatttttactggtttatgaaatagaaaaatctgagaatctgtagcttagagacctacagcgtgggatgtctgtaaagactaggttatttatcagctcctaacacctcttgatagaagcttagccaagacttgcactatttcagtctttcccattccacattccatggaatcttgaagagacattgataaaacggtgcagccatgaaccaccctaactcaatcctagtgtcag

SEQ ID NO: 1881658 - DNA, 4001 bp, Homo sapiens
ccatgaaatcatccatatcttcacatattgccaataataattgcgctatacttctgcagaatggttaaaaccagtggctatgggtccaagtacacttgattatctttttatatttttcaggttctagaaatatgcatacatttatatcatctagttctttcttcacaggacttttgtaaacgacttctcccacaatcagctgatgaggtggggtgtctctagttttactggatatgaaacatcctagcatcatgactgcaacttttgatcctcaagaagcattccttttcctgcatgattataaaattggactttatggccgtggtctatcggagtttgttgtatatttctttgagaccaagattgaagtaagaaacaggtgcaatgactacttggaaagaatttaaattacttctgttgaggaggaggaggaggagggaagattaaatctaaaattattaagtattcctgaaaaaagtcaaagctagttaccaggatattaaatagattcaatacagcatccaaccatttaggaaaggtgatgcacttggggcctgaggatatgatactatcacatttacgtggtcataaggacctttgaaattcagattaggtctgcttatcagcagagactatttcagcactaaatctaataaatattccaatcagtgcaaaagacctcctgtgttccatagctcatgtcactaactgcagcagcttctgttgggtacaccttggcatgattccagctgccttcccaagcccattttagcagttaggtatctataaaaggaggtggaagataaagtggggaggggtgggaaggagcaaggaaagatgaattatgggcggaacatataataataactcggccactttatttctattccttaaatggaaaaacaaaatttgatgctttttggtcttcacatttctaaaagccattatcagatttcatttttgaaataaattaacagacaaaaaatattttgttttgttctgtgcctctgttgtctgagtgcccctataataagacatgcttatctgacaaacatcagaggagccatgcccctctgagaaacatcttcactgttactgagatttgggtttattataatggggtactgggcattttgcccactaactatatagtaaatatttctgtgattaacctgagccccatactaaatatacaaaaattcagtggctccttattatttgtggattctacgtccacaaatgtggattgcaattggagatgcctgatgggcatgcacacgaggatgttctgtttcttgtttctgctcatagagtaaacaagtgtccgggtgcggtggctcacgcctgtaatcccagcactttgggaggccaagaagggcggatcaagaggtcaggagattgagaccatcctggctaacacggtgaaaccccatctctactaaaaatacaaaaaaaaaaaaaaattagctgggcgtggtggtggacgcctgtagtcccagctactcgggaggctgaggcaggagaatggcgtgaacctgggaggcagagcttgctgtgagccaagatggcgccacgcctgggctacagagcgagactccatctcaaaaaaaaaaaaaaaaaaaaaaaaaaacgagagagaaaacaagtgtcctatttgcagtttgtttggtgccacagattttctcatttttgtgcttttagttggtaattttgctgtttaaaacagcctcccgagaataatgtcagtgtgctacctggtatcctaagcacaaagatgctgtgctgtgtcctgtgcagaaaatccacgtgagacaagctttgtttgggtgcgagttacagtgctattggccctgagttcaatgtaaacccatcaacgttataggtaaaataaagtgtctttaaatagatacatgcctaaaacaaggttaggttggtgcaaaagtaattgtggtttttgtcattaaaaaattgcaaaaaccacgatcacttttgcaccaccctaacatttttcttcacttctcttgacgcaaattatagattcaatcacccagcacttacaagcaagcatttctttatcttaggttgaccttaagaacttctttgtatttactaacttcctttaggactcctcctcttttgtagtaagacggcaggatgaaatacaatgaagagggtaccatattttaaagataaggctgaataccacacacctggcatgatgagaggcctatacagaaaaaagagcttctgaagcttctctatgccacacaagggatgaaggtggcctccaacaactgtgacctccaaccggtggagctcatgtgtgatatgccttttatgtcctttagcacatttgttacccacaataactttacaagccaagtattattatccacaattgctagaagaggaaaccaaagctccctaaatgctcaatatcatgctcatcactctttcagctctgtatgggattcccaaagtgaacctcatgtgtatttatgaacttggcactctcggataccatgcagcacccctcattttctgtgagctctgcttgctgaggtgaagactctgctgcaaaggggcccctggtcctgtgaagctggtccccctgctgtgcctattctaaggaatggccattgctgatgacatttgctggtctgtgcccaggcatggtttcctggcgctgcagaagccactggctggtaatctgcctatgggtgtccacaaaccctcaagtacagaaatttgccatccttcagtttgacaggcattttaatggaatgctctttcagtgtatctccctagcattcaggtacgcgtttcaggggccaggctggagggtgatctaagtgacaggcatggtacaatggtaaattttgcccataccctcaacactgatcctctacttctaggccatactaaggtggcttttaaaaattaatatatgataatagtacctatttatgggatacatgtgatatatggatacatgcatataatgggtaatgatcaaagcagggtatttaggatatgcaccacctcaaacatttatcatttctttgtgttgggaacatcccaaatattcttttctagcccttttgaaatacacaatacattgttgttaactatggtcacctgctgtcctattgaccattagaacttattccttccagctaactgtatgtttatagccattagccaacccctctttatcccacatcccagccctccacacacacacacacacacacacacacacacacacacacacacacacacacacacacacccttcccagcctcaggtagccgtcattatactctctacctccatgagatcaaattttttagcttccacgtgagtgagaacatgcaatacttgtctttcggtgcctggcttatttttaacataatgtcccccatgctcatccatgttgccgaaaatggcaggattttattatttttatatctgttctcttattaatagtataacttcttacaacttagatttaagcagaggcccttctacatataattggaattttatatgtccacatttaaaaagagttaccttgggattgataacatacttcttttgctcctaagtaaaaatttttattactataaaatgtttcacaaatgtatcaaaaatactacaattaaaactactgctctgatcaacacactttcgtgctcttttgtctggtatagtgaaaggtcggtcctagaagacctggattcattcttctcagccacttaatttaatcctggatgatcacatactgtttatacttgggattccttatccacaaagtgagggatctctcacagtaccaaggaacccctctggcccccttcagttctaaaattcttttcttttctttttctttttcctttttgagacagagtcttgctttgttgcccaggctggagtacagtggtgctatctcagctcactgcaacgtccgcctctcgggttcaaacaattcttgtgcctca

SEQ ID NO: 1881659 - DNA, 4001 bp, Homo sapiens
caggtttgagaaatctttgtactatgtaaacagtatttatctatgaaagataacattttccccctaacccaatgtgactagtaaaagacaaagatttttaaagtcatgaaatggtcaaaactgtcatgaaagctggcagtattttttgttttattttattttattttatttattttttttttttcctgagacaggtttttgctgtgtcacccaggctggagtgcagtggcacaatcatagctccttgcagccttgacctcccgggcttaagtgatcttcccacctcatcctcccaagtagctgggactacaggtatgtgccaccactctcagctgattttttattttttgtagagacaaggtttgtcttgtctctacaaaactatgttgctcaggttagtcttgaactcctgggctcaagggatcttcttccctcggtttcccaaagtgctaggattacaggcaggagcaactctgccccgctttggcaatatttagtggagtaataaacagaatgagttattgtctcatgagcaaattcaccttcccaaacctctgtgcatgtttactcagagactctcaaatgttccattctaaaagggaaatgtacaaatttaaattattacatgtatttattgatttaaaaatagaatgaaaacagacattactgcctttactaatgtgaacccttggggctttgctgcataggccaaatacatttctgggattgaaaaaactaaacttgggagagagaaatctttcctctacaaaggagaagatgacacaacccgaggaagaaatggacgtgagaggctgaaataaagggccttcctggtcactgagcccattcatccctgtggtctggttactgagccaggaaattgcccctttttgctttagccaatttgaattagatttctgtaacttgccaccaaaaaagtcctgactaatataccacccgattaatatcagtaatatttcgacagtttgcaataatgcaatgaaatatgaagattgaacttgagattagtttttgattacagtatttaagacagaaatcctaaaccattcatttaaccaacatttacacctaatatgtacaaatattctgtgctaggtgctgagaacataaaggcaaatttaaaaattgtctctcctttgaaagaactctcagtctagctggggagatggaaaagtatcatgtcgtatgagtgctatgctagaaacaagcccatcttatgggagccagcagaaggggcacttaaatcctaaaggggcaagaatgacttggaggcagtgaccatcacgaagtaaagagggcatttgagctagacagagtgggatagttgaggctgggtggagagaaatagtaaggagagactgagacactggcagtagtgtgttatgatcgaatatgaagtgcaagaggatgggagagtggccaggaaggaggctgggaactgtatctcaaaggtcttggtgaaaaattgagactttatccccaaagcttgggggggccactaatggattttacacaggggagcaatatcacgcatattcaaaatatcacactgtaagatgaggataatagttacctggcaagattgttgtaaagagtatagataatatttatttatttatgtccttttggaatgtaaatgttcataatatttctctttttaaaaatatttttaaaatttcaatagttttggggtacaagtggtttttggttacacggatgaattgtataacggtgaagtctgagattttagtgtactcatcaccagaggagtatacattgtatccaatatgcagtttttttatcccttactcctctcccagcttccctgttctgagtctccaaagttgattatatccttctgtatgtaggtatatatcattctgtatatatagtccattgtatcattcttatatagtgggagctaagctatgggtatgcagatgcatacataagctcagtatacccatagcttagctcccactatatgagagaacatatggcatttggttttccattcctgagttacttcacttagaatacatagatattatttcttttttctttaaatagagaagggggtcttgctatgttgcccaggttggtctcaaactcataggctctgggattacaggtatgagccaccatgccaggcctagagatgatatttaaagtgatgattaccgtgcttaaaaatggccaagccagggccaggagcagtggctcacacctgtaatcccagctactcgggaggctgaggcgggagaatcgcttgaatccgggaggcggaggttgcagtgagctgagatcgagccactgcacgccagcctgggtgacagagtgagactctgtcttaaaaaaaaaaaaatggccaagccaaaaaatacatcctcattctatttcaaatgctgttaaaaacagctttgacgggagactgaggcaggagaatggcgtgaacctgggaggcggagcttgcagtgagccgagatagcgccactgcactccagcctgggcgacagagcaagactccgtctcaaaaaaaaaaaaaaaaaaaatcaaaacaaaacaaaacaaaacaaaaaaaaccttagttttgaggccgggcgctgtgggtcgggagttccagaccagcctgaccaacatggagaaaccccgtctctactaaaagtacaaaaaattacccaggcgtggtggcacttgcctgtaatcccagcgactcgggaggctgaggctcccgcttgaacccgggaggcggaggttgcagtgagccaagattgtgccactgcactccaggctgggcaacaagaacgaaaactccgtctcaaaacaaaacaaaacaaaaacaaaaacttagagttggttcatccattagtaggtgtgattatggaaaatttttacctgagtcttagacccgcattaaggtactccctacatctgcaataaagtggaatctaaattgcaagtcagccttgggaccctctggaccattcaggtttcctccaaatgggaacatttcaaaccgagatggagttttccagatcattctggaacgaaaaggaccccaatagccactatgaaaccttttctctatctgagaagtggggaatgaaggggtccatacccccccagaattcagttttatattaggcttgtgtagctcaataaatgttttcggtctaaaaactattcctaaagaatgcttcttctgggtcacaagggggcaggagaaggaagaaatacttcattgcaacgtaaaatatcaaattaatgttttctacgtgaaagtcaagacagcgaggggacaagtgggaaaaacaagttcacctcaggctaccaaatcattgcaagatttctttagtgctatacgtcactgggtcatgcagtgtatttcactttctgactgatttcaaggacccctcacaccatttatttagtctagtgatttagaacttttaaggcaatacaaacattatttggaaaacacaatagttgaaaaacatatccctccatttaaaataataaaatttatctcacgatcataaagtgctaattttgtgttaaaggcagagaatatctcaaattagaggaaaatgaaaacatctgaaaatatgtcattttatcaactatgtttggaagcaatatctgttaaagctttttgcctgtttattcttatcagccaattttaaggctttaatccttaaaatacattttcatgaaaactctaattgttgacatttttccaggtaatgacttttcaacaatttagaatatttttctttatacaaaggttaaataaacatattcatgcatgtatttgcatagaaaactttaaaaagaatgtataagaaactattaacagtagcgtccttggcctgggattgtcaggtgaagagagggagagggatttaactttttcactttagatcctttggtacaatgtgatatttttattttttatttattatttttttgagacagagttt

SEQ ID NO: 1881660 - DNA, 4001 bp, Homo sapiens
catgtttgttccctgtggcatattcttgcacctcctcctctttaatatctttaattgcatctcctcagcaaagatttgccctgtcacccaaattaatcatgctgtctattcacaaagcacttggttagtaacttttcaaagggactaaccctatttttctttgagtgagttgttatttacaaacaggctggattagctgatctgttgtaaacatctttaaagcaaggatcacatcttcctctctgatttttctacattctagcatcatgtatttcctatcaaagttgccgagtgaatatcttttcttgaatgaattgtagaaaaagccttgttttggcttgaaaaagtctatgagttgttgtagtttatcttgaatatttctacattaaattcaccagcatagaaaataatactctcaaatgtgcaatattgttagataacaaggtacactggaactgcaatattgtttgaaatatttaaatcacatcattccaaattgaattcaacatcaagtggtctttttttttttcctgctacataggtaatacaggatagttttgatgactgaaaaataggctatgtttccagactagattagaatgtggggagaagcttagaaagagaaggctgaaaagagaaagagaacaatggaagagaagtagagaactaaatgcatcaaattaattgaacgaagtctgaactaattagtaaagagccatcagaaggaaagaggtgttgagaaacagaaagtcaaaaaatccagggctgggtgcagtgactcacgcccataatctcagcactttgggaggccgaggcgggctgatcactggaggccaggagttcgagaccagtctggccaacatagtgaaaccctgtctctactaaaagtacaaaaattagctggatgtagtggtgcatgcctataaacccaggtactcaggaggctgaggctggagaatcccttgaacccgggaaatggaggctgcagtgagccaagatcacaccactgcactccagcctgggtgacaaagtgagactctgtctcaaaaagaaaaaaaaaaaagtgaaaaatcctagttattggaattaggtatgggaacaggcaatttggttttcagtgttgtttgggaatatttaagtcttaatttatacaagttagcctcacatttaaaagtaagaagatctctattgagataatggatcattactggagtgcaattggtaaatgacttcacttttcataagtgttttgatgtgaatttatgaatattctctagctgctcactgggtttgtgaagttagtttgaatgagacatgattgcaccctaggcaagtcagaatgtacttgctttgatttcactgtgattacttttactataaaagattcccattaaatacaagtaagttcccacttaactttcctgtaattccacccttgctgcaagcagctgacaggcaaatttgatcagatgtaatacatccaatcagataaagaaggggtttcagcaaaacacttggcagatttgaagagctgaatagaaaaggtcatgagctgtctgaaaacttttagacacaagaggaagcaaatagtagaaagcgtgagagcactcttaggacagggattggcatttcccccttacggtttctcacgtaatttgtgaagacataaacacaagggtaactgttaaattcgttgtaattatcacatgtacagaacagcccagttcacataatgctgcactaaattcaaagttagtgttataaaaaaagatgcctctaaaacatatgaattacctaggagtttttaaaaaatgcagattctgattttgtaagtttgagatgggttgcaacagtttgtatttccaacatgcctctcatgcggcagccatgctgcaagggcatgtttaaacttccccatttacacaggccatgagccccgaaacacccatcagcaatcctgggatgggtgtttcggggctcatggcctgtgtaaatggggaactttaatgttagatgttcattccatctttggaaacattattatatagatcatataagatttagattagaaactaaccaagcattttctcttcaaccatacatttactctgctactcctttaagctttgcatacagttgaagattggctgtacctataccaccctcagatctgagcaagtgagggccttaccccagtcctgtgcctcatagagccttattctttggagtgccctctatgaaattttccaagtcctcttcggatgcctgctctgttttttctctctggggtactctccctttctctccctgtgtataaggttgaccagatatcctggggagctctgcaacttgtaactataggatcatcctggggtcttgtttccaggctttcgtttcaggagggtggcctggagagcagactgctacttctggttggcaaagaatttcttttgcaggattacatgaaatttggctgccagaatgatgctgacatgctgattttggataattctcactcacattgggcatagatctaatttagggttgtaagctatctaaggtccactgcccaagccgcatgtgttgacccatgcatccactcgcagtttgttctgagtatgatgccacttctgctatataacatccaagggctgcagggtgacatcagatgtccttaccccgcttgccaatggcattcaggaaaatcatcctatcccctctgcaggttctatgccatgggtcaggcagtccttttggctgggggttggggggtggctgcacttatctcttctgagggcttttaagactattgcttcttcacaacagtgggcctttctgactgatgtgatgatgctgtgttctcttctccctggtcaatgttaagctctcctagaggagggacagacattccttgtgcaaatggggctgttcattttgttctgtccacaatcccctctctgctgctggtggtgtgtgggaggtagggtacggtcaggagtggcagagatcaattctagaaatgtaatgatgatggcctaaaaagttcaagacaagacacagttgaaagatgtgttgttctatgtgatgctataacattctaaatgataaatttaaaatgagcaataaacaacgaatcattcatgttttctcgtatatataccctgggtaagacttgaatttgtgattatcatcaaacattgtaccagtaacaattgtactatattgaactgtgttgtaccagtaacaatctttgagtgattgtctctgagtgatacccagtattcatgggtagcacaatggatgatgcaatgtcaaaaggcataatgtagctaagattaaataaatggtagcagggtattggaaaggggtgaagattcatattattttattacaaacatattacaaagagccatggcattatgaataataacagcattgctaccctttcttgtggtaaaagatatgaaattagctaggaatggctcatttgataaaaaagaaatgattcctggaccaaagagatagtaccaggatgccgagaagaatctttacatgtactgctcggacaataaatacacaaatcttcctattattctaaatctttatcaaaaaatcactatactgcatgcacatggacctataaattttataaagcatttttaataaaagtgtttatatagatagaagccctgcaaaaaaatatttgtctggtgatctgcacatcctagcagtagcccttggaactgggattttggtgaaagagagggctcttagagagaattatagatgaagattgtcataggaaaacatttggaagctcaggtggagctttttatttttttgagacggagtctcactctgttgcccaggctggagtgcggtggcgtgatcttagctcactgcaacctccgcctcccaggttcaagtgattctcctgcctcagcctcctgagtagctgggattacaggcatgtaccaccatgcccagctaaattttgtata

SEQ ID NO: 1881661 - DNA, 4001 bp, Homo sapiens
tctcggcctcccaaagtgctgggattacaggcgtgagccaccatgcctggccctcctaccttgtttctaatcttgtttgctcctctgtatgaaaaatagcctttttctgcctcattttggagatgacttcaggtcttatgcttgatgctttccccactgcaatactccttagaataaactcacttcttacctacatcaaaatttattttacttgacaatatgtagaaacagccccatgacaataacaattacaccctctcagaggatatcacaacctcctctcatccaaaccctcactgcctctgcctgtggatacccagctttccagggctccttccctgtctaatttgagcaggctgagacacctgaaagaaaggttcaccagcaacacattacggggctattgatgacctgctttggcagaatcaagattgaccttaccctgcagtcaacaggcttaggtctcggattcccagtcaaggttattcacttagttttatataaaaagaactcagtggttgaaaaatccaggaaaatgcctcaaactcagtgcttatgttttaggaggaaagaaaattgtaaggcacttacattttatacttcaacaagtatatggaagtataaatgtttctccggccaggcatggttgctcacgcctgtaatctcagcacttttggaggccgaggggcggatcatgaggtcaggagaccacctggctaacatggtaaaaccccgcccctactaaaaattaaaaaaattagccaggcttggtggcaggcacctgtagtcccagctactcgggaggctgaggcaggagaataagttgaacctgggaggcggacattgcagtgagccgagatcgcgccactgtactccagcctgagtggcagagcgagactctgtctcaaaaaaaaaaaaaaaggtttaactggctcatagttctgaaggctgtacaggaagcacagcagcttctacttttggggaggcctcagaaagcttccagtcacggcacaaagcaaagggagagtgagtcatctcacacagtgggaacaggagcaagacaagagtgagaggggaggtgccacatgcttttaaaaaataagatctcaggccgggcgcggtggctcacgcctgtaatcccagcactttgggaggctgaggtggacggatcatgaggtcaggagatccaaaccatcctggctaacatggtgaaaccccgtctctactaaaaaaaaaaaaaagtacaaaaaattagccgggcatggtggcaagcacctgtaatcccagctactctggaggttgaggcaggagaatggcatgaacccgtgaggtggagcttgcggtgagccgagatcatgccactgcactccagcctgagccacagagcgagactccatctcaaaaaataaataaataaaaaataagatctcgggagaactcactcactatggcaaagacagtaccaaaggggctggtactaaactattcatgaaaagccaaccctacgatccaatcatctccctcaaggccccacctccaacaatagggattacatttgacatgagatttgaatggggacatagatccaaaccgtataatttacaaaagtgaaaaagtgaaaaaattcaaacatccttcaatgaatgaaagattttaaaagatgtggcttatacacgcaatgaaatattctttagcttcaaatgaaaatgtcttgtcagatgctacaataaggataaatcctgaggccattattttagtgaaataagacgctaacaaagtgacaatgcatgattccatttttatacaatattttaagtagtaagcacatagaaagcagaagtagaaaggtgcttgcctatggttagggttgtgaaacctcagtggagccagagatcgagggttatttagaataagcaggccctcactcagatggccaactcaagagcccatagacatggctacagacaaggaaatggcacactgagcttggtcttactgaggattctgaagcagttctgtaacctctctcaaattcaatctcagctacagtccagacgtggtccttcccatcaagagacctgcagggagatacacacccagccatggccctggaggcaggcctgtatatcctggcctcagctgtgctcctgagccctgtgactcagttctagccctcacagtcacagtccatggccagttgtacacaatcagggacccaaagagaaaagtgtggaaactgttcccaggttgtcagtagaagccaaacccattcatacacctggtatttggcccatcatatgcagacaaacttcaaaaccctagtctactgcctgccatatagattaatatcctcaaggaaatctaatctctccagggcccagaaataatccatgactgtccaaatctctggtaatacaatcatcaaaggcagaccccacagcagacccagcagcacccttgtgacccagctacaacccttcttctctgcaaccccagaggtaatctcatcagcctgggactcaacaaaaggagatctttacctgccaaaaatagtttatacaaactgtgaaatttgtcaaatgcagacacagggctgcttcagagaccacagccggggacaagacttgcaggcctgcctccagggccacagcttctatcttaacatgtgactggaagtttgtatcaaaacaattagacaaggaaaaggagaataaagctctccagagtggaaaagaaataaaaaagttactgtttgtggataatatcatcatgcatatacataaaaccctagagtaaaataagaaaaattgattgaactaataaatgcattcattaaagtatcaggatacataatcaacatatagatgcttgttgggatttttttttttttgagacagggcctcactctattgcccaggcttatctcaaactcctgtactcacatgatacaactgccttgggctctgaaagtgctgggatcacagaaatgagccactgcacctggcaccacatacaaatatttcttgcatttccatagagtaaaaacaaactttccaaaaatagaaaccatttccatttgcaatagtataaaaataagaaagttaatcaaaataaatttaaccaaatgacataaaaaacatatagtattatacactaaatacaataagatatcaatgacagaaagtgaagtagaaacaaataaatggaaacatattccattaggataactaatattgtcaaagaatattatccaaagtgatctatagattcaatgtgatccctatcaaaattttattggcatttttcacactaatagaaaacacaattgtaaaatttaggtgtaaccttaaacgacttttaataacctgagcaatcaatcttgagaaagaacaaagctgggggcatcatacttgttttttttttttttttgagatggagtccagctctgtcacccaggctggagtgcagtggcacaatctaggttcagtgatctaggctcactgaaacctctgcctcttgggttcaagtgattctcctgcctcagcttcccgagtagctgggattacaagcgcccactaccacccctagctagtttttgtatatttttagtagagacagggtttcaccatattggccaggctagtcttgaactcctgatctcaagtgatccgcccacctcggcctcccaaggtgctgggattacaggtgtgagccaccttgtctggcaggcatcatgctttctaatttcagacttcaaaacaaagactgaaattaagacatgaaatcttaaaactcatgaagaaaacatatggaaaaaccttgttgatattggtctcggcaataactttttttgaaatgacatcaacagcacagcaacaaaataaaatataaacaagtgagactgcatcaaagtaaacagcctctgcacatcaaaggaaaaaataaaaacaaaatttttaaaaaccctacaaaatagaaaagcatttgcaagccatatctga

SEQ ID NO: 1881662 - DNA, 4001 bp, Homo sapiens
atatgtatacatgtgccatgctggtgtgctgcacccaccaactcgtcatctagcattaggtatatctcccaatgctatccctccccccaccccaccacagtccccagagtgtgatattccccttcctgtgtccatgtgatctcattgttcaattcccacctatgagtgagaatatgcggtgtttggttttttgttcttgcgatagtttactgagaatgatgatttccaatttcatccatgtccctacaaaggacatgaactcatcattttttatggctgcatagtattccatggtgtatatgtgccacattttcttaatccagtctatcattgttggacatttgggttggttccaagtctttgctattgtgaataatgccacaataaacacacgtgtgcatgtgtctttatagcagcatgatttatagttctttgggtatatacccagtaatgggatggctgggtcaaatggtatctctagttctagatccctgaggaattgccacactgaattccacaatggttgaactagtttacagtcccaccaacagtgtaaaagtgttcctatttctccacatcctctccagcacctgttgtttcctgactttttaatgattgccattctaactggtgtgagatggtatctcactgtggttttcatttgcatttctctgatggccagtgatgatgagcattttttcatgtgttttttggctgcataaatgtcttctttgggattccctatttaataaatggtgctgggaaaactggctagccatatgtagaaagctgaaactggatcccttccttacaccttatacaaaaatcaattcaagatggattaaagacttaaacgttagacctaaaatcataaaaaccctagaagaaaacctaggctaatttaccattcaggacataggcatgggcaaggacttcatgtccaaaacaccaaaagcaatggcaacaaaagacaaaattgacaaatgggatctaattaaactcaagagcttctgcacagccaaagaaactaccatcagagtgaacaggcaacctacaaaatgggagaaaattttcgcaacctactcatctgacaaagggctaatatccagaatctacaatgaactcaaacaaatttacaagaaaaaaacaaacaaccccatcaaaaagtgggcaaaggacatgaacagccaccagttattcttaagcactccaaacactgagaaccactgagtaagcggacgccttgctgggtgcggtcgagtgctagaaagcaaaagttgaggttctctgttcacccaagttcaggtaccggctcaggacctcggttacctcccccatcctctggaaaggtgcgcgtccaacagccagagagaggagagaacaattagttaaatctcgaggagagggcgtttcggcacaaatcttcagagcaccttccccatttaaaagtacatttcaggcacagttcatgcggaatcaagacaaaaagcctactccacgtttctcctccaacaaccttaatcttcccgtatccgcccctctggggtaacccatcaaactgagctcggccaccgtgctcggtccatagtgggccgtatccccaaggcctagcgtcgataattgcacacgggagtccgggaaacgttcgcggagtacacgtttgaattaatgactccgaaggggggatcagccgaccttccaccgcatcccacaaagaaactccgcgcccgccgacaccggcccgacacgccgaccttgccgctacccgtccgcgttcactcacaacttccccgtccaggcgccgggccgcgagcgcttccagggcagggcctagcgttgggggcttgggtctccggcccagcgggagagccccaagggcggaggtcgcgctccccgctggtctgagtcccgcgggcctggctgggccaccgccgagcggacgaagcacaggcgcccttccgcccgcagcggccccgaccacttccgggccacggcctcgacacctcctaatgcgcccgccccgggccacactctttcttctcggagcccgcaccgcgctgccagaccaccgccgcactgcggggctgaggagtggaccggcttcacgatgcgtcctgccgggcagcccccgaaacacggatgcggtcggattccgcgccaacttacatcttcccgccgccaccacctcctcctgctttcctcagccgccgaggccggcgccgctctctgttttaattttttttaccaaatgtaattcatttaaatcattctacagatattaactgaccacctactatgtgccaggacccattcatgggactggaaatataacagtaattaaaaggtaaaattttgttcaccttcttttctggtgttcacttactgaccttcactaccaggagcctgtctccatgagagtagggactctgtgtcttcgattcattcctcaaaactcagaacctagaacagtgactatcccataaagtcaacacttagtgaataaacaaatgagtgagtgagtaatatttttacccggcacatgaaaattgtcaccagggaagaaaagaggagcaaaccttgaagctctttaacacggagagagctgggtaatggaatgcatctgagatttcctctttatgattctgcagggtctgtgctttttcttagtgtggaaagtgaaaatcagagacattaaacaacttcctcaaggacacacagttcgatggaaatggagtcagaattctaatccaggtctatttgaccaccaactctgcaatttacctactatatctgtgcagaagagccctgagttacagaccagtaatgagaagaaatagtgaagggttggcaaacacctcagttacataaggagtttctctaggctgtgtgcatcaccccacactccatctaaaatagatgttggagattttaaacatctagggtttagatacctgaaaaaaataaatcattttagtggtttatgaaaaaaggaaggaagaagaggagaagcagcagcaggaggaggtggaggaggaggagaaggagcaggaaggggaagaggagggagggagtggaaaagaagaagagaaaaaatgagtaagcgggcggacacttagttggccttttgctcacatcagtagttcatccttggccaccaattgcacacttgaagttgtttaccttcctggaggatttctcaatcgttcattgtgaaggattcctagcctctcctcagtggacagccaagagcctcctctcagctgggagccttcctcccattcactgcagtctccctgaactgcttccagagcccagcttctctggccaatggccaaggactcaaacaggcactgttctttcagcacagaaacacagaaaccaagtgccttggtacaaacagaaggctgcattctttggctaggatctgggagagataattaccccgcaaggtcttcctctcatctaagctgttgtttagctagacagcacaacagagtttgtggaaagtgctgcacaaaggtttagttcattcgtttgctgaccctgtgattagtgacggtgagcctcaccttcctgagctacagatttccttctctgaaaagggtcatagaactagattatctttaaatttctgaaaaattccaaaacatgataatttctcctaggtatgaaagaagaaagtttaagaaaaaaggaaattttcttccttctttgcttccttccttccttccctccttccctccctgcctccttcccttcccttcccttcccttcccttcccctcccttcctttctcctccctccttcctgtcttctttttcctctctctctctctaatgtaccaagattttaagtaaataatttctgcatgaaattagtaccttgaaattttgaagttgtcttgggtagaagccagaaagatatcctctaaaaagctgtagacattttattatgctccttacatgatgaaacttgaggactcctttgcagccaccttttcc

SEQ ID NO: 1881663 - DNA, 4001 bp, Homo sapiens
ttcccttgatctcatacctatagaaaaactatcagtgattactttttagtatgaaaataataagctagttacacaatttaaatattattttctgacttttctctcttccttatgagactggggaaaaaagatgttagaggagaaaaataactgttacatgccaaatagttcaaaatcttcccctggaaactgaaacaggatccttagaaagtacataatgtcctggagtttcccttgtagacaaatactttggtcatttatttgtaatcagatactgattttagcagattacagcacttataaacattgtcacagaccgcacaatgtccattcataaataaaggaggtttattcatgaaaaggttgtgattcttctgaaagcatccaatacaacctttctggacatttccctttcagtattacctggcatgtaatcaggaaagggaaacattcaggtaagttacaacctccagtcatattcacagcaatatgcaatatggacatttacagggggaatccctttgcaggtgacttcaactagaaatcccaagagtcacagtaaatgtttcaaagtccatataaagaaagaagcttggccgggcgcggtggctcacgcctgtaatcccagcactttgggaggccgaggtgggtggatcacttgaggtcaggagttcaagacaagcctggccaacatggcgaaaccccatctccactaaaaatacaaaaattagccggatgtgatggtgggcgcctgtaatcccagctactcgggaggctgagacaggagaaacacttgtacctgggaggcagaggttgcagtgagccagatcgtgccactgcactccagcctgagcaacagagcgagattctgcctcaaataaataaataaataaaagtatttgctgaaagaatgatattgtataccacaaccaggtgcaagggacataatgatatggctccaacccttaagaaactcaaagcctagcagaggaaaacagctttaaatacctgaacaggttccaaggacagagatagaaaaaacagtctatcttaatgatggctccaagttatggataaaagcagtgtagtgtaaataagcagaagagaatgggtggttcaccttgcaaatacttctaatccccaaaccaagcaagtgacttctagactatgttcacttcagactagtcatatcattgctctactttaaaaacaatacgaagaaatgattgtactcaaaacctgtattatattaagcagcaagccaccagtaaaaagatcttccggtcagacccttgtagcactacttaaggaaaaggaagaccaggagtgcaggaaagtcctcttccatgtctgttttcttgtcaacattaaaccagaatgaaaaataattagacccaccttgtccacgcaggtgtgtaacttcctaaacttaggatgaaaatcacaatcttagaaccatgcacctatcaaggacatcaaccaagctttacatatccaagctcccctggcacccagctcaggaaaaatagcatcaaggttgagggagcacttagctaagcagagtggaatgccagctctgcagataaacagccatgtgacctggggcctcagttcttctgaaataaggaaataatacaatctaccccagatatcacaacttaactgtaaggttcagttctaagagttcctgcaaattattatataagttgttactgactgctttctttccttccaccatgttgatcatttttcctactgtcttcagtctgccttactgctgcttgtttaaaacagtgactgtccaagagccacctgtactgtttaaaagttagctataccaaaagacaccaactattacatttctccatggtaataaaacaaaaacgggaaaatttgcatctcaaaaactctcctcaccctgacaagcgacataactttaccaaagacgacatgagtagatcctgatcagttacacatcacttcagggagaaaccgctaaagcagccgacactttttgtagaaaatcctacatgtttctctaaggttattaaaatatttctggagaggcaaggaaagcatactcagacatttaacacttaagacaataccttaaaagttatccattcagccctccttaagtgtaaaaagggaaataataagaaaaaagaaaatgagttgtaagctgtatttcattaatataatcttgggaaacagtgattcaacaaaacacccaaatataaaactttaaaattttttaagtaaatatcttacaaaaaagtcttcagcatgtttttgtgtaagcagaactgagacagtacactaaaaagcaaataatctaaaataataacatactcgttatcacaaatcagtcagagatgaaattctaatcatttcttttataatctactgcacaagttttatctatcttccttaaaaatcaatgtatttcccttcttaagaactcaataccagctgggcatggtggctcacgcctgtaatcccaacacttaaggtggctgaggagggcagaccacttgaggttaggagttcaagaccaacctgaccaacatggtgaaaccccatctctactaaaaatacaaaaattagctgggcgtggtggcgggtgcctgtaatcccaattactcggtaggctgaggcatgagactcgcttgaacctgtgaggcagaggctgcagtgagccgagatggcaccactgcactctagcctgagagacagagtgagaccctgtctcctattaaaaaaaaaaaaaaaaaaaaaaaactagcttctctgctaaagctaacagtgctagtgccacagttgaaatatttcccagcatcttagcaactgtactttttaatataatctaaaataaaaaacacacacctgtgtaatcattagaatgaatttctatctattcatggttttaagtaactcagtccctcaaactgatagcatgccttattttaatcttacctcagatttggctgagccaaattttctagtttaaactgcctaacaattctttacataagttgcaaatctatgagctgaaatgaagaaacctctcagcaaagtcttcatgtttattattgagtgtagagtatgttcatcaatgctactaaccaaaaaccacagaacatgacatacagaaaatccactggttcttgatgagtttatgggtataactgccacgcaaatctaaacacactgaacgcattaaaccctaagtaatgatctttaatcatctgccccacctgatgattcttttaaagggcaagatcttaaagactttagcacttttctacatccctgctacccatcatcaaccaggggtagccttccacttcagttctcaggctagcgtgaattcatcatcaaaattgtaagatctaagtatgcccatgatctaaggcatctctttcaccatctcttgcttactcacaatcaaactactttcaaagtctcatgcattactccctctctcaagcctgaacttgatccacctcagattaacagatacatccctctgtgccaagataagagagactaaatttaagctgaagtcccttgtaactttcccttctatcttcgtcctggtctatgaaaatctctattttcaaggcaacatcaccaagtttgacctcaacttcagatcaagtgtggccataatcccagtctctcccatgacacaggtacaggttttgcctaaaatttcaaggtagtccattaacttgaagtttctttcctcttggtctcaatcctgcccatgaaaactttccgttaaaagcagtctttgcaagctttcccacttcaaaaccctttctcacccaacaatgcctacaggtagactaaatgaaggcatgcaaggggttctggcaaactgaagaatacatgcctacctacaaagcagctaattaacagtgtgtcaggagaaacttcaggtaggcccacccttgccagactcaggaatattttgaaaactttacgtggatctattt

SEQ ID NO: 1881664 - DNA, 4001 bp, Homo sapiens
gatggacaaactgatctggatgcttttttttccaaactccacctgcaggactggggcaagtctgtgatgatagagaaaaatgaggacaagattgcaagtttttcataaatctaaatttattaaatgtaaaggactgccttcatctttcaagtttagcctttgtgctttttcttggtattaaaatgtctttcattttatgaaatagtgacagtggatggatttttttaaaaaaaatggcctgacttggcagcataaaaatttggttagcatgatatcctgtgtgaggtcatctcccccagttaaaaaaaaaaaacaaaaacagtgccagtcagcgaaggaccaggaataaaaactctggatgagaggctcttaatcaggttgtagcagtttgtatgagtttgtataaagcttgacaagtctacgtacccaggctccagcctattctctgtgaggctgccaggcatttttggacctatttgctctcctgttcaaaaaccattaggtgtaaatatcttcacacttcccatcataatccagctccaatctctctccacctcttgcaactctcagtatcctccactcctgcctcaccagtcttttctccattccccataactcttcacatctccctgcctttgcttacgctggttcctctgccccggtgctgcccttcctccagctgcctggcaaactcctattcctctagacacccagtgtctaatgttacctttcattctgaatttttccttaatctgccccactgcttccaatgaaataactgctacctcttctatgtttttggcactttgcacagatttctattccatgtatttatggagtatttacttctgccattctgtcctccaagactgtgaccaacagcacctaggttggtttctgtccctcagatatttactgaattgaaatacattgtgtttgatattaataaaagagaaaccatgtttgatgtaagcctggtcaaataaacaaagacaagtttacttttatggtctgaatcgctcagattcaagaaagccccctccaaccctcaaattccttctgcactgtctcacttgtgcctcaaatccatccctaacgtctcattccttcacttaaaggttacaatgtaagaagtttatcagattctttcccaagctcaggcttgatggaagaaaggagggcggggacgcaggcctatgggtggggtagggaaggagccactaggctgcagagagggcaaaaagaggctctgaggatagagcctgtctcattctcagttgtcacaggttggctgaggtcacagggagttcagagcacactgatttaagaagccacctgcctgtgtccttcaagatgtttaggatgggaaatgatgggatcagtagggcataggtaatgctctcacagcccatagagagatgtcttcctacttaagaaaaggcagtgacgttcaggcgcctggtctgaggtgcctggaaatactcaccggatggcagaggcgagggctagccgactgggtggagggggcctggggatctgcggtagggagtgggacccatcccgggggctgcgagtggaggcggtgcctgcttagagtgttggctggactggaagagcaggcagggcgtgggtcggctgttgggggaggagtaaggcgaggggagcggggaggtcaaggcctgagctccctgtgccaaggccgagggcaggcgcaccctgggacgaggcctctgtcttacagggacctgctcccttcgtgcccgggctgggggaccctgcagcccacctctgacttggccccgagccattgggggcacttttccagacttgcttggtgccaggactggatactttgggagatccaggcaggctccgcggaggttcacgcaggccgagggggcagaccctgagtgtgggcgtgtgggtgtgtgcatgagcgtggacccggagcgacacacactcacacacacacactcacacgcccgcacccacgcaggtccctcggccgcgccgccccagaccctcaccccagagccgggtcctccctgaccactgcttctcactaacgcagagggcaggattcgtgggtcccggacgaggcgccaaggtatggtgttcccaccacccccgggcagccgcccccgcgctcgcccgccccccggggaaggggatggggaccgagtgcccggggctcttaccgctcaggcggccgagtacgcgcgggagtgcccagcgggtcccgccccgccacgtctgcagggccggcggggacgcggccggagggcgggcggctggagagggggccccgccccgcctgcgccccgccccacgaggagcgccgcggggacgcccggccacccccacgctgcgagggccgggcccgcgctgggcgagtctcctggaaacttggcttgtcccacccctgtgccagcgcggaaagccagagcgcgccgcctctccagcccagggcgggtgggtctcggggttcgccagatccctttcctttccttaaaagggcttggaaaaccccccgccgtgtcactgggaagaggtcgctcaaattcagctaaagtttgatctcctgattctgcgttaagcagcactcccttgccctgtcggtgggagtgtgatagatttaaaacaaacaaaccccaaacaaacaacgaaaacccactttccagaaggccagtttggagctgtgggttaaaactccgatgtattagctttggcctaggaattccacatttgtgaatttgtcctaagtaggcagtcaaatgggcaaatatgtatgtacaaggatgtttgttgtagttgtttctgcggggggaagccggagacaatctcaatgtcccccagtaagattggtgaagtaagctacagtaacttcagacatcgaatatgttgtagcccttaaaaatgaggattcgttgacatggagggaaggccacatatgaaggccttcctcaaatatggcttaatatgaactcagatgcggaggaagcgcagtgtttatagtattaactagttttgtaaacaattttgtattttctataaaagtcggaggaaatacaatttaaaaatagtgattctttctgagcgatgtgtttaaggcagattttctcctctctcactccatcccttcttctttttgaagaattataaattcaaagttaaagaaaaaatagccctagtctctccctttcaatatcactaccattttttatagtgtgtggatcctaccatagtttttctaagcttatataaatacatgtatgcataaacagctttttgtttgcttttttataaaaatggcgagatgttgacgtattttgtaaatttccccctatttattatatattataatcatctttcttggtcaatacatatcaaccaaaaccactcttctaagacttgtcttatatattgcaatatgtttgtaattatatttcattcaatcattctcctattgacaattagtttgctccttatattccagtttcttccatatatatattaattaatttattaattcatttttttgagatggagtcttgctctgtcgtccaggctggaaagcagtggcgtgatctcagctcactgcagcctctgcttactgggttcaagcaattctcctgcctcagcctcttgagtagctgggattacaggtgcgtgccaccacacccggctaatttttgtattttttagtagagacggggtttcaccatgttggccaggctggtctcgaactcctgacctcaggtgatccacccacctcggcctcccaaagtgctgggattacaggcatgagccaccgtgcctggctatatttcttatttaatatttttattaaatatttttatattaataattttttaagctactgaatatttattttattttattttttaggaggacagagtcttgatctgtggcctaggctgcagtgcagtggcaccatctccatctcctgggttcaagcgattcttctgcctcagcctctt

SEQ ID NO: 1881665 - DNA, 4001 bp, Homo sapiens
tattgatattgcttaaaatatgttctttatgtttcactaaatctttaaatctcttaggactgagaaaagccaaatcctatgtacatcagtcagggaggtaaggtccctatatatgctgttttaaagttataaatgtctgtttcagagcacaaggattaataactttaaaatcttttgaatcttttacttttatttagttagttagttatttttttgagacggagtcttgttctgtcaccaggctggagtgcactggtgcaatctccgcgcactgcaacctttgactccctggttcaagcaattctcctgcctcagcctaccgagtagctgggattacaggcacgcgccactacgccaagctgatttttgtatttttagaagagatggggtttcaccatgttggccaggctggtcttgatctcctgaccttgtgatctgccagtttccgcctcccaaagtgctgggattacaggcgtgagccaccacgcccagcctcttttctctagattggaaaatatctttgttagaaaaacattcctctcctttagactacaaattggaagaatttctaaaaatagaacagtgacaaaaccctggattgtggattttagcaagaaatactgccctgttaaagacctgctttaaagcaaaagaaatccccataagtctgtgggcaggagaatcaccatcacaaggcctgaagtatttaactttagttaaatataattttaaaccaggaaaatctgctcatgtatgggaatttgtagttctataaggattagggaaaacagaaggcagaatacaagcaatatctctcaaggttgaccttgaattttaaaaaattatatatatatatatatatgcaaaatcaggcaagatcttgacactccaaaatggtgtctgtggctcttagtgaggtggaagcacagggacgtgggaataggtgggaagaagagagtcttttaaaaccagccagctgaaatgttcttgtcaataaaggcatcattttacttcttctactaggttaggatgatttgaaggcctgcataaaccaaaagctgtcactataattcaaggataattggaacaaatggctgcttagcaccagaaagagatggggctgaggagatggaatcttccagcctttgggttgttccagggagcatgatcttcaccttaaatcccagctgaacaatatctgtcccttttcctgtcccctcaccaaaactggacctggagaagcctatgtatttgtttgcatggaatcctcgccctgtgagcacacacacatccactcagttctttcacgcttctctctcttccccattcttcacacacacagctacatctgtttccctttttccccctaaataaacttactccagtgttgaaaatggatacaaattgaatcctacccaccaaatactgcatcacattttcccaaaaatgacatgactttaccccagtgataaaagggaggtcctctttgctaccattaaaatatatcttttacttaattccctgccctctcctcaccaagaaaactcagtaaggaactgcagggaccttaaagaccatccagactttggctgtgcagagtgtgttctggggacccacaccatcagtttgcccaggagcacatgggaagagaagaatccccagccccactgaaaaccacaggactggagtctgcattttagcaagatcctatgtgattcctgtgcacattccagtttgagagacatgtgtctagggagcatgtctcacctacttcatgtgagagttacctggggagcttttacagccacccaagcctcacctgagaccaaattaatccacattctctagatggctatgtgtgttaaaagctccctggggtgggggtggggggttctgtgtatggccagagttgagtggcactgctcctgtccaactggctcattgtgcagacagcctgagtagcccaaggtcatgacataagccagtggcagggctgaatttaaaggcacaaagcagtgcgccccagagtcacgcgggtggactctgacagtgatagtgtccatttcccacatctgccaggagtgtggctctttgtgggctgagtcacctgcggggaagggtttcaggttagaatgttcatagggtgtcacccaaatcactgtttttaagcccttctctactcccaaagaagtcatttaatttggcctggaggatagcatcaaaaaactatgtaaccaatgatatttctgcttgacctgccaaatgtgtattaaatgcatccatatttgcctcccccctcagccatcttccccttttcccctgactccagtttataggaaaagcagccagcacatacccccctgacagaagtctatgaaaatccaactgagagggattaaaaggcagacagggcgtattccatttccttgaggccctgggaaaatgtcacatccgaggctgagccagtcctgatgagaaagcctcgttgctgccagctgggagggttcaaggtttgccaagcactgaagacactgtttatgaaaagctttaaatgtcaagtaccctggctccttagggtcctcccacaagataacgcagtctcttgtcaagcacagactcgcccgaaaaatgagacctgagaaaggggcaaggctgaggcatctgttcaaagacaagcttctcagaggccctggcttcttatgtggaggaaaacttatctccccgttttgcaggagttaagaagggcaaaagagaatgacagtgcagggagagaaagcgggaaatcagaagagaaaggagaagggagagaagaaagtgagagaatgcaggaagagagaaatgtgcagatactaaaaataaattcaaaggccctgcttttcaacctcctcagttttcatatcacagaaaagcagctaaatcttctgagaaagctcaaatgcaaggactaagaatgggaaagcagagagagggaggagaagtcctttcatcaaaatacttaggaatctcagtgcgtggtcacttggctgccacaggaggggtctgggtggtcctaagagggagagggactccttccaggctccccccaggacccaccctcccctcaccagcagcccaccctcctaacccgacagggaggaaacctgctcagtgctgctatttacaatttccattcaggcaatcttcacattttggaatggcatttgccaagggagacgatctcagctcctcttctattttcaggttccctcttgcatagcggatggcatcagtactaagctccaagaagcaatttagaagagtggttgctggaaagtgggggaacccatgccaatctacagacctgcagagcctggggatgaagcttttatttttaacactgggatctgtgaggctgacctatatttcacttcttatatcggcagaagtgacaagcctcgaaggccagggcacagagctgagcctcaggagtctgaggctttgaacacttcactcagaggaacagaagcaacaagacaccaagcccaccatggacagagacagccgctaaaacagaaggtgccaaagtgcctaggctaaggttgcagggtgcactcagtagaccagatgggaagaacttgatgtcagttttaccttcagaacttggaaagtctatagccagaccaaactatgcagctaacaagaagatggggggtgaggatgggggtggaggtgggcacaaattgaaggcccaggaaaggagaaaatgggtaggagaatgtcgaaaaaattaggagagatgaaagaaaggggccaggcatggtggctcatgcctgtaatcccagcactttgggaggctgaggcaggcagatcacctgaggccaggagtttgagaccagcctggccaacatggcaaaacccagtgtctactaaaaatacaaaaattaactaggcatggtggcacacgcctgtaattccagctacttgggaggctgaggcaggggaatcatttgaacctgggaggc

SEQ ID NO: 1881666 - DNA, 4001 bp, Homo sapiens
tgctcattcaaaacctgttaagatgagagttcagtgacaatttatgatgaaatgtggtcacaggtcacatgaaaagaacaagcaatatacttcttccattcattcaacaaatattttgagacctacaattatcctgggtacgtatgctagcgtatattatgatgaataaaataaaaaatctgcatgatccttctattatgttagagatcttgctttgtttcacagtaagacaaaattctgtgctacagaggttatcccttgctattaataccagtattataactggtgtttaaactacatttaggttaattttcaattgtaatagggaaggaacaggtatgcataattatttttcattgaataattttagatgaacatgagaatcaggtataccgactcagggcataatagctgatgttttttgtgtaggaacattttcttatcagcaaagaacatgatttggaggcaaagactgcagttacatcaactccatcatttacttgctatgtaactttgtggttcttttctcctaagaataagtgaaggtaacttgctatataactcttctgcaaaatgctaacgattttttaaatgtcctatgtgtggttttttatgttcttataaggtctaaatgagacagtggatatgaagacacccattaaataagtaataggtagaagacactaatatttatgcagtgccttcttcgtgataagtagaacaattttgcacatatatttttcctcttaataaagaatggaaagtaatgccctttcctttgtgttccttttatttgtgaattttaaactaaagcagaatgctgatatatcaggtcaaaagtctccaaatattcatcaacagatgaatggataaacaaaatatggtatatctataaaatgggatattatttagccataaaaatgaagtatggatacacgctacaatgtgaatgaaacctgaaaatttgcttaagtgaaataaatcaaacaaaaaagaccatatatattatcatatgtatatatcacatgtatatatcatatatataccatatatatcatatatataccatatatattataatatataatatatataattctatttatatgaaagacccaggctgaggggaggggaaaatggggagtgactgagtgtaggattttcttttgggatgatgaaaatgtctagtacttcacaaaattagatagagctaaatagaagtggggactgcacaacactgtacatgtactaaatgccactgaattatacaatttaaaacagttaattttatgttatgcatatttttccttaataaaactaaacaatttaccatgacatttcaatggggaaataatattcttttcagcaaatggtgctggaacaactagacatatccacacgcagaagaacaaagctggaccccttccctacaccacaactaactcaaaatggatcatagacataaaatgtaagtgctaaaactataaaactcttagaatacaggaataaatcttcatgactaaatgaatttttagatatgacatcaaaggtacaagcaacaaaagaaaaaagataatttggacttcatcaaaattaagaacttttgtgctctaaaggttaccgtatcatcaagaagtaaaaagacaacccacagaatgagagtaaatatttgcaaatcatatatctgataaggggttaatatccagaatatgtaacaaactcttacaactcaacaataaaacaacaaataaccaaatttaaaatgggcaaaagatttgaacagatatttatccaaagaagataaacaaatgaccaataaacacatgaaaagatgctcaacatcacaatcccattaggaaaatgaaaatcaaaacaacgagataacatttcacatccactaggatggttataaccaatcgaatgaggattccaatttttccacatctttgccaaaccttattaccaaagacgtggagaaattagaatcctcgttggattgtaaaatggtgcagttactttggaaaacagtttggcagtttctcaaaagttaaatacagagttctgacccagcaattctactcaagagaaatgaaaacataaacctacacaaaaacttgttgacaaatgttcacagcaggagtattcataacagccaaaaagcagaaacaacccaaatgtccatcaactcatgaatggataaataaaatgtgatacattcacatatggaatattttttggtaacaaaaaataataaagtactgacatatgccataatgtggatgaaccttgaaaacattatgttaaaagaaagatgcaagtaacaaccacatattatatgatctctacatataaaatgttcaaaatagacaaacctgtagagacagaggattaatggctgcctagagctgcgtgtggttgtgcggggagggtagaatgggaagaaggctaaaacatatgaagtttctattttggggtgaagaaaatgttctggaattacatagtagtgatggttgctactttgtgaatatgctaaaaactgcagaacagcacaacttaaataggtgaattttatggtatgtgaattatttctcaaaactgctattaaaaatatcatgggcattctaagaaaaacttttaaatgtatatatcaagaaataactactcttgaaaaaaaataaagtccaaagataaaagattacttatatatgaacttattccaaagaacatactactactcagttaagatgtttagtttctttcatgtcaaatcaactgttaatattttaaagattgttcattttaataaggctataagttttaaagtattaatttttttattctattttgtttactgaatagtttgaaatctgctagtttactttaaattcactttcagaagaaaaaatgactgcaaatctctatttgtgaacctgtcaaaatatcaaagcaatgataattgttataaacccaaataaatcagtaagctaaacagactcatgatattttgctatttagattaatgcgttctaagtaacgcattaatcagaggtcatgccattactggcaaataaatcaaaaaggtatttttataaaacagtacctgattgaaaacttatgtgttaacattctgaacatgcttagaaacagcctttactaatttccccaccatcttagtgaataaggtgtaaatgccttcacactgtcataaaacaaacttcaaaatttggcttctacttgtcctttccacctgcatctctcacctgtccctttaccatcctcccttttaccttattttgcagttacaccaaacttctgactcttgacccaatactacatttttttcttctgtttatgcattatgtctgttagccataatttcctttcttcacatggcaaattactactcatccttcaaatttcaaatcctttgtcaaacttttcctgtatgcccacagaaaatcatttcctcttctatgcaggagcacattctcaatcctgaattaatacacttttctttttttttttttttttttgagacagagtctcactcttgtcactcaggctgtagtgcagtggcgtgatctcagctcactgcaacctctgtctcccgggttcaagtgattctcctgcctcagcctccaaagcagctgggattacagacgccagccaccacggccggctaatctttgtatttttagtagatatggggtttcgttatgttagccaggctggtctcaaactcctgacctcaggtgatctgcccatctcagcctcccaaagtgctgggattacaggcgtgagccaccgcgcctgcttacacttttcaagttgtactgtaatcatatggtatctgtttccctatcatattatacgtatttgatggccagagctatgctaatatattgatctttggaatcctgataccaagcaaaatactgctttcagcatacaagctggtttccactgaatcaatggctttggtacttgtcccatgcttaatc

SEQ ID NO: 1881667 - DNA, 4001 bp, Homo sapiens
gccttcttaaaaatatactcatccccctatccgaaaataaacaatttttttttattcattgtggccaatgtaaaacacatcccaatgcaagaaaattgtaagtagcttcttaaaaaatgagcttcagaaacagtgcaagtataattaaaagttgaacggtgcaagcccacctccatccttgctatcctggattctgaggacatcagagtcttttagacctctagagaggataacaggtctgaggtgtggggacacactaggctgtcatgtttgcactccagatctctcctgataccagcctgcaacccaaacccactcttttctctcctccaagaatgggagccttgagaaggggccagcacagtagagaaacctataacactgcatcctttgttggccccatccattctgaggaaaagaatgcctggactgtgagagaatcctacacagagatgataatgggagatgaggggggtgggtgttggagttccttttcttattcccaacaccaacatcaataggcctcttttcccatttaatatttctgatacaaagaatgctctgctttggtcaggtgggttgcaaagaatttcattctgcaaaatttagtaggtaaaatgatagtgaacattttgatagcaaatgctcttaaaaaaatcttgggatatcaaatgtgatctctgactactgctaatatagttaaccaagacttattaaacaacaacaacaaacaacactgaaaatataaaggtcaccattcaaaataaaaatgcaccaatcattgttttcactgatttgtttggcaagaggcttgcttcaaaccccaattccacaatttgctgtatgatcttaatgatgccacctattctctctgaggcccagcttcctcatctctaaaaacacttacgatactttacaagcacactgcagagattaaatgagattaaatatataaaagtgctttgtcaactaaaaattatgctgttctcttccctggccatgatatctgataagtaatacacagattatggactgaaatgatatccacattgagaaaaggaaaaaaaaaaaggtcattctgcaccaagatattttctctcagttgtatttgttcactatgttttggacttttcagaataaagttgtttaaaatacataaatgaaaagtagtaccaaaaatgttcacatgcagcatcaaatctagttttcagtttttcagaaaactcaaatgatttcccagatcatctagaagggtataaactacaattacgctacagaagcaatagagagatcaatgtcaaggcaatggttctatttttaaaatctcaaaagatgccttcaacacagtgaaagttcaggagaatgaaataagcacccagaagggtgtattcatttccactgagattctgcagtatcggtttttcttcattgtgagcttgattaattttgccagtacagttacaattaaaataagtaagcaaaatttgaaaccctgatttgactttgaaaagttaaattttcaaggttcttaagaccttcaaggaactgaacacaagcagcagggacatcccgaggatatgatgatggcaaggtactgaggagatatggaaagtaaccacgagatagaaaaaaaggacaaaaataataaacggaggtgaaactctcaccagaaaaaaaaaatcactacggaaatgatatctaaatctttcttacgttacaaaagaaatttgattaatggacttggaaacccacctaatttctgggtcactatttgataaatgattatttgatagccatgaccagctgctatgtaccatatctgacacttgggacatatcaaagaataaataaacaaaatgttctgtcttcagagagtttatattttttaatgaggccgtacctacagtaagtagatatggggaaatgaagagcagataaagtattgaaacctggcctcagattcatcaggtaccaatattttatctactcttcactcccccaaatacagcctgccttgggtgcctgaaacttccccctcaggtcacagttatttaccaagatcacaacaaagtatctcctctattgttctcccctgtgagacctgttctttcaacagggcacctaccacacttcttgtagcatgtgagtttattcacaagacttttcttctcctaggtgtaagatgcagtaggtgctcaatacttatttcttttaataaatcaagaaagctaatagtaatctaagtctttgaaaggataaacagcaagtacactgctttattttgccattcagttaacaggataaataacactgtcgtttccctagaactttaaacaaattattgagcactttaaagaaatgtctcctttcaaaaatcaagcttagctactaaattatgtgacctacataaacaaaagaaaggcagtcttgctagctaatctgtctgcctcctttctttccagaaaaaaaaacaaaaacaaaaagaaaacactcaatttttttcatgataatcagtattatgccataaagacacagagactgatgagaaatatttacatagcttccaattctgactaccaagtaaaattagtaatgtgacagcaaagaagtcttgtaagtaacaccttaatcaaacgattaaagtggacatcatcaataatgaagcaagtcaaaatcacgtaccacctaatcagatgcaacatgcagaatatagcatcccttctgtgatattcctgtaaggatgcaaaacctgaatccaattatgaggaacaaatgataaacccaaattgagggacattctatacaacaggccgatatccttcaacaacatcaaaacaatgagaatctaagaaacactgagtaagtgttcaagaaggagcctaaagacatagcaaataaaggccactgataattctgaactggatcctttccttattaaggacattattagtggctctcacaaaacttcattgaggtgtaaaacttagatggtagtaatatatcattgttaatttccttatttttatggtttgtattgtgattatgcagaaaaatgccctcatgtgcacaaaatatatatcaatgttttggagggtgacagggtatcatatagaaatcttattgtcagatggttctggtaaaaaaaataactttgaactgagtttgcaaatttcctgcagacttaatattgttttaaaaataatgtagttggggattgttatattacaaaagaaaaattaaataaaaaaagacagctttcaatttaacaattccacatgagaaacatggtttactatcaacaagcattaccaccaagtaacaaacaccaccacctagaataagcccctgtaaccaataatctttgtttcaaaacaacttatgtggacttctttttgtctctaaaagcttccccttactccaaacccctcacagatgcatccatggtctgcaatggcatgcatatccagcattgcagacccttgctattcccaaataaactgttttagagaaaaaacacacaaaacaaacaaaaacaaatatcccaggattctggatgatgcaaactaaataaataaaagtttattgtggaaaaatctagataatcgatttttatttttaaatttaaacttccctccatcaatttcagcatctaaataacataataagctgcaaattactttacaaaaaaaaaaacaaaaaacaaaaaactaggtaccgggaattggtaagtggtctattttgtaaaaacaatgtagggaaatataagttatcagtcatacttgaaaattataaagccattgcaaaagacataggaattatattgtgtggcagactgtatgttcccataaacagctaaattagtatttccagtcccacatgtgttttcagaaagtccccatcaagaggtgctacgtccacactgtataaacttgggcaggtaagctttggctgactcgtgacttctctggtcaactgattacagaagaagtaatcctatgtga

SEQ ID NO: 1881668 - DNA, 4001 bp, Homo sapiens
ttatattgaagtttcactaccctgaactcatggctaaaggttatgatttgtgcaaattttgagcagagttctagaaataagctatttcttggagaaaacattacacaatggcagtgactagcagctgcatagtgaaggaaagattttatgattttaaatactttcgcctgtataggaagagaaattggataggtccaatcagtcagcatcactttgggatctgaacatatgaggagttgcctacattgagcaaataaatgcgataattattgttccttctaattaccttgacatgcataaccacagcaagaaattttggggggctgggcacagtggctcatgcctgtaatcccagcactttgggagaccgaggcgggcagatcccctgaggtcagaagttcaagacaagcctgaccaacatggaggtctttttgttttaacagagtctcactctgcgcccaggctggagtgcagtggtgcgatctcgctcaccacaacctccgcctcccaggttcaagcgattctcctgcctcagcctcctgagtagctgggattacaggcatgtgccaccacggctggctaatttttgtatttttagtagagacggggtttcaccatgttggtcaggctggtcttgaactcccgacctcgtgatccacccgccttggcctcccaaagtgctaggattacaggtgtgagacaccacgcccggccaggaagaggttttttagcaacctgaatttaagttatatttaggcttatttagaaaataaacaatttgcatccattttaaaataatgagcctttgtttgaaatgaaatgtcttcaaatgaggggattattatagaactatgatgtttagcaatgatttgatagtaaagagatttctgtagaaaacaaaatatttaccagtagtggaaagttgttccacggtgtattatcataagtaattcatttatctttgcttaacagccatctctttaatactccacatgtgccaccctacccttcaaagattactcatctagggacagttaaagaagtgggtaaatcatttgaaaatcataaaagacactagtaacacaaacaggctcttctcttaggccatgttttattagaaaaagctggctgttagatcacttacaaaacaccatatcctgaatgttcaaagaaagagaaacgttcacagagcaacggactcacggcaattccagtaattaatgagaaggaaacaaaagggcaaatttaaacatgtttcaaatttaagttcatttgacccatcacgtagctcggataaacctcctcctctgtggcatttcaaagtgcacgatttgaataccatttcatgagaaaaaggaaaatgaaaacctggagatacatatcttctgtgttaaaaacaagcacacagttcttagttttcaacactcaggtctcatgcagagtttttaaaggtcaaaattttactaaataaatgcttaccaattatctttaaaatgtttatttaacacttaaaaagcagcttaactttctaagatgtctgaagactcttctcttccaaaaggaagacagccccttactagtccagttatatgagacaacaaacacagcaagttcagcactgaaacttgaaaagacatgtaattcacattggtatatttctccattatgcaaaactggattcagtgcacacaaaaaataagcatatgcaaaagaaaagtaccatctctatcctttcttgttatcacactactggcatgctaatatgcatgatgtcaacatcgaccaacatggctttgttttatgatatgcatttttgcctatttgagaaatttcatttattcaaacatattcactgagtggccactatgtcccaagcataatactagacattcaggattaaaaaatatatataaacaaaatacaatcctagagcacaagaagctacaggagctataggagcttcttgttgtccgggattgtattttgtctatagatttatctgtagaccaacagtgggaaataccataatgaggtaataataattgttgccacatattgaattaagaactttatatttaccacctcatttaatcatcacattattgtcatttcataggtgatgaatttgggagatagagagaagttaattgacttgcccagggacactcagctaaaaataagaagcctcaggatttgagctcaagtcccctgacatcaaagtccacactgtaattctttacagctctccaaagaaatatggaagcataaagaaagagccccagcaggggtaagaaagttagggagcggggagaaaggaggtttcaaagagcttttgcttctgctgagactgtaaaagactaagttagtcaggactggagcagtttcatcataaattctttaggaaaataagtcagattgccaatgaaaatgttgatattgccgtagatttatttggctacctaaagaaacaaccataaagacattctcaaatactgatgcacactttgttcctattgagtgtcctattgagtgacgcttgcttgattcaagcttgcttgatgattattgttcatcatcatgtcaaactgaagaaaagcaagaatgtcccacattttaaaattgataaaaggcaaacaggcagggtgtggtggctcacatctgtagtccagctattcaagaggctgaggagggagacaccttgagccctagagttcaaggctgcaatgagccatgatcgtgccacttcactccagcctgggtgacacagcaagaccccatctcaaaaaaaaaaaaaaaaaagcaaacatttgtgaacaaaaataaaacagtaagaagagggaaaaagtccttcagggctatcaactaagcctgtgcaacagcatcctaagaggaaagcatttggcaggattggtggaggcagatctcacgtgacgatgcagccaagagtgcctactctaaatgagtgtaaaggccatggagcacagtttccagaccaactgaaagtaaaaaaagaatatttacaaattagcatttctttttaataaccagatgtaagcaacttcattaaatgtgtttctatatactacactactttggcctcacagcgatcctgtgagttctgtgttcttaacgtattcccttgtcatacacaaggaaaagaggtgaacaaaagtaaaaagcatgaagctatttaacaataaaagaagaattgtggtgcatttgtctaactttaatcattttcatcaaaattatgtgtccttttcagctctgtaagagagagaaaaaagcaaacaaacaaaattatttctcctctgcctcattgcctcagaatcatgctctgattctaagcaaaacttaaaagcctactctacataaaccactacactagctgtttatggagggaaaaaatggaaaacatatgttccctacccctgaagagctccctgtatgaggccctctgctggagaattgccaactgaatcatttttttctttgttctacatccagtctcatgtgacaaatgaatctttaatactatgataaagaatgataatgggctaatggaagtgtaacactacttccaagataagctcccttttttattgttgttgttgttattttgtttctgagatagggtctcgctctgtcgcccaggctggagtgcagtggtacaatcatggctcactgtagcctcaaattcctgggctcaagcgccctcctaagccccccaagtagctgggactacaggcaaatgctaccatgcccagctaattttatttttttgtagagacaggatctcatgatgttgcctaggcagatctcaaactcctagccttaagcactcctcctgcctcaaccaggtgtgagccaccagccagcgggagaggaggaaatcccatggtaaaagcctgggaaatcttatacagtacgaatctaacttggagatttgaaacatacattagcctattaagagctctgttaggtctttcaatatacaaacc

SEQ ID NO: 1881669 - DNA, 4001 bp, Homo sapiens
agaagaatccactggggtttgttatcattggggctcaggccgcagaagcaatacaaagtctttcagtaacagagaatgatggatatttagaaaggatatctaatatatatagctacataaaacattaacacatcagtgtttagttagcactaaaagtaatatttatatttattgtagactcatgaaaagaatgagatttttatgagaaaatgaagttttatatccctaaagctttaaaatttggattggaacagttaaaggaaattcattattaaaagatgtttaaaatgcaaaatcaaacaaaggtgagtcatcatgggtcagccaagcagagaatgaactagattaactcattagatcttttagaagttatgacaaagatggagaacattttgtataggaggtcaaatttcaaggtatttctattcacacatattactgatactccagatgaattggggaccatatattaataaccattttgctccaatgaaggagaaaacgtgagacaatggtattgtaataggtagaatagtgacccttcaaatatgtccacttcctactctctggaacctgtgaatgtgttagcttacatggaaaaagcgtgttgcaggtgtgactaagtaaaaaacattgagattatcctgatttatccttataggtataatgtgatcataaaagctcttgaaattagaatataaaagctggagagagagtccaagaaccagagagatagcagcatgagtattgagccccactttgctgattttgaagatggaggaacaaagccatgagacaagtaaatcaccacctctagaagctggaaaaacacaatgaaatagattttttcctagtcttcagaaagtaacgccacctgctgttatctttatcttagcccagtgagatctctgttggacttccaatctacagaactgtgaaataataaatttgcagagttttcttaagtcgcgaaatttgtggtaatctgttatagcagtaatagaaaacttagcatcaccataccaaggaagataagacatgtggttcatcaatgcaatcaatatatttagaataatccagggaaactattagtttccaggaaatgtttgcctttgttatctctatttgttgagatttatcataagatagtgtattaatcaataccattatagcaacaaatggccccaatacctcagtagctttcaacagaaagctatacgtgttgctcaaattataggtaggctgtagatgagctatgactccatgccaggtggcgctctgggtcttcacattcagggaaccagagaaaagaagctctatttatgagacatgtccattctcataacagacataaaggggaaggcacctctgctctggggtagtgtgcagagaatttactcaaattcaattgaccaattcatgtcatgggatgattacataaacttgtcttccagttttaactagacatgttaggtgaaaattaccagtgccctctaaagaagtaaatattaagcacaacagaatttcaagagaataacaagagatcactgctccgtttaagggaatgggtgaaacaggggtttcactaacttcccatataaataactccttctggccaatgcacaaggaacatgtttcctgggatttgatagactattaaagattaaacaatacggttcctctgattgcttctgttgtatttgatgcagtagagcctatgaagcaacaataggtgaaggggaactggcatgcccttgaaaacctggataataacttatcttccattctaatgcaggaggacagtcaagcacaattttcattcatgtggaacagaaacccatttatgacagggtctgctcagctcaggaagagttaaggactgtagttgtccatatgacaaatatagcccagtcaatgaatccagctaaaatccaagacccgatccagtctgtggactttctcagaattaagtggactggatcaaccagacgtattcttcaaattgtgagaattacattgttctcttgcacagattctgccaatcaacatgaagctcagagactacccattttccaggttttgaaaagataatattttttatttaagaatccttccaagccctgttcacaaaatcaatagaaaaaatatctgaatttaagagaggtcctaaagaaaaataatcattaaaagactggtggagattagtggcacagtctacataaaactttatgattcaattgtttagttgacattagaaatatctgcaactgcaacattgcagaccagcatctgtggtatatattgaaatgggatgctcagtgaatacctcttagtatttttactccaaaaatgcctgaggaagctgctgttaaaagccaaaagtaaaacatggctagagtcttactgggtgttggtcaaaccagattgtattaatggatgactatagacctctatcagtaggcagaaaatatgatatgtgagtattaattgggatcaaactctattttcctgtagagttcactcatgttgtctggagcaacaccatgaaaacaagtaaatatttcaaataaagaattagctatcaatttagcccatctggatatttttctctgaatcacggtacagtatgcatttcactgttttgaaagtagaaaatagaaaaaaaacagggaaacaatattacacaaattttacttaacaatctcagagcagaagcctcattgaaaattagaatgaataattaaaatctttgtttcacaatggaagcgtgttttgaacagaaagtgacaaatggagatctaattcctaaactgtgcatcctacacatataacaattttttgtttggtacagtgttctatgctcaaggttaaacttacctttatcagaaaagctgaaatcaatactcaagacacaatattgattacttcgaagttgcttgttcgtattcctaaaggcattttgtaggtgagcagtatctttactgccttgaagcatcaaggcagctccattgccaaataacactgcctgttttgttatttcttttttgttgttgttgtttgtttttgttattttaccagatatgtagcacctatgctgaaatagaaactccaattatggggaaaaagtctgggtcaaaacaggtaataaatgtggaaaaaggggagaagacatgtagatggcaaagacagtcacaagttaatctaatcccaaggaaggatgtagttacataattccccatattagccttgcagagcaagagaataaactcagtgctctttcttagatctggtactgagtaatagccagtgctgagagaaatcctaaactggttacctctggagaaaggagattggatttctactgatcttcagtagaaattctacctggtgaatctgaggaaaagacggtatgtagcacactctgatgactcaaggtcaagtcaatgggataaagtgaaagatgctgtggagttgatcttctgtcatccttgagatcataaatcaagacaatatatgattcaaacagctgcctgggtgtgatataaagcaaactgtggctgcctgttgagtatgtcccaatttgtatgatcgtttgattaagttaaaagtgaatttcatggatttcatctaaataaaatcgaaatggaacctgaataacttcaaagatgttaggcatggatgtgattgtgagatctgacaggatagatattttccctccagaagcagacaaaaaaaaaaaaaaacttttatgggaagccttttagtatacccagctgaagctatatttggaggtagaaaaaaaaccattgacagttgttagatatccaatgtttggatgttcagatcattttcctaaattgtacggttgtttaaatgtacaatgaaacagaatatgaggtaacttgttcagcagctgcccaggagatagcaagagtttagtgaagacgttaggagttagtcatgctatactaaatgaggctaaaaaatattactagaggctt

SEQ ID NO: 1881670 - DNA, 4001 bp, Homo sapiens
ttgtggttttggccaagtcataccttacaacaaaggcaagtgagtacatcatcaaagcatgtcccaaaagaacaggtatctattaggtccaacttcatttgaaaaaataaaggagtcagaggaaacagggaacatcaaatactcatgacagatcctgacccccaaaattgtacctgaataaggtagtcactggtagacaaatacaagtccagtgtaccaacatcttccatgtgactctgaaggtagctacaatactcttgaaagacaaagttttcaaaataaactttgattattcagaggtccacagtcacccattcttcaagtgaaatctaaactgtcacctgttcctcaatgaatggtcactgaatctacacaaatgctgtttctaatgtaattaacaggaattcagcagagagttcatgctgtttaccttggtaaagaatagatcccgggctgggcaccatggctcacacctgtaatcccaagccaaattttaggaggccaaggtggggagatcacctgaggtcaggagttcaagaccagcctggccaatatggtgaaaccacatctctactaaaaatacaaaaattagccgggcgtggtggtgcacacctggaggctgaggcacgagaattgcttgaacccgggaggcagaggttgcactgagccaagatcatgccagtgcactccagcctgggtgacagagcaagcctctgtctcaaaaaaaagaatagattgcaccaagtttcaatgtggaggtctcctgggaaacaaggtgttaacccctgggaattatcctgttggcactttaagttcttgttattagtaagtggaagaagtagagtttataccagtttttaaaaatgaataatgctttaaatctgtgacaactaaaattactcttacagagtacatcagaaaaaccttcagtaattaatttgcttttttaaagttatcacactttgtagaatcacccaagaccataatatttatttacattttcccgaagtagtgtaaatgtatatatagttaacattagacttacctatcgcatatgaaaataaaaccttcaaaaaatttcaaaatttcatatatgaaaacacaaaaaatcaaggcagaattttcaacctgtccataccagaatctatcactctactgtaccagaaaaccttaagttcttcctgtttttcctattatgcttttggtgccagctaatttgacttcaatttcaaagtaaatttactaagtcccctcaatgtctacagtaacacatttgtcaagtcaatgtgcttaaagcacaagaatttcaaactggaaagtctaagttcactggatttcccaaagagcatttagaaaaatattttacagaaacagcaaaaatcaaacctataagcaaagcatttatagttttaaaaactttttggaaaactaaaaatacataccaatttttttttcattctgggtttcctttagtaaatttaagtgttgatttacagaatattaacaatttcaggagagggatacaccaaagagataattctttaaaacagttgccaactaaaaaccagaccataaatgaaaatgctacttctctgaaattattaacgacagcaatcattccatcctgttctctatcccttccttttttccctcccactctctccatctaacaattccttgatcccattggacctacatgccattgaccctttcaccattgttcactattttcttgtcctcaaatttcttagccagcttagatccatagtctatcatcacaatcatgtccttgcacacaccttcacctccctagcctctcttctcattccatctggcttacctgtctaaacactaaacctagccaaacccaatccctacctcttccacaactgtacaagtgcttttgaacatggctagaaaaacacactcaactagactgacaggtcacattctcccatccaagtactaaccaggcccgaccctgcttagcttccgagatcagacgagatcgggcgcattcacggtggtatggccgtagaggacaggtcacattctcaactcacagtcactaacttcaagcagcagagcccttactgcagttaagcaatcctaacacccttccacaccattcatcttccactctcccagaaaactattttgtacctcaccctcttgtttcaaatccccaacagggcctcctccatcctcactctcagctgatgatagagccaaaagccctcaccactacttatactaatctgcctgtagctgggcccatggacagtattctgccttccctcctatcactatggatggcacgtctgtttccttgtctaaggccaacctccaactttgtgcaccaggcctcatccattattatccattcaagggcacagctccagaaattctacccaattcttctacatcattaatttcctttctccacttaagcaaccactagcaaatgggaacaaataaacatgttgttttccatctttaaaaaaataactcttgacccttgtttcccttctatggcttctattccacttctctgttccacattacagtaaaactcaaaaaagttttctctacttatctccaattcaactccttctattatcacttaagctaattccaggccatctgtcaccaccactgttccatcgaactgctcttgtcactgtcaccagtgaccttcataccactaaatccaatggtcacttctcagtcctcatcacactcgacctctcaacagcatctgaaacagagggtcatttctctattctctttttttttttaagacaaggtctcactctgttgaccaggctggatctactataggtgcactccaccacgtgcagctaatttttgcattttttggtagagatggggtttcaccatgtcatccaggctggtcttgaactcctgggctcaagcaatccacctgccttggcctccccaaatgctgtgaatacagatgtgagacaccacgcccaacccatatcctctattcctgaaacacttccatctttaggctccagaacttcatcatcactacttcgcaggcttttgctcagtctaggctgattcctcttcatatcccaagcctgtaaacattgaagtgctccagaacttggtccttgaacatctttgcaattgattcttgctctctgggtaacttcatccagtctcatggctttaaatatcaactatatactgatgcttctccaatgtatgtttccagcccagatctctccctaagattccagctttatatattcctctgccttttctacatctctacttaaatacctactatgtccaaaactgaacctctgatcctcccctgcaaacctgctccttctacaatcctcctcacctcaatatataccaaaccaactccacccttctaatagctcagacagaaaactctggcatcatccttgactctcctcttttctctcatctcccacatccaatccttcatcaaatcctgttggttctatctttgaaaatatgaaatatataaaaaccatatctcactactccacaactaacactatcctatctcagctggatgagcctcagctggataagcaagagcttcctacctggtctccccaccccacattgtcactctcaacagacatcagagtgacctcgataagttggattatatcactcatcagaatcctccagtgactttccatctctctgacgcaaaagctagtctttgcataaggccttacatgagggaccaggttacctcatcttctaccactcctcccccaacttactctgccctggccacactggtcttactgcttcttgaccaaggtaggcgcagcccaccttggagcatttccacacactgtgtcctcagcttggttcactcttcccgctgatagccgcgtgctaccacctcgatttcttcaagcctttgctcagatgttaccttctgaatgaggcctccctagcaactctgtttataattgccgtat

SEQ ID NO: 1881671 - DNA, 4001 bp, Homo sapiens
tgatccaaatttctctaaatgtaaaatgaggataataataatacctattcttagggatctttgtgatattaaatttaaaacagtcggcctggctcattgtaggaagtctatgtgtgtctactttcctttttattagagcagtagctttccttgcctaaaatcctgcctgtgctatattctcattttaatttaataggaccattttaaaagctgtagagctgcatttgagtgttgatatagactttttgtcagttttagttggctttgtagtttgagatttggggaagagttttgagatatattgtctttaattggcagactgatatagggaggaaattattagatttgggatcagaatatcttagtttatttcctgactattaatactaatgttagaactgtagacaaatcatctaacttattaggcctctatgttctcatctatatagtggagaaaaataatactaccttacctttctaaccttgttggattactgtgagaatcagatgatataatgtgtgagagatactttgtgattattaaatgtccttaaaaactaagtaaactattaacatctgcaatttatcattattgaatatatcatgtgtgtctccttcccattggaaggtacaattatgctatgaaatgttaagattaattgcttatttccacagcaaaggatatcactttttgtgatcacttactagtaaattaagccaaataatttgctaactcagttatgaaattgatcccattaaaagtaaacacataactatccaacacagcattaattctaccatatacatttatagcttaaaaatttatgtaatatataggacaacggctctatttctcacgttcttgattagttaccacagcatggcttaacccagcataaaataactcttggttcttatcagttcacagatgtgctattccccgattttaaaattaaggtataatttacatagagtaaaattcatccttttttagtatacagttctgtaagttttgataattgtttaatatataatgaccactataatcaagatgtagaacattccatcacccccaaagtttccctgtgcccttttgtaggcaatgcctctatccccctccctcccagcccttggcaaccactgatctgtttttttatccctttagttttgccttttccagaacaccctatacattgaatcatacaatatgtacttttttgagtttgacagtgtggctttttttttttttgatgtgccatattcaatagcattttttttctatttggaagcaaaagtgttattgcacttactttttagaagagatttccaaagttgcattttttttggagtgtgctttttatttactgagaaacactggttgatgtttttgacttctatgtttatagatagcttgagagtacctaagtattcccaagcctttgcctatacatacccattaaaaaatttctccttctatgtttcctatatattgcaaacaaagttaaattacctttcagaatatctgaaatatatttgttcccccattttcggttcagagtttttgttttttaataactataacccttgaatgtgtgaatttactatgcctcttggaatttccacttagctgctggattaacaaccagtactgccataatatgttgaaatttctaggaggctgaaattctgagccatgaagaatgcaatagaaatgattaacattaaagctgatgtcaccccactaaggcttaaagtggtatagatattaatagataataaagcattagataatctgagaacaagagggttgatattcctacaaagctgagaattaaaggatgcttcagagaaaaaaaattgacttaaaatattccctccattagtgtccaccagtcaactttatattgttgaacatcaggcccaagatcaacaattgtctacttcccattttcgaagtagtcagttgttggccttgagtctgatgttcaacaatataaagtctcaagctctttccatctctctgctccattattcttagctgttggtattttttttgttttgttttgttttgttttgttttttgagacacagtcttgctctgtcactccagggttcaagcagttcttgtgtctcaccctcccaagtagccgggactataggtgtgcaccaccacgcccagctaattttttgtattttagtagagacagagtttcaccatgttgcccccagggtggtctcaaactcctgagctcaggcaatctgcctgcctcatcctcccaaaatgctaagatcatagctgtgagccaccgtgcctggctagctgttggtcttttatcctcatgctttgttacttcatggtagtgagatggctgttgaggttttaggcattgtatttttgttcgaggtaggaagaaagggaaaaggcaccgctgatatgctatcctgttatttctgtccttttatatgttagaacaagcatttccaggaggctctcagctgactttccctaatgttgcattggccagaactggattactgctagctgtaaggagaggagagaaattgagtatctatccaagggaacagaatttggcttagaaacgtgcttcctgactgacgtttttccctttatggcacgtgtaggaaatgataacatttgttgtacatcctgagggtgaacagaatgcttctgctaatctaggcccagtccttctgccctgagagttaaggggaatcaatatctcggctatctgtcatgtatttgaggcacatattacttggaaatgtgactggtttagactaactagactaacagtgagtcatatcctagattgggcatattgttgtcccaaagaaaacagggttctgttaacatataagagggtgggaatggctataaagtaggcagttaatagtctggcacagtagctgtttgtttaaagattatcttcaattttagaatatgctgtatctggatttgaataaatacgtatttgttactctcagaagtcaccttttccccctttaataatgaaacttctggaatgtgggggaaatggttgttcagtgtatataaagttttaattatctgctaaagttctagaaatcttttgtacaacataatgcctatgcttgataatacagtattgtgtacttcagaatttgtaaagagcgtagatctcatgttacatgttcttattacaaagagcaacaatgggatacaaggaaacactgagaaatattgcatgtgtccgttaacttgattgtggtgatggtatcatgggtgttttcaatgttcaaactcataaaattgtacacattaaatatatgcagttatttgtatatcaattatacctcaataaaactgcttaaatattgtgaaagaggattagagttggaaagttgacttttctcaggtatactttcagcctcacttgccatagcttgacttctatgtacaatgagatatcctgggactctgaaaagataaagtgaggggtaggaaagatcccatcactaaaataagtcaggtttatatatgagagaccagaatcacacagtaaacacttttttgttgttgttgttgtttgttttgttttttcagatgtagtctcactctgttgcccaggctggagtgcagtggtgtgatctcagctcactgcaacctccacctccctgattcaagtgattctcctgcctcagcctcccaagtagctgggattacaggcacccaccaccacgcccagctaatttttgtatttttagtagagatggggtttcaccatgttggccagcccggtctcaaactcctgaccttaggtgatcctcccgcctctgcctcctaaagtgctgggatcacagaagtgagccactgcgcctggccacgcacaataaactcttaaggaaggatcctaggaactaggcattgagcagatggctggtggttggcttcttatatgtcaaattggcaagaatgttctggcaaatccttaggtctccaa

SEQ ID NO: 1881672 - DNA, 4001 bp, Homo sapiens
attccattgtgtgtgtgtgtgtgtgtgtgtgtgtgtgtgtgtgtgtgtatgtgtgtctatgtgtgtttgtataccatatatatgccacattttatttattcatttatttattcattttatttatccatttatttattcattttatttatccataaatgttaatgaacatttaggttgattccataacttgactattgtgaatagtgttgcaacaaacatgagagtgagacatctccttgacatactgatttcatttcctttggatatatatccagcagtgggattgctggatcataaggtagtcccagttttaattttttgagaaatctccatattgtttttcataatggctaaactaatttacattctcaccaacagtatttaagggtacccttttctccacatccttcccaacacttgttatcttttgtatttttgatagaagtcattctaactggagtaaggtaatacctcattgtgttttgatttgcatttccatgatgattagtgatgttaaatatttttttcatatacctctttgtcatttgaatgtctttttttgagaaatgtctagtcaggtctttcgcctatttttaaaccagattatttgtgtttttgtgattgagttgtttgagttctcttttctctccaacttcatacctcatccctgggcaaccattaatctagtttctgtctctatagatttctgtattctggacattcatataaatggaatcataaaagatgtggtcttttgtgtttggtttctttcacttagtataatatttttcaaggttcaacaatgttgtagcatgtattcgtactttattcctttttattgccagtgtttgctagtattttattgagaaattttgtgtctacatttataagagatactgctctctagttttcttttcttgtgctgtttttacctggttttggcataaggataatgctagctcctagaatgggtttggaaatattcctttgtcttctcttttttgaaagagtttgtaaagaattattactaattcttctttaaatgtttaatcgaattcaccagcaaagccatctggaattgggctttaagttgtgggaaatgttttcgtttgaaattaaatcattttacttgtaataagtttattcagattttctatttcactttgaatcaatggtggttgtttctggttgtctttctagaaatttgtcatgtcatctaagctacctaatttgttggcacacaaatgttcacagcattcctatatgatccttttttatttctgtaaggttggtagtgatgtctccactcccatttttgattttatcaacttataccttctttcctttcttcttcagtctagctaaaattttgtcaattttaatttttttcttaaagaaccaattagaattgattgattttttgtttttctatttcctattttatttatttctgttctaatatttactattttcttccttctgattgttttgcatttagtttgctcttctttttatagttttttaagttgtcaggttagattattgacttgagatgttattatatagacatttgtagttataaatttctctgtaagtactgtgtaagctacattctataatttttcgtatgttttatcttcattttcatttctctcatagcattttctaatctttctggcatttttcagaccattgattactcaagagtgtgttgcttaatttccacataattgtgaatttctaaatttccttctgttactgatttctcatttcattccactgtggttggagaccatactttgtataattttttaaaaatttattcagacttgttttatgccctagcatataatctatcctggggaatgttccatatgtacttgaaaagagtatatattctgctgtttttttctatcacgcctagttggtgtctatcacatctatttggtgtatactgttgttcaaagaaatagaggacttgagcaacgctatacaccagatagacctgacagacatttacacaatgttccataccaaagcagcagaaatacttgactagttgttcagaatttatttttaattttaataaatatatttcaatgcatccatctcacttactcatttctcataaaagtaatatgagtaacacccctctacgaccatggaaaaagtggctatttttgattcctctgattcaatagatcactgtagaacatgaagtcaccaaatattcttgtgtaagagctctctgaaaattaatcttgacaggattgttgggggattactggcacaggtgtagactgccaggctgtctctcctgctttgcacatagccttttttgagtataaatagaagaagaacattactgctttctgctatttcaggaaagaacacacccatttatttagtcattcataagcactgagttgaatgcctactgtaagacaagccctaagagtacttatagtaaacatacacttgattctactatgacataaaatccagaatctgatggccaatcctactgacagcagctaagagtaagaacttgacatgctcagcaggtacataagatatactttccagatcaatgctggattatgaatgctttctgtccacaggattctctacatgctcctttccttacctccatcaatttctgatgtgggcaagaaggattgttgtacccaataactgagtctacaaactcaactctcttcattatgtctagggcaatgcccagtgtcctaagaccaccagttgcaacctcctacaataaccccattacattggctaattttgttgatatatctgaatacatacatatctgactataaaacatgactctgaaacttactagatattggacattgacttgttcgcctaacttctccaagctttctcagtcttttaatttggagaccaggcatgaaaaatatttatttcacagaattgtagtgagggttaaatatttaagataaggtacctgacacatagtgggcactctccaagagtggtagcttaaaacatgcaaataacaattcttggctccttattctgtgctctggacttacatgtgagttctcagctaggagttaaggctcattctgaaactaagctagtgacctggtccttcatgtgctccagcacctgcaaacaacgtgtatactcttccctggagcaagaacaccaaagaagtgaggtggagtgcttccttcttttagtcctctagttgtcagctggaatactgactgctatgaatgaactgaccacctggtactatgcttctggtggtcattatcatccagcccttacaacacacaagttcactatgctctacccactacccctagagatcaggatcattgtcctcaggcctgtcctgcctagttcttttgcttcctccttttcccatttgttcagggtattaaaatcccaaaaccctgcaagactctgcccagtcaaattatgaacactaaacaccgaactccaaagtctaacccacaatgtttatagtatgctgtggatacatctgacttatattaagacacttcagggaacttatgtgactcaacactcaatgctgaccaagatggccccctaatctaggccagatggcaaactgatcattaacttcattctgatggacttgttttccccaaaatgagctgttataattaatcctctgttatctggcattttatcaacaaatatcattcattaactaacattttccctgccagttcaactacaattaattatcacaatgataagctgtggcactaagggattctgaaatcatctcaggattcagagagtgacagaaagagaataagagagagaatgagagacagcaagagagagaggtcaaatcatgctcagtagaattttaatattaagggtataaagcattgcttctgcagtgtcctggaaaccccatcccatttatacaaatgccccagataacgtctcctaatggggctgtcatgtaatatatagaa

SEQ ID NO: 1881673 - DNA, 4001 bp, Homo sapiens
taaattctgaccactgggatgggtgattcccctttggctggggttcatctaaatgctccctccatgcatgggcactggctgagctctgcctggtgttgctttctgctgtgataggacagcactgagttccaatgcaaagtcccacaatcactccacaagtgcacagattctctgtgctatgcagctcttgctggggaatgggggaggggtggtgttggtgattcaagactgtctttcctacccttgtcagtgcctttttcagtgatctgaatttaaaaccaggtactatgattgcttatatgatttttagttcttatgaaggtgcttttttgtgtggatgctgttcaggttggtgttcctgcagaaaggacaattagtggaggcttctatttggccatcttgctccatcttccccccaaaaaatcattttaaaattaaaaataatgaactcagagatgagtttaattagtactccaggtgttttttaaactgtactttactcacagagcccattatgtatggatgcttttatactagtgatcctgaaggcaaaggtgaacatcaaaccttggttccttcaagtaaaaaacatttggggaccatggcaacataggatcattaagtacagaaatggaattgtggactaggtggaaagatggggatgtgaaaatgattttgacacattgagagccgctaggtagtcaggagcactgactgcacaaggcatatcaggctctggcaattgttgggttgtcccatttggaaagaaaattaatcattggaatacatagatgttaaaccgcgtatctagagggatgaggccaagaatgaaggagaaagatgctgattggcaggcagaagaatgccaaagcaaaatggctatttcgttttgcaagagaccacccttatcttcagtaaaagctccttgacaacatcctacatgtaaatacataaattagctgatgtttctgggttttcagccctttaacagtaatattgtttttaatagaatgctcacctagtcatttcaagtgccgctcaggacagtgtgttctggcttccagaagatgtgatggccaggccgactgtgacgatgacagtgatgaggaaaactgtggtatgtatgtgcaatggtacttttcttgaatgtacagtgataactagaataaaataagaaactgtgttaaaaatggaaactattcactgatagtaggactaggattcaatgctaatgtctttacttcttaaattattgaacagtatggcatatattttaagtgtttttcctgactcttgatttcctctaaattgcacttctatataaccctgatacatacagtacccctcccccttatccgtagggatatgttccaggacccccagtggatacctgaaaccatagattgtatggaaccccatatatgcagtactatgctttttcctacacatatgtacctatgatagagtttaatttataaattaggcacaatgagagattaacaacaataataaaatggatcaattataacaatgtactgaaagaaaagtaatgagaatgcggtttctctctctctgtctcaaaatatcttattgtattgtgccaacatttttggaccatgcttaaccagggataactgaaactgtggaaactgaaacttcagataagggtggaggggcactactatatttgcaaacacttattaaaaggagaagcacctcacaaatgtaaagaattatttttattattaaattataaagccattgttatcagttttaaagccagaataatagtgtctttgcgtatgcttcccatgttgctaaatagacatctagatgcatgaaggcagagttcatactccaacattcagagttcagactccatcattcccagtctaattgggattcattttcatgtcctctcatattttttctctttcggcaaaggataaaactcttcttgacatttctgccattgagttccaaaatcgccagtggaaaagccataaatgccaatggtaatttgagtggacttagttgtcattatatttccctgcaaatctttgtacttgtaaccacaatgtattagggaatagaagtcagacaatggtctttaataaacagtgtttttgaggaaagcaaaatgattgaagatctatccacagaattgtttggttatgattatttagcctttcctgtttaagaagaattgacactttcatgacaagcacgtaaggcagtacatcttttgaaataatttcattcttttggcctttgaagtatgaaatattgcgttgctccattaagtgaattttaggtggtaaacattgcccttctgatctagacaaaaatgtcacaagcaatcaactgaaatcctgtcagctcctataaatatggactaatgcatcttctggaaaacttcagctgtcagaatgatggtacaatgtctggggtaattttgttatggaggaatgtacagtgtttttagaagctactgttgtttgcttgtttgtggttttttgttttgtaaagaaataaatcaaaattcattgaatataccttatataagtgatttattgagaatgtattagatttgttcactgaactatgactttgatgggtcatggtatttgagatgcaatttaaaatagattatcttagatggttcaaagaggttgcatgatactttgttggggtggctagacctaaatttgttgtaggggactaaatatttgagaaatacaaaagcttagttaaaaacaaaacaaaacaactttaccaagactaaaagttctgagttctagaacatattctgcaaaaaataaacttaaagtactatcatattggtatagggtttaaacgaccctaaaatatcaggtttctagttaagtaattggttttcaccagtattttaatcacacaattaaaggcacatcaaaataatagaatatattgtctaatctctatcaaaaattaaaaataattgacagcactattgagagctctagttaaggaaagttaaaagtgggtaagaaataatacatttggagttcaattaattgctccagcagtactaatttatgagaagttttccaaagtgactaacaatagaaaactttacatacttcgttcccctttgatacttctgcatgcatttgaatgggcttgttcagtgatttgggaggacacaccacttcaaatcaaataaggaagtcaggttgatgaaggctcaacagaggactaataggaagtcatctgtttccatttgcctccttgctgtttgtctttctgttttcgtatgtgcataggcacaccatctggtaatgcaagcaccagctccagcaaagctgggtttcaccccaagcttcttgcctttctgacttattctgtccgttgtgttattaagtgtttgagctttactgaataattggacaattaactattcattgtcatgaatctgcagctccctcagaatttctaacaaggttattgagtttccactcaaaacaatacttatttaactcagttatgaaataaatattgtgtgagaaattacttcttgtttctttggcacttttgtaatggagaaacatgataaccaaagcacttaacttataaatacacttttaaaatatatgcattagaatttagcaatcagtaatactgttcttaaatgtctccagctcttgtggtagatttttgctgttgaggctgctttgattgtgtaattgccaatgtaaacaagagttgaaaatgtcagtactagaaaagttttcagcaagtgttgggatgaattgtgcaaatccgatatgggaaggaagtctaagagacaggggaatgctgagcagaatctgcactgtgtcagtacagaagtactgcattgtcttaaggatgcttaagatgtcaattactgtatgcttaagtaattgagcatacatgatatagatggagctgcctgtaaaactagcaacttgataaatgagtttattttcaacgtaacattt

SEQ ID NO: 1881674 - DNA, 4001 bp, Homo sapiens
attattgctttactggcactttgatgactcataattatttttaggatcaaaaatctaatgtaaccatcctcccattttccagtactaccaagtataacaaatacacacatctattgctgacaattaaattaatttcctccatctacaaacactgtcattcagagaaagtttactgaagggcaggaaacagattgtgaggggctgctgagccccacaggcagaactttaaacaaaacttatttttgccaatagtagtaaagaggctaatatgtaacttagagtgttctgtcttcccttttactttatcaaatgcaaatttaaacatctcacccttctcagaagcaaataagtaattttcttaaaaaggcacagtctcactaaattctgcttttcaacaaaatttaaacatttggtttaatcttattccaaaagcactaaaacagtttgatgtcactgttgattactcccttttgctttctcagtaaagttatctcaaaatcgaattgtctaattgaaagcaaacaaacatgccaacaaacaagaaactgaattttgaaattctgtctaccaacagaagaaagagaattccagaagaaaacaattccacttaagtataggacaagacctaaggacaattaggaaatttagttatcacaatttggaagcaagaagaatccacacacacccacacaaaagcaagtagatggtaaatatgaaaatagctaaatacaaactcacaagtagacagtaaaaatgctaaaaatggtcatcattttaatggtttacctctgctttcccaactgttctccagtcacacccaagataaaatatgaaggcatattaagactgccatgggccttgtatacaaaattgatattcagtaataaaagttgagagctcagcactggctaaaactgcctcatcaaagtcattactcctttaggttctcaattacatcagggattccataggcatgaaaaggcatctcactctttagatacaacaacagttaaaatgtagtgcaccaagggtacagtaaaacacattttactgtacactgacatcaggcagatcttaagcaaatataatctagcatcatttgattaagggggtttaaaataaaaagagcctacagtgactagtttttaatttttttggtttttttttggggggagcgggggggaggtgaggtagatagttactggaacacaagatcaactggtttgtacataattttattgctatagttctgcacatacttaggttcagaaatacagcagatgaacgcatttctaaaagtgagagtacacacaggaacaaaacaacagttaagattgtgagttctctgaggatcttttcgccctttaaaatttatatatgcaatagagttcctccagaggacatcattacacaaaaccactccagtagcaactactgggaagtaccaaattacataaaattaatggaggctctttgcaatgaataaatttacaactacatgacgagtgcctttcactttttattccactgagtgagctgctagagtaatcaattcattcaggtatattagagaaacccattacatgtctgatgggcagttttgttccccccaccctttattaagatttctgtttgtgtttaaagaaaaataaccaggttggtcttggaatctacaatgtgggaggctgggaaatcagatacgcaaacaggaaaaaataaaaagagaaagcaggatttgggtaagacagacacaaaagaataaaaagacacatcagaatttaaatgttttctcaataaatcaaatactttcaattttaaaatacacaaaatttgctaatattcagaaaatctttctaaaaatttaaaaaaataataaggatggaattactgtgatccaaccttagaagactccaagtcaacacagatttgccctacatccaaaagatcacattgtaacatgcagaggcaacaatatgttccacaggaatgtaagcaagatgattttcttcttcttcttttctttttctatttttcttttttatttttgagacagtcttgctctgtcatccaggctgcaaccttgacctcccaggcttaagcaatcctcccacctcagcctcctaagtggctaggaacaggtgcgcactaccacagctggctaatttttaattttttgtagagacagcgtctccctatgttgcccaggaaggtctcaaactcctggactcaagcaatcctcctgcttcagcctcctaaagttctgggattacaagcataagccaacatgcctggccaagatacataagaggagatggtatggtacagtgaaaagagaagtgacctaggctttcattcttgcaatgaggtaaacctttgcactcctatggaaaggtgcttcatctataaaccagcaatatcatttttcctagctgcttcatagttttgacaggaaagccacctaagataatatgtggaaggcctttgtaaatgttagagcactataaagatcaaagataacacaaattacaggtgatattaatgttgctaactctaacgaaaaaagaaagcgctcaacaaatatttgttgaataaaagaaagaatattttaaaataatttctaaacctgaaatcaaattattccaatcattttattttatatttatattaatgtcatattgtagaatatttagttgtctataacaatagccaatattaatccaatgcttactattttccaggtcctgttttaaagactagaaatattaacctgacaataccttcctgagatagaatgtattattagaatctatttcacctgtaaatctttatttgctttatttttttacttcatttaaattacttaaactaaaatacagggctagataatataccaaaaatcacacagtctcaactcaaagctagaaaatctgattccagtgaccatgcttttaaactaaaaatgaattcattaatacatgtacacttagtcaaattgctaagtgtatctgtacaaatgttacagtacatgaccaaaatagtattttcaggtaaaatcaattcaggattgttgttaactgtactgtgctacacagtcataattcttttaatattctggaactataagatatcagttttatggcatcttatcaattacataacctgtttcactcttctgccttcaaaatacttccttctctgttccccaaatatacttgtaattgagcatcttgttttgtgtagatataaaaatgcttaaaaatgaaattcttaagactcatagtagaaacacctagattacatgaatgtttacagacagcattagctcattaatggtttatttactaatgactgcaataagcatcatattagacactgaatggggatagataagcaattaaagacatgaccttaatcagttactttttttaatcagttatttttaaaatctaattaagacacaaaacatacttatgtgagatgacctgaaaactacattttaaaaaatcacttatttccaattgaaaactggtaagctattagtcaaatacacaagtcctaaggagaaacaggaagggtcaaactcaggggagacaagtgccagagaataaaaataaattactctatgtgcttgagattgttcagtaaggaaaatattggtttaaataaaaaaaaagagtaaaactgaattctccacccatatcctgcatcatggatttgcaggacttccagggtgtcttatatgtgtcattatcgaaatatgttacattaagaaatctgggccaggtgtggttgctcatgcctgtaattttgggaggctaagaaggcaggagaatagcttgagaccaggagttcaagatcaacctgggcaacatagcaagacccctgtctctacaaaaaaataaaatattagctgggcatggtggcatatgcctatagccccagctactcaggaggctggggcaggaggatcactgtagcccaggagttggaggctgcagtaa

SEQ ID NO: 1881675 - DNA, 4001 bp, Homo sapiens
gactctatataggtacacagtaattattagtttttggaagtgaaacttaaatttattctaagtgttatggtttaaaactttatggtgatacagcacagatattttcttacttttaaggtgatgcatatgaaatgcagaagggcccatttgctggcagagtatcctccattcccacatgtcccatgtggtctcagctactttaattgcctctaaatagaattttggcaatacattgaattaacctggataagaagaagcttaataaaatgtgaagggtttcttctacttttatgctcttatgtgctgatgttacatattcagccctgactcttcagtaaagtcagcctcttgcaacacaaagcagtggttatcatacttaagtgcacttaagggttacttagagactatgcttaatcttgttaaataaatattcttggctctcacctctgagattttaactcaggaggtctggagtaaagctcagccatctacatcatttaaaaacacaccaggcgattcttctgatgtggtagttcacagagtacactttgggaggcgctgacataaaggattaactagacttttcatactgtgtgtttattacacaatcccaaatacagtttatcctatgtcatcattaatcatctagtctgtcaaaatgtatgctgtaagaatgcataaaaagctgaatatcataagccattttttaaaagaaatgattatgtattatagatggtatagacaaatctgtgaaatatataccttactaatataaaattgttaaatgtcttttattcctgaaaaatactctttttcttttgtaactctggggaaaagttcatatgtaacaaccagtggttttcaaaaaggaaagattttcacaaatttttctatgtacttctgttttactaggtatcttagaagatgctttctaatatccttcagaaagccaataatctagaaaggtatgacacaaaagtagcaaatataaaggtacttcagctctagttctaatatattatttgtgacttgtgagagatccaatttaagtacacaatgtgtttatttaatagagttgctgtactagaatatggaaattcctacagtatcaaacagaatctatgatttacttcaaagcccccttttggaactcattgatgactgaggaaggtaaagagtacagaaaaaaaaaaagactgaaatttaaataaactgtatgtcagcaacacttaaactcatcaaaaacacagtttcaatttataatctctactattacacagctggctttcacatagctttaagaaacaattcattagctcaaagccaccattgaaattattatacttctgtcaatcattgtaagatttttactatttttttttgagacagcatcttgccctgtcacctaggctggagtgcagtggtacaatcaaggctcactgtaccctcaatttcctggcctgaagagttcctcccagctcagcctcccaaatagctgggtccacaggtgcacaccatcaaacttaaaaaaaaattaatatagagacagaatctccctgtgttgcccaggttgatctcaaactcctgggcacaagtgatcctcctgcctcagcctcccaaattgctggaattacacgtatacttcttataaggaagtattaaagaaaggcacaaaaaagttttactatagtcacataagcccacacaaatatgatatgaaggtcagctttgaaaaatcaaacacgtaaaattttgacaatcaaatgtgatataatatgcctaagatttcacagagaaacccttaaataaaaataaagaattcaggaaacaagtcaatctatcttgtggcataataagttttgattaaaggggcataaaatccaaaacagcaactaaaagtgagtaagaggcacagcagatgtctgtgtgggaaggaagcaaaatacagctgaaaagaggactctctccccagagtattcccagctccatcatcacacaggcgaccttgaaaaagccactatagggacagtggaactaatcttattaaatatagcagaagagatattattcaaaagttattacatagttcaagtaaatacaaatacttggtttggatatacctcattataaaaaaaataaatagataatgcttaacattacaatgtaatctttctttccttcttttttctttttttttttttttctttttttttttttgagacagagacttgctctgtcacccaggctggagtgcagtggtgtaatcttggctcactgcaatctccacctcctaggctcaagtgatcctcccacctcagccccccagtagctggaattacagatgtgtgccagcacacctagtaatttttttttttttttttgtagagatggggtttcactatgtttcccagggggtcttgaactcctgggcttaagtgatcctcccacctcagcctcccaaagtgctgagattacaggtgtgagccatggtgcccagcctaccttcaccaaatttctttaaaatgtaaccattgcattttatgtacaacttgatatagagaataacaattcaagaaaatgtctactactttctatagtaaatatgttttatacatatattttataccaatgctgtggtttccatatttgactctgcaaacctcaagttgaaatgtgatccccaatattggaggcagagcctaataaaaggtgtttagatcatgagggtggaccctcatgaatggcttagtgccattctggtgataaggagtgagtttttgctgtattagttcctatgagagttcccctgatggctgatcattaacaagagcctggcacctccccctggtttctgtacacaccagctctcctaccctttcctccgtgagtggaagcttcctgaagccctcaccaaaagcagatgctggtgcaatgcttcttgtacagcttgcagaactgtgatccaaataaacctcttttctttataaattacccagcttcgggtattcttttgtagctacacaaatgaactacgacaacaagtaatgtgtgcaattgcagtaagggtacattccttttttgagcagaaggttataattaaaacttcttagttaccaacgtctttactgtttttagaagtgtttttttgcttccatcaccttttcaatgttggcggcctctggtttcatctgggggcatgtcacctgtagtgggaaaattcccataaatagatttgctactttgggtgatttcctagtcattaattcattcatttttttcacaaatatttactaagtacctattagctggtaggaacttcaaagaaaatagagcttatgatatgcagactacaacctaattgattctcctaaaacagcctttggtcaatggcctttcactagtatatagttcaaattctaaatcttgacttatgaatctcttgataatcttagcctatgtgcctcatctaaattttgggggttccacaaatgtccagtagaaatggtattatagccattgctttccagtctttctaatgagtccaatactgagtgtgtgaacttcccataatgcttcaggacttaacttttctgccaccctctgaggctgagttgtcatcctgaagtactctataatcccctgtgctttctcaggacatgggaacacaatattcaaagtcctgctttggccatccctggattacactccttcaagccaagtttgcatgtcctactcatcttggtaggcccatgcctggctgaatacatgcttactgaaggcacaagtgtactttcttcccaacaggaacccagattgtattttgctcccaagatctgcttcaggctccaccttctccactggcaggatggatattaaaaatatttaacaactagttcagctcaggcaccaaccactcccaatggacactggccacagcactagaggagggtggtcctggaagccccttgagagtccaagcattattcttttgtttgcttctt

SEQ ID NO: 1881676 - DNA, 4001 bp, Homo sapiens
gatggctctcagctcccctcccgcctacccagcaacaagagctgggtcacctggcagaaaaccctttcgaacccaatccccttcctgccgtgtcccctggggccgctgcctgtctgtgcccaggacgggcagggtggggcaaagcagctggtttatgtcttggagctcaagctgaacagcggggcatctgcccccagcagattctggctgaggcagaagggggacaacagagatgcaggagtgagaaccgcagccctggcagcgcccgtgggcaaggtcatgtcctggcaggcagcttggctggttccaggctggggccagcagactcacctgggggcgtctcggagctggggatgtaggaggaggcgggaaccacgctgggcgtggagggaaggtagctcgtggagggcagcgcaggctcattgttcagggacccaagtttctggaacacagagtttaaggttccttccagaagaggccatgcttccggcatgtgctaacacatggcccgacccggagctccactgccacaggctgtggccccccgagctagagcaggaaggcgggggccactctcccgagctccctgggctagacaacgggacccctggcccctggcgccccagcagagttggggactgagccgctcctgtgtaggagaggggaggggttgaggagcccaaacagcccatcttgagcacagaaggagcgatgctttttcttaccacgaagcgttgatataaaggaagatgctcatgttaagaaacacagaacacgcagcggcgggaagaaaggagcttattatcctgaagtgaccccacagtgtggcctcctccaggccctggcctcagacgacccactgcagcctctgtgcacctgccgcgccccgtggctgcctcccacccgcaggcagggcctggtctccgggacactgaggcctctgaccacccagcacccccacaggcctgtcctgcacccattcacggccacgtgcaaggcttaggtcccaccagccctgcctgacgggacactgaggcacagggttgaggaggactcccctggcagcccctccagcaagcgtggggcaggttcccgctccaagcctgagtcagatgcccatgtcagggcacggcccacactgcctctcatgtacatatacgtatatatacataaatacagactgcacacatatgtacatacatatatatattctccgacagagcacactagtggccacaatcggaacaaaaggggcacccgcagtggtgccagacatggggtgcagccccgagccctacctgcgtggacaccaggccggctgcgtagtccggggtggcgttctccaccaccgtttcctccttggccggcttctccaccacctccgcatctgtggacaaaacaggagtcctcgccagtgcccgggcgcgtctgcagtgtcagctcagggcagcggcagggaatcaaacagcttcccaggggaggccaccaaggagcgaggagaaaagcaggcacccacccacggagagcagcctcacggggcacagccctgcccgccgagcgtgggcacaacccaccccaactgggcagggcccgcagggacccccattgccgccgacacgcaggccccaacccccaccgagagtcttccttctccgcttcgcctctcggccagcgccaaccatatccagctcagagatgtccagcagctgccaagacaagcacagccctgccttagtgacggcaccagggcgcaacgggccccggggtgccacaggagctgggggacgggcctaccttcacacctcgttccttccgcagcagcgtcctggaaggcgggatgggggtccggttccctgtggggctgaagacgctgggcgccgtggggcttctgaagggcgcctgcttcgggatgcctttgagtggggctggaggacggcaacagtcagggcgccagcagcagtgaccggcaaacgtcccccaccccgagctcagaacgtcccaccctcttctaggctagcgccgcagaggggaagggccaaacccctggcgggcagcgggcaggacccccaggatcccggacctcaaggagcaggggaacgcctggagccacgacctcacactttgccaagacaccaaacaaagacagcggcaccccagcccagccacaggatctcaccaggtggagtctctcaccagtgtggcgggggctgagctctgcctccttcctgtgcctccaccggcaggggcatgaagccaggcgcctgggcttgagggccgccctcccaagccttctccccgtcccctgaggacactcctgaggcctacctacgctgttacccaccagcgcccacacgcaccctccaaggcgtgcgtggctctcatggtgccaggcccggagagaggacgcccgggggatggtgccatcagcacaccgggccaggctggacacactgctcaacggctggcccaccctccctgggccagcaggtgcagccctggccctgggatgcctggtgggggtggaaagacaagggtctgctccaggcggggtagaggagagcaaggtggaacctcggctgcggtgggcaggaacatgacccagggacggccccccacacagcgacaatagtcagcagacccaagatgccttctactaggtcccatgtgaacactgtgggattatgggagcccaaataaactaagccaggctggtctgggagctgcatggagagcgcctgtaaggctgccctttcagccccacccatctgcaagtttacccagctgtctcagcacaggacgacacccgtcctgccctctggcccccaggtcactatccagcaccctctggggtgagtatgccctgccatggttcccaggggcacgccgtcttcctgtgatcagggtgcatcctgcttaagctcacgcccagccctgagagcacaaatcaggaagggcagatggaggggtgcggggggcacagccccacgggcagctgagcacggtcacgtcctccccgcggagccgcccagggacactcggaacccaagagcagcacttggggccgaaagcccgagctgggaaggccgagagccaccggtgccaacagcagaggagcaggggccagcactgtcctcagatcccggccttcctgtctccatgcccagcggtgtcctcagatcccggccttcctgtctccgtgcccagcactgtcctcagatcccggccctcctgtctccgtgcccacacatcctcccagggagctccccaaggggagaagccggtgaaattgccccagtgccttcgctttcccacgggctcccaacactgctgcctgaagaccattcacaggcaccacctccccaacagggagcgggtctccaggtgaagcccttagctctgccccaaaagcaaggctcacggcaccagggtgggggccttactggtggtgtccatcttccgcagcagcccccggcccttggcgtggaagggcaccccggcgctccgcttcaactgctgggcggtctccgtggctggaaggaagaggtcacatatgtcagggatcctcagagcgagagcccttggcccttgtaaaaacatctctgtcaagtggattcatccgacggcctgagccgtgaacgctgcattctctctaaatgagcagctgttccgagccgggcctgacaccagctcgcactttacaacgagtcagaaactcactcaggtgagcaagtttcgggagctgggtggctgtggctgcacctcccaggaccccatggcaggggggaggcagccgaggaggagctgagggacctcatgagccctctccatcgacccgggcctccccctggcccagtggtagcaccgtcctcgctgagggtcagcaggcacggtctagatacaaaaatatgaggaagaaacaaacgaagagatattcctgacttggttcagtgtggctgaagggtcaggggacaccgagtgcccaaagcagaccctgtggccac

SEQ ID NO: 1881677 - DNA, 4001 bp, Homo sapiens
gggtgtgtggatactggagggtgtgtgggtactgaggttcgctttctacccaatatacatcgctttcacgccagcggaaagtcacacggtcccatgtcagaagttggggactgcctgaatctgttgactggcagctcccacccactgtctctggaccactacgctcttcttccagttttctttttttttttttttttttttggagatggagtctcgctctgtcgcccaggctggagtgcaatggtgcaatctcggcttactgcaacctctgcctcctgggatcaagtgattctcctgcctcagcctcccaagtagctgagattacaggtatcctccaccatgcctggctgattttttgtgtttagtagagacggggtttcaccatgttggtcaggctggtctcgaactcctgacctcaggtgatctgcccgcctcggcctcccaaagtgctgggattacaggcatgagccactgtgcctggccctcttcttccagttctgatgtctgcatattccatacctagggggtctcacgtctctaagcctgaggccaggtgccctgcccgtcccaccagatatcctcacgagattgacagtagcacgtcagggaggctcttccttcgaccacggactaaggaacgcgagaagaactcttctgccccatcttgcagctccagaggagtaaaaagggaaaggaggaagaccacctctgccctggtccccacccaccaccttcccttccacagaaaagctgcagcagggtcgctgtctcctaaccctccctcccaacgggctccgagaccaggcagcagagagacaagcagagacaagcacctcccaccagacatgggactccgcccggtcccacagcgagaggacacacagaaagtgacagaaaatgccaagccacaggcaggttgggggtgaagtgcccccaactggggcctcccctgtgctgctgcagcagttaattcagagctttcctcacccccactcccacctggccagaccacccttggctcccactatcccacctctcacacatgcctcatgtgctgggattggaggaaagggtcttattcccttcggaagtgctgggtcctttctaggggccactgagtcctctgggcagtgcctcaagctgcccgggggtttgtattatgctgacacgcctctgaccttcgagggtgggacgtgagagacctcaaaagagaggatggggcctcaaggggctaggaatgtgggaccccaagcagcagcaggccctactgccggggacacggagtccacaccaccttgtgttcctcccccaaggcagcgagtcttgttctagaaaacttcctataacataaaatcaatagcctcccttcctgtgcagaaatcaggtgcactgataatataaactactctgcacatagtccagataatgccctatgtgtaatataaacaggaacagaaaagcagtcaataataaaatatagatttcactatgacgccctctttggaggggtggcaatgcctgctgggaactaatggaatggggatggctcccgggtttgtcaccgccataaagtcctctggcttccctgctggggaacagggactgggccatgctcaccactgcctagcaccatgtccagcacatagtaggtgctcagtaagtatctggtggagggatggatgaatgactgaatgatgaactcagtcccgggtgagatgtgcagatggtgttgtgggtgagatgagtttgtgatcgggcccttgcgaagccaaagaggtgcccggcgggcaggcggcggcgggatgcgtgtgcgctcgctctgtcggcgtctctgcctctctcagctccctgcacgcttctccaggtcaggggctgctcttgtcttctctgtccccctcggcgccccgctcagcgtctggcacagagtgggtgctcaataaatacccgttgaatgtaacgcatttcaattcaacagacatttattgagtgcccactgtgttgggtgtcacaatcctaccttccttgggcgcgctacagatggacgtcccggggtgcaggtggcgtgccttgctgtgtgcaaatgctttgttcagtaaaagctgtgtgcaaatggaactggtgcccacggactcaggtctgggggctacttggtgacaatcaaaagaaccccgagagaaaaaaaagggtggctccctctcaatctccatgtgctccccttcccgcctggattcctcaggaggccgcagacggcaaggctcacctgatccaggcacagccggcagtctgggtcctcgctgccatttccatgcaaatcgggaaacaaggcaatgccatcgggacagaagtaaaggcacaatcagaatggttagacacagcgggtttcctgctcagaggaagtggatgttagcacaccaggagaaagcgaaggaaggacagcatcatagccacatcttcataagcaggcatggccaggggaaggacacatatgtctgtgctggagcagaatctccccggggaattcatgagtgcagcacgggccattggagtcctgcagacccagcatgccaggatggaggcagccgcagcctgcgtgcatctgcacaggcagcctgggagaagaatgtgacgacaaggggtggggctggcacacatgcccttgccgctgagtgaccacctgacatccacacacctgacatggcctctgggcctcgcaaggctggccacccaccaggctcgtgttctcctggggcaactccagggcacctacattctggcattttcaaacgaggaagcagtgcacgaggtgaaggccacatgtgcaggtcacagagagtatcaggggcacgggggtcacagggggcagcccgtctctagtccggcttctcccacacagcacccccctctcttagtcctgagccacaggcaggccacaaacgtcagtagaaattctggggacagtagttggcctccctgaagagtctgtggggaggtcatcaagtgggggaggtcatcagtatggccccagccttgcagagttctgccggccacctggcaagggaagaactgaacactgaacgatgccaccttgagatccctaaacactgatttcctggttcccagggcaaatgccttgatgccgggacactgagcaaagtagggagggtgctggggaagctgccgagctggtgcaagaggagctctcctcctctaaacacaacggcatctgacacgtgagtgcagggcagatgggccatgagccaggccaatgttccctggcccgtgggcaggtgctacaccagccaggggcagggattcctaggatccgagagagagggaccggaggactggcatgcagctgcccacgggggcacaggcaggcgcgcgtggaccagccccatagcccccttgccctgcctgcagatgaggtgggcagttcctccggaaggagcaggctgccatctggggtgaacccctctccctctgggggatttttgcagggggggggtggctttcccatggtgacatcagccttgtgcctgaatgctgggatcctggtatttacaaagctgcaccccaggcgggggcagaggcctgaggggtgcacagacacctgcttacagagatcatacacaagcaacacacctttctttgtttaaagtgattctttaacacatcatcatttccaagcttctgtgtcttcactctttcctgtcacattgaaacacttttctactttcattgttaagtaggacggtttacagtttgcaggcatgaggatgaggatgaggatgagaaacagtttctgtttactgagcagctactatggccggccgaatgccacacacatacccagttccagtctcctaacacctggcgcccatcacacgacgggtcagtggtgagctcagatttgaacttgggactgcctcactgcaaagccaggtctttcttctgctctcacacccccatccatcctctcccagcccctgcttcgaagctaa

SEQ ID NO: 1881678 - DNA, 4001 bp, Homo sapiens; identical to SEQ ID NO: 317112

SEQ ID NO: 1881679 - DNA, 4001 bp, Homo sapiens; identical to SEQ ID NO: 317137

SEQ ID NO: 1881680 - DNA, 4001 bp, Homo sapiens; identical to SEQ ID NO: 317149

SEQ ID NO: 1881681 - DNA, 4001 bp, Homo sapiens
accatcctaagttaccaataatatatttaaaatcctaaaagatgaacatttaccttgggggaaagtcatgttgtatcactactggctatgtggagaaggtttaggtctgctagcttctgactgcctggatttcaaagccaagttatcttgcttttcaagtaggggagtctctctttctgtctctctctctctcacacacacacccccctccaatgcctcaggaaaggacaaaatcaaaacaatgagaggagaataataaaaatacatagattaggaaaagaataatggtctctatttccccatctctaattgagggctggactacaggctctgcagttgtgattttaagtacccaacgttctgaacaatgacacaacagtctgccacttttacctcacgacaggagagcagagggaagctaagagaaccttctgccaagctagaaaatgtatagccaggcagtggttggcaatggagggaaccctgacttggggatgaatgacggtccccataaggcacctgcaaacgtaagctgtaacccttagagaacccagaaaatgatatctcccctggaacgtttgcgttctgctcggctatgtctccaaagcttcagatctccttccctgaccttgcgtttcctatttcttccctctaagccaagctcagcatgtccctattgttatcaaatcacatctgccatcacttgctgtagctgtcgcactgcctgaaagcctggcttgcacacttgcctctccgactttatgtgatgagaagttctctattccttttcctgatctagtgcctgaaaaccgataaggcacaaagcccactccttcccttctaagcggttagcgtggggcccgttgtaccgctcaggtttatctcagcataacactagctcactcaccaaagaggctgagcactcgccaagtttaccttgcctcagcggatgaagtatcaaactcactcttgttttgcttcaaccatcaatctctccaataattgcaatcaaagggaaaacattttaatgttcactattttagtacccgtttccacgggccggggggtctggaaatcccgaggatgagggaaccctaccagtctccatctatcgcagccggcccggcgcagggtctccgctgggcatcaacgagcagggcctgggtatttcggccctggccgggccccttgctcctacgtcgctagttgccctggggaggcgacctgtgcctgggaggcgggaaaccccgcggcaccagagaagccaagtgaagtcccagaagccaagtaaaggtgagagaaagagggtggaggagagcggtgagtggagccagagagaggcgcgcatggcgtggaagcggccgggtgcggggccgtcttacctcggcaggcgcccgcgcaccaggcgagcagcagcagcagcagcaggagcggggacgccgcggccacctgtccggcgggcgacctggggcggcagctctctgttcgcagcatctcggcggctgcgggaggctcggtgctagggacgctgcgctgcgccacgcgtagctggtgctccacctggtgccctggctgtgcctcggggcccggacacaggactgagcgcccggcgagccgccaacttttaaatctcgcgcacaagtgggctgggctgcgcggtccccgccgcgcgtcacctcgccgcctgccgcccccggcctacctcgcctcaccccgccccgctgcctgcccgcgccccaccctgcagcaggacccgagccccctagcctgagtttctgacccgagtaccacgcattttcgctctgggataaagagaatggaatttaaataatgcaccattcccacctttggaaggactggactgggaacagggtgtggatggcaaaccaggccgtctgagtttttaaacttggtagtggcgacgctctctggtgtcctgggtctacgtgggacaccctttctccttcacctcttccagagctccggcagtcactagtacgcacctctgtggaagcacctctgttttgttccccggtttatccccagttccaagcgcaatgcctggtgcatatcagggcagtgttggttcaactgtgatgttgatgctatcgaccctcccccaaattcctgcaaaatcacagaccccttagggaaatgcagttgcctgttaataaaggacaaagaagaaaggactgctggggcttgaccacacacacacatttctaactggtctggagcgctggttatcctacggatttccaagcctaaggaaactcctttttctatgcatttctgctgctattgcatcctgatttctaccgtgacctgactccctctttccatctctatactttcctttatttccttgattggaaacgttcaggaagcagcctcttccaggacaccagctaatacatcctaatttccttctatagaaagagggaaaactggtctttattattattattattattatttcaagttacggggttacatgcgcaggatgtgcaggtttgttccatagctaaacgtgttccatggtggtttgctacacctatcaacccgtcagctaggaattaagcccagcatgcattagctatttttcctgatgctcctcctgcccccgcaccgcccctccccgccccctctcccccgcgccataggccccagtgtgtgaaaaccggcgaaaaccggtcttatttgacctccctttgaaaggtgaggaacgctgaggaaagggcaggaagtacattaacatttttgaaggggcatttttgcgtcaggcattttctcatgctattttatttaatattcatggcatctctgggatgtaaaagtactgaaattctcattatgatgccaggagagattaaacaatctgctcaaggctgtcagcatgtaaggaagccactggctattctactccaccaagatacttctccctcaatcaagagttttaatgtatcaggcacatacagttcaacctactgtaaacaagacccgagctttggggatacaagatttagtgacagttacaatttggtaaaggaccctaaacccttactcaaatagctgaattacaaggcagattgggatagtgctctgtcagaaatacgaagagaggcaggagaaaacctgatagattaggtaaaaaaaaaataatggccaccttctttaagttctttatacacaggaagcatgtaagaaaggctggattttagcgtctggtccaagttcaaggatgggtgagaaaatactggattcaaggttcttgtactttgatttattaccaaagtagtaaaaaaaaaaaaaaaaaaaaaaaaagaaagcacaaaggatgtaaatgacctacagatgcaagcaagtgaacatggctctgcttccccgtgaccttcttcctggtgtctcccagaggtgctctgaaagatcaccagtcccagcagccagtgtgagagtgaaatgtcagccagagcagagaagcctcaaacagtgggctcaatgttttttatatccccagcagctcagcaaaataagcaacttgtgtattaaaggtttttttttttcttttcctgcatgaaccaggctgcttggaatgttcttgtacatgccccctagtgtacatgtgcaagagttttctgaggaatattcccaggagtggagttattaggtcacaggggatgatctagctaaactctgttttacattgttttccaaagtgttataccaatttacattcccaccaaccatgaatgaagtttccatggctattcattcatgcaaaaacctttgtccgtctggtgagtgtgacttcttttctttttttttttccgagatggagtctcactctgtcacccaggctggagtgcagtggcacgatcttggctcactgcaacctctgcctcccagttcaagggatcctcctgtctcagcctcctaagtagttgggactacaggtgtgcaccaccacacctggctaatttttgtatttttagtaaagatga

SEQ ID NO: 1881682 - DNA, 4001 bp, Homo sapiens
tgccacttcctcgtggtgcaaggcttgttgggacctgccaccttgctgagggaggtgctgaagtaggtggtttccctgttccaatgcggtatgcggtcttgcaggccgaggcattccccaggggatgacggagcccccgctgggctacaagccagggcaaacactgaacttgtgtccttagccggcatcccaggaaagaaggccggggtcaagttcacacctcatgagatcacagtgaccagccctgcccaggctgccctggtacgtgcctgaagcatcgcggaggtcacatctagccacggtgaccgtggtgagatgtaaggattaaccagactacgactggggaggtgaggaaggtgacaaggacccagttccagcttctaacggggtgtgggatctttgagcaaggaagaagatgctagggagaatgagtctggctttgttcttgttgggaggtgttcaagccatggctggaccagagcatgagccatcctcagtgtgagaggcagttactgccgcggttgggctgcctggtaggcctggagctcaaaatgagtcagtctctctctggaaagcgcaagacagagacagcgctggtggcagctgggctgaagccagcagcttggagatgaggctcaggccctgacgggggaaatcttacccagcctccccagatggctcagagacaggtctggcaggtgcacggatccacaaatctagaagagtctggggttgtcacatccaccaactaggctggctgtctatatacactttgtcactgtgtaggcccaggatttcacccatctacaaattttctctgccacacggctactgccactttaattcaccaagccaagcctttgcactcaggaccctggcccaaccctctttggccaagcaaagaggaaacgagaacaggacagaaaaaaaagtgggaccggaccaggcacctggctgtccattgaggccttgctatgcgatccaggacggaaggtgccggcagcaagctcatacactctagctgcgtgtcatgtcattgaagagggcgcgtgatccagctggaagggtggataaaagtgtaactgcccagtgggttcaccttccctgttacctagacagccaatttatcaagaaagggcatttgcaacagagaaaaggtaattcacgcagagctagctgtgtgggagactggagttttattattactcggtctccctgagcatctggggtttggagtttttaaagataagctggtgggtggggggcagccagtgagtcagaagtacccattggtcaggtcagagatgaaatcacagggagtcgaagctgttttcgcactgagtcagttcctgggtgccacaacatcagatgagcctgggtggtgccaggtgacccaccaagtgctgatcttaggctttacgatggtgatgttatcgccaggagcagtttggggagggtcagaatcctgtagcctcccgctgcgtgactcttcaaccgtagtttctaatcttgtggctaatctgttggtcccacaaaagcaggctaatccccaggaaaggtttcctttgggaaagggctgttatcatctttgttttaaactaagttcctcccacagttcaacctgcgtgcagcagtaaacaaggagggcatggaggttagaagcaaaatggagctggttatctcactgtcggcaaattttgcaatggcagtttcatagagatgcctgtcctctgggaaaaaagctaataacaggttgtctttttggctgcaggtggaaaactgcatctattaggaagaggtggggctttgttcttacccacaattggaagttctctatggagtaaaggcggtatgtgtgccacctgattcctttccccatgtgtatctggttagggtcggccacgtgagatccgcaagcattttagaaggtgggaggggaggtgggagctggctacaggccaggcgttggcgtggttccgtgagtgtgctccagccaggcccaaagcttctcctgcccagagggaccgtttcctccagcgtgggtcgggtgcttctgcgcccggaaagagcgccagctcctccttcgggtgacccagggagcggggctgcaggcaaaggcgcaggcggccaaaaaggtgccaaccgggtcctgtggctttcagttgtctctgcccacccaattcacaccatctttccccctcagccgcctgtcctgggacttcaggctcagcaccaaacgcagcaaaagtaggtgcacagagagcggggtcagctcacgcagcccgagcagaatggctgtgctgccgccccaggcccgcggccaccgctgtgtgtgtggcaggagtcagccccccagcgtggggccccgaagcccgcggtccttccacggggagggccaggcccgcagggcgcagacgatgggggacaggctgcgccagcgctcgcctgaggccccgcacacaaacctcaggcccatgggtccgctccgcggggcaggcgtcgtgggcccaaggaggccaggccaggagtctcggcctcggggttacgcggcggcgggcagctcttccgctccgctcagggtgctgctaacccacagccaagcagcgacccgcaggaccggcgagaaccccgccactgactccggccggaagagaacgtgcagagatgtacgtcacttccggggcgtggcgtggccgggcgtggccgtcccgcccctggcggcgtgcctggtgccctgttccgcgtctgtgcgaccgtccgtcccgagcgcgcagccgcggcaggtgcggggcgggaccgggggcgcccggggtggggggcgtagggggcgctcgggttgggggtgggacaggggacgcgcggggtgggggaggagacgggacccggggtacgcgggggtggggcgggtgagaggtgcgcagggtaggggagtagggggcgcgcggggtgtggggctggaccaggggcgcgcggggtgggggcggtgggaggcgcgcggcgtgggggttagagggcgcgcagggtgggggacgggaccggggacgcgcagggtggggggcgggaccgggggcgcgcggggtgggggcgggaccgggacgcacgcgggatggcggagtgggaggcgcgcggggttgggggtgctcctgcgtccggtgtgcaccccatggcccccgccagggagaccgagtccgggccaggggccggaatcgcggggcgcgggccggggctggggttggggttgggatcgggatcgggatcgggatcgggatccgggttccccgcggcttcaagttttctctcgctgttacgagggcgtgggaggcgcggccgtggggtggggtggggccaggtccgcgatgtgctcaccctggtctctcaggaccgttgcctttgcggctattttttgtgcaatccccgaagcctgcgtttcctgctgcctgggttcggggcgggggcatcgcgcaggccagaacggcccctgcgtccgtaggccagagcccctgccatcagcccctttagggtgctcgccggctgtcgggtgtgggggtatgccaggccccggaggactcggcttccccgctaacccgacccgccgcaccccacccaggccaggtcagagcagcccaccatgggatggggagggggtggaggctgcaccccgcgcccacccatccaccagcagccgccggagcgccgcgtggtcaccgttgtctttctcggcctcctgctggacctcctggccttcacgctgctgctgcccctgctgcccgggctgttggagagccacggccgtgcccacgtgagtccttgccctgcggcccacagtgccccctgccccccaggcccatcagacctccccagcccttatcgtgattcctcatcccctaggaccccctctatggctcctggcagggcggggtggactggtttgccaccgccatcgggatgccagtggagaagaggtacaacagtgtcctgttcggaggtatggctggctctgt

SEQ ID NO: 1881683 - DNA, 4001 bp, Homo sapiens; identical to SEQ ID NO: 317173

SEQ ID NO: 1881684 - DNA, 4001 bp, Homo sapiens; identical to SEQ ID NO: 317178

SEQ ID NO: 1881685 - DNA, 4001 bp, Homo sapiens; identical to SEQ ID NO: 317185

SEQ ID NO: 1881686 - DNA, 4001 bp, Homo sapiens
atttcctccactttatcggttgatagacattgtttcaactatatggctgctatagatgtttgaaacaagttatgtttttattgttggatatatacttaggagtagaataactgggtcatatggtaacctatgtttaacccacttgaggatttgtcggactgttatccaaggtggttgccctattttatattcccaccagcagtgtatgaaggtactaatttcttcaaattttaacagcgattgagaattactatattttgtaaatggaaataccactactaaaaacacaatgctataaatagaatgatgtcttttgtttccaaagttgatatactagagcaatgtaaaaataataaaagcgagatatttcatggcaaaattatcacaggttaaacgctgcagccacaagcaccaccagtgagtattttcagggcaaatgggaaaaggaccaagaagaaaaagtttaataaatttaacttgagaggccagaataatagtaatgccactaacaaaggaagagaagttgggaaaagaggcagatttataagggaaaacaatcagttttgaacataatcttaaagatgatgtccattgaagacaactggtgacttagaaaagtgatgcagctgattctgatgtgatggatccattcacaaagttaataaggagaagctgggcatagtcagggtattcttaaacactgaagttacataatgtcatgctttcagagcaatgacagacaaaagattggattgttttcattcaatacgataatttattactttttatatttttgtaatcttatcacaacttctactgaaacctgagaagtatcttactagattctcagagactattcctggaacacagcaatactcaaactccttattgacaagtggattatttgaattgtgcagatctctgagaaggtgaagatacttttcagaaacatttgggcactgagtctttctttccctggatggtatgtggcattgcagatgctgactttgatacaaaatcaataaaaaaatgcaatctgttaacattcatttaagtaaaagtgcatagattaggaaactgttgcagacactgttagtactctacccatctctaattgggtttctttgccgttgtcatatgtgtaagctcccagtcagctttcattcctaacagccaacacctgtgtctcttggtagacggatgctttcaaacattcagattccatttttctacgtgcatggagatctaaaattgcctaggaatttactcctctacctcaccactatgggtggtgtataagcaatgtctggtcagagatgaataactcaactctcttgccacttgacttcggagaactgacaaataacccacattttctccagagttcccctatgggattaaaaagattttctttaaaattttattgtggtaagaacatttaacatgagatccaccctcttatcaaatttttaagtgtaaaatatattattgttgcttcatataggattgaatccaagtcctgcatgaaacatagcatgacttgacacccattcctggcatcttttccttcctgatcccattttcctgcttccctaaacaatttttcctgggaacacttcctactaaaacactttcacatgaatcctcatttcagagcctaaaaccaacccaagtcagaaggttgattagtttttttatttgctgctataataggtaaccacaaccttggtggcttaaaataacaaaaatttattaacttatagttctgaagtccagtatgggttaaaaccatgtcactgtactaaaaccaagacgtttcaggagtgcattcctcttacaagactctgggggaaagagtgtttccttaccttttccacgttcccaaggccatccatgtttctcagttcctcactctttttctccattttcaaaaccagcaaacggtagtagatttcacagcacatcgctctgacttcctcttctgcctccctctctcactttaaaggcccttcctgattacattgagcctacctggataatccaggccaatctccttatcttcaatcagctgacgagcaacttcaattctatctgtaaccctaatgctcctttgccaggatacttaacactgttcttctcttccttcttcagaatctcacttacaataagttttatttaatgattctcctccttatactttctgtctcaccagtttcctctcacactgatttacctgctacacataaatattcttattgggcttatgtgccttttcctccacttattcaacctctcacctggatagatgcttctgcagaaatctacactaacaatagtgtgtggatgcctggagccacagataactgttgccctgcccaaccaggagaataagacactgcatttaatgttactatgggttataaataccaccctctgtgccttggacatgcacctggttgtatacatctagaaactcaagtctgggctgcttatcttcctgaaagttcagctacagataaaatgagacatttggtctctggcctctccctttctcctttaaaacaaatgaaaggaggagtaatgggagatacccatactttccatataaacctgcaggaaaaccgtgccctaaaaattttgagggcccatctaaaactttaatttgggaagattgtgttaactcacatgcagtaatattaaaaaatgactcatatggtttagtaatagactgggcaccaaagggctatttaaaaaacaattgctcctctggtggaagggaatgcctggaggctacttattttatttcttatcaagagaacgagaatcatcattctactttgcataggaggatcagctcattctttcccttaaaatgggtagataaaggcattacaccccccaaccccaggcctcatatgatactccccattctgagcccagaacacccagaactttggaaattggctattgccatgtctggactgtgagtgtgggaagggaaaactattctgactgttgttcccactaccatcccactcagtatcaatgtagacccagacattctgctttacttacctccaacctgactattcccatacagagctgtgttaagcctccttacatgccgttagtaggaaatatcaaaatttggacacataatcaaactgtccaatgcattaattgtcatctatgcacttgtattaactcccattttgactccaggaaaaatgtaatgttcgagctcgagaaggaatctggattccggtaactttacctagaccttgggaatcctccccctcaataaggaagtgctacagcgaattctaaaaagatctaagagatttgttttcactttagtcactgttatcatgggcctaattacagtcactgcaatggccaccactgccggaatggcattacaccaatccattcaaacagctcattttgttaatgattggcaagccatttccacccaaatgtggaattctcaacaaggcatcgatcaaaaattggcaaatcaaattaatgatttaagacagtctgttatttgggttggagatcgggtagtgagtctcgagcatctcatgcaaatgcagtgcgattggaatacttcagatttctacatcaccccatattcctataatgagactgatcattcatgggaaatggtcaaaggacatcttctgggtagagaagataatttatcattggacataactaaattaaagaaacaaatttttgaagcctctcaagctcacttatccattgtgcctggagctgaggcgttagatcagatggcagaaaatctttatggattaaaccccatgacttggattaagtctactgggggctccactgtagtacattttggaattatgtttctctgtttaatcggcttgtttttagtgtgccagaccagtcaaagaatcctgcatcaaaatcgggagaacgaacaagccttcatcgccatggcacatttatataaaaagaaagggagagat

SEQ ID NO: 1881687 - DNA, 4001 bp, Homo sapiens
ataaaaatagcatgctgttgaagacttttaaaggcctaattttacgttgtgcacatgtaccctaaaacttaaagtataataaaaaaattacataaataacgtttgttatagatgtaagttagggtggttttaatctatcttccccaggtaaataactgtataattatattttgataatggccagcaggtctttacattcttcaggttttctcttccagatatatgtactatctcttggtctatagatggcactctagctatcaggataccatgaaaaaaaatctgggatattggaaagggcacatttttttttgaggtcatcagggtgctcaatgcaaaccatggttgaacacttaaagatgtccagtagctgcttgaagatttcctgataaagagctacaagcaccatgttctgccagcagtcataggcacttggattttctctcttcagatttagcttcttctccttttgtcaaactgcctggacagagatgcaattgctcctggtcctagagtctgtccacagccctcaactttctagttgttatctccccagagataatatgagttgtaatcttccaaagatgctagatgtctagaatcatttccagaatgctccccggaccatcataaaaataaagcacctgctaattccccccaggactcaagtcatgcctgttcatgtatcttccattcaatttgcagcatatctgtggtttaggacagtctttctcgagtgatccatagtgaaggatgactttttgtttgttttattttcagtgtattgtggactggtactttgtgtaaaatataataaaattagttgttagaaatgtaaaatcgtaaataaaaacagacatacaaaatacaaactgcattttttattagtagattcaaaagacaaaattactctgccaatgtgctatagtagtttcttttctgacatttaaaattcagattaaactttatttaaatcagaaacacaattcttaaaaattgcatttagagtcaagatcccttttataaccctcttgttataaaaatcagaaggaatatttgtaagtaaagcagatatctctctaggttaatgagaccagatttgactttggattttgtactttaaatagattctagaagatagatgaaaaaatatgttatttacagaaaaccgcatctacctgtgtattcagaggcataaattttttgatggaaatgacttcagtacacgctggaatctcagaagcaattttcaaagagcttagttttattttcttggattctaagaatttctaaaatcctttttcatcctcaattttgggagccaaataatactttaaatgttccatatccggcaatcttatactctacagcaaggggtgcatctgcagacatactgagtgttactgggaagagagagtggagtgcctgttataaagaaatttaagtaacttagtgcaaaagttagctgaactggcccattcatcattatggcaacagcctcctcttctttattgtaattacttgtttgtggcaatgtttccatgtccaagttctccatttgcagaaaaattcactccatcttttgcacaagaaattatagcagactctccaatatgactgagatcttggcatatatgaacaaattcactagaatgcatctttattacacagctgtactcttgttctggaatttcaagttgctcaacatctagagtcattaacttcaattcacagtctaaaagttctcttgatttagtgcttcaaattctagcaccaagagatccatagtaccttcagccctccatgtagtgatgtcttcactgccattgttgtattttagcattttggacatgctggtgaggctcatgctcatggctaggttgtggtcacagtggtatgtgttgaagccctggtcacacagggttagctgcactaaggaaatgtgtgatactttcatgctgtgtaggttcacctgcttgaactgttgtcccagcaggcctatctctcacattgaatagggctgactgtgcaactaataagatgttgtggagatgacagtgtgtgacatctgaggctatgtcataaaatacattgtgacttctcactgtttctgggagaagtcagctttcatatcacaaagacactcaagcagcactgtgaagaggcgcaggtggtaaaactgaagaccttcacaaacagccagcactaatttgccaaccaaatgacggtctttggaaaacagatcctctggcctcaggcaagtcttcaaagactacagtcccagtcaacctttcactgcaacctcatggtaaaccccgcactggtacatcaagctgctcctgaattcctgactcacagaaactgtgagagaataaatgtggttgttctgggacactaggttttggggtaatctgttatgcaccaatagataacaaatagagaccagtacataaatcaatacattacttccatctgtgtgataggtgttatgatagaagtagaatacaaggtgtggtacagacagagcggatctgaagtagtagcctgttgtcttagtctgttttgtgctgctataatggtatttcacagactgggtaatttataaagaacagaaatttattctctcacagttctagaggctggcaggtctaaaatcaaggcacggtcaggttagggctcagtctctctgctttcaagatggtgccttgagcactgcatcctccagagaggagaaacattgtgtccccacatggcagaagagcaggagaggaaaggagacaaatgagaattgggctcacccttttataatagcattaattaattcatgaaggtggagccctcatgagctaaacacctccttttaggttctatcttccaacactgttgctttggagatgaggttttcaacaagttagctgaactggctcattcatctttatggcaacagccccttctttattgtcattacttgtttgtaacaatgttgccacttccaagttctccacttgcagaaaattttactccatcttttgcacaggaaattgtaattttggggacatattgaaactatggcatctaccaaattagtaactctaccgagggaatgctacaattcaagttttcatgttttccacaagcctgctataaattattacttgttgattacaaaataatcagcaaaatacaagtatttattcctttgtacatggaagcaaccaaacactttttttttggaatgaaggtctacaagtgatgacaatctatatttgtcttcctggttaagtacaactgtaaccaggggggtggactcttgaattcatgtttctctttattttttcaatgttgagaaggtaaccaacaatacatgtggccaaataaaaagctttcacataaaacatttcaaaaatttttaattcattgatcctctccttccctcacccccaataaattttttagttaactgggatgcctcctcattcacagaatgaaggacccatgctagcatttgggttactttggtggcaatgtcagctcagactctgcatctgagagttctttaaagatatgggtatttctggccaggcgtggtagcacaggcctgtaatctcagcactttggaaggccaatttgggagaattgcttaagactaggggttcaagaccagcctgggcaaaatagcaagatcctgcctctacaaaaaaaaaaaaaaaaattagccaggctttatagcaagtccctgtagtcccagctacttgggaagctgaggtggaaggactgctcgagcccaggagtttgaggttgcagtgaactatgaatgtgccactgcactctagcctgggtgacagagtgagaccctatctcaaaataaataaataaataaataaataaataaatacaagcatttcccctttccccatatatattaatactggtttatcagtctagggaaggtctgagggaattgataatgtatacaattactgtgtgttgggttctttctg

SEQ ID NO: 1881688 - DNA, 4001 bp, Homo sapiens; identical to SEQ ID NO: 317205

SEQ ID NO: 1881689 - DNA, 4001 bp, Homo sapiens; identical to SEQ ID NO: 317208

SEQ ID NO: 1881690 - DNA, 4001 bp, Homo sapiens; identical to SEQ ID NO: 317209

SEQ ID NO: 1881691 - DNA, 4001 bp, Homo sapiens; identical to SEQ ID NO: 317217

SEQ ID NO: 1881692 - DNA, 4001 bp, Homo sapiens
acttattacaatctgggatgttgtcagccctcatccccagaattcagtccaggaggcaattctgcatcttcacaaataaagaataaaataaagttaggcctacaaatgggcaatgatagctggctgtattaacagctgtcatagccgactctaagatgagccccagtgatccttactccttggcgttcgtgtccttggactcctaccctgaatagggctgacctgtgtgaccagtaggatattacagatctgatggcacgtgacttctgaagctggcggtaaagagcactgcagcctctgctttgttttctttcatcacttgttctgggggaatcccgcagctgtattggaagcacccatggaagggaactgaggcctcccaccaacaaccagccctacctggcaagcagtgagtgagccaccctggaagtggatcctccacctctacacaagcattcagctgaaggcagacctggctgacatctgaacggagcctcatgagtaacccgacaccagaatcacccagccagtgctcccacatttcggacccacagaaactgtgagagatgatcaatgtttatgctgtttgaagccactaaatttgggggtaatttgttctgcagtaatagatacactgaacagcttttaaagctgcgcgatatgggctttgggtcacgtcaaccagatacagaaaggctttagggactcaagaaacactttgagtaaacttgttttcctcttttcaccaaataaactgaatttgaggccaatatttgaaatctttgtgctatataacttctgaaatacattgtattcttaatgcgtttccaagtgacctgttgtccatagaaaagtacactcaacactgaatgtatctgctactctgaagagcaagacagctcgaactggaattcactcagacacctcatagcacgaaatcatctcatagcctttcagaccccatcttcactgccacctttcattcttttgggtctctgggccatgacatcccctgtcctttcggaaagcaggaacggagggatataacgaaataaattaattgggaacgcagcggagctagggaccctactggatgttgggggtggaacttttaaatcatttacaaaacaccagtcccgacctcccctggaagactgagctgttacctcttctggcgtccgtgcccgcggaagttcgctcctagggaagtcgctcgcgtcctcaagagcacctgagaggatctcggcgaagcggaaggctttggtgccagctgggagagtctgcgccggatttcctcagctccttggcgcgtttcctcggagccgggggaggcaaagcacggaccccggagtcggcgcccatagcgggacgccctcgcgaggggcgggagtgcgggaggtgggtgtgcgggcggcgcgctcgccctccagctgcagcccgcgccgagcgcgcagggccagcgagcgccggcgcctccagcatggagtgggaactcaacttgctgctctacctggcgctcttcttcttcctgctcttcttacttttcctcctgctcttcgtggtcatcaagcagctgaagaactccgtggccaacacggccggggcgctccagcccgggcgcctctcggtgcaccgcgagccttggggcttctcccgagagcaagcggtgtgacccgagtgcgggcactggcgggagggcaccgagctgcgcgggcgctgggctgggtctccgcctcgattctccgtcctcgcggcctcccagcttccaggtgcggggctcggcggctctgacgggtccgttccggcgtgaggcgcagggacccgcgtctccgctcctgtgggaggcccggggctcgcagcgcgttcgggtgccagggacggtgggtgtatggggtctgggctggcgctgtgctcttcgagagggaccctaagctgttccagggctgggagagatggcgaaaagagaattcgccctttggagccggaatgactttggacaactgcaagctcttttctgtccaactgcattttagttatacccaaggagtggaaaagtaaattattcggataatgcagtttagccactttcgaacaaaatcgcaggttaacctgaatatccacatttttgagaaagactgtgtgggctttgggacgggtggcaggaggaaacggggcgcacttaaagtattttaaatattgctttaaatatttttgcgctttgagagatggtaaatggggttcgtctggtggtgctggggtggggcgtgggggagagaagattcagtcgtccatttggagggaggaatcccttcctcccggtgatccttactcatattctagccaccaaccacggttagtgcttgcggattgccgtgcagggtaggtttcgaatctgggacagcggatggtgaacgttacagtgagagtcatttggaagatgccttagggttggccggtacgtgaccttttgggtgatggcatggagggccagctaaaagaggtactgtttgcatagtgtagggaaacaggaaaaaggacggagaggcgggtctgtggtttcaggttaaattactagagcttttgcagaagatgggcgggcaggagcaaactcgagtaccagtatgccctaagtaccctctcgctaatgttagtttgggaaatatcttcatccttcagtagcttttccctagatttatgtcatctctctttctagagccgagctgctgcccttgactggtgctcaggggaccacagctgcaatgacagtttgggcctgcaaaaagaaggctggaacaacgggagatggaagctttctgcaaatggtaagttgggatgacgcatggtttcacgttggccttagttatgactaaacttctaaagatccagggcctaaaaacatgttggttcaggatgggggaaatgggtacaaggaaggaaagggcactctcccactcaaatctggtgagcttctaccagatccacaaagccaaactgactcctaactcattgcaagaatcagtgtcttagtagaggattgtggaaatttgaatgagatgtcaggagtgtttgcacttttaataatcattcggcccttttgaaaaacagtgcgggggttcatggggtgaaatatgtgatgcagatatactcaatcttcagtaagggaagatttgggtttagtcatgtcagtgtgggataagctaagtcataactatagtattgaaaatactaattttagacacaaagaccatatagagaggctaaaaacaatgaaatactaaagtttgcctaagttgataatataaaagtgaagtgtaagacaattattttaatgcttcaaaggaaaaatagtctcaggtgaataattttggcccaagacattagataatttcccactttctatttcactctccccaaataggcctgttcttaatgaagtaagaggtttactttaattattatggtatgagcaaatcctcacctctttatcagagttatggtaagacttgatttgaattcccagtttgaactccctgaatcaactgcagtgattctgtattgtgctttgaacaatagttctctaattggttgatatctctgcagtggcatttagttaaaaggttgtatggttaatatggacattgaagatgagtgtgggagtaattaattagcaattatagttgtttgtaaggattgaaaacaatcatttcacactttagaataaccagaatggaaattattttaaccacatgcttgccttcttgagtttacaatcctttaatcttcctagcagcaccactggtatccatgaatttaacctgcccatcattcttcctaaacaagagactattgaaaagtcagggtgagtagtttattaccatctcagtattaatccaatctctcagctggttctactgactcaggttcctaagaaagcaggggtgcctttctatcttgtatccagggccattttattaactccttgtaatcaaattcattaatga

SEQ ID NO: 1881693 - DNA, 4001 bp, Homo sapiens
ttttattctaccaggggtaaatatatacactttaaagtaaaaaagcagagttcacaagacttacattctacaactttattatttttagggtttgaaggctaaaacaaacatcagaagaaactttcagaagatgttttaagcaagacataatagcactaagacactaaaagaccctattaagttcctgaacatactaacaaaaatttattgagcaagtattttgcgctgggctctgtgtgattcctaatatcattaaccattattaaatctgtttattatcatcagcatgtctagtcttacagtagagtggggttggaaaaatcaacaaagatgtgtttcaatagaaattttcaaataaataaagggaaagtgcactacaatgtttagccaaggattgggggtaaaacatatattatatattgaagcatggcttgcttattttcaccttctttctgttatcttttatccagcattctcagaataaaatgagatttttgaaacagaatagaacttagatcaaaattttaatacagtaagaataagtatcctggataaataagaatctgagaaagtcaagacttcaaaatcctccccttccagtgaaaagcgttagcagaaagttaacaaattaaccagatgaattcatcaactttcaacattttctgtacaattttattgattctgggagcatctgggtccaggcagattttttctcccatcttacagagtggctctgcaagagagaatagaattatctgtgggtgtcctggcctgaatatcagaaaggatctgtgagactggaggaaatgaatgcagatggggatggaggtagagggcttccctgatgaggcgatagcacagaagcagtggcttacattacttcgtctttgctgcaatggggtcctgctgagaccaactccaaattgtggatgtttctgggatgaagtacaaaggttgacttcacatacacgcagcgcagttcagtgtacaagtcactgtctacacttacagctggggtaaaaagtgatctattagtggtcgtgaatatttttctcagttctctcaattgtaaattgaaggtaattgtacctctctcataaagccattgtgaatatgatctgtaaagctttagtaaagtgcccagcagaatgcccagcaaatgtgaagtgccccctctctgtgacccctccacttggatttgttgttataatggcactctccagccccaggagcaccaagccagtctttctcccagatacaggtatagcagaagcagcaacaggtgcaaggaacagatctctacatttccttttccctatgtttctcttagtttgtccattggtggaggaacccagaacagtcaacagcagcacctgcagggcacaaagtgatctggcacagctgcagggtggcattgagtctgaggcttatggtgcagaagccgaagttaaagatgtttctagagcctgaagacttcctcttgagggtgagttgctgcctacaagtctgcagttaagtggcttttcataccccttgatgtcatttatatgctctcccttgaagtcagtaaggagaaagaggtagggaagggggaagtgagggtatgtggtgatacacacacacaagcttgtcaagctgtgcccaacacaggtcaaaattcctactaagttgcatgttatgcatcacttcacattcccactctccctttctcaatacctatctcccttacacatgtgtaaggactctacttaggaaggtaagaactagactgaaacactacatatattttctttgtatgagcctgtaacaatatgtgctgtctttcctacaacacagtttataggctttgtttataggctcctatagacactttaggggcacctgaaaccacaaatatatggccctgcgccaaagacagcagatgttctttgggaccgtatggataaaataagagccaattatcatcagaggcttactttggattttagcttactgaattctttctgccttagaaataaattttataattttatcaagaaactacaaacaaaactcattctctcttttgtttttttttttttttttagttttcaagccaatttttcttattgttgaacaattattcactatgcctactgaagttatttggaactgtttttaagtgtgataacctacaggtcacattttacagtttacattataagtaagcagacttccaaattaacccaccttggaaaggtttggtgacttgatgttgacattctatctctgagtaaagcattttattatgagttcctcagattgttgacgtactgattaatgtagaacctgatgacactgaataggaccatgatttatttctaagttacactgaaacaagaagttttctgattgttttgcacgtagacatttagcctgtatgtagtaatctaatgattgtaactcctttattttatcctccgatgaaaaagaggacaactctggtatgaggagccttcctctcttcttctaaactttcccataaagcccttttagcttatgaaagactctagaacacccccaactttgttgatgtgtctttccaggtctgtcttcccatttggctttcaataaacttttctaaaattatttatgcctccacagaaataatttcagtagataaatgtatttcttattttttccaccctacttaattttttcttataaattagagtttagcagtagaaaatattgaactaaaataatttttcttcccatctcaacacagaactgtctagtcttaagcaagcttaaaagaagggcacaagctgagagtttggcttcttctgagagctgagatatggagtcaatagcaaagagaagctcagcaggacacagaatgaggagaacaggcttctttctagctcctcctgcaggatgactttacaaccttttcttgttattgagattgagatattgtgaattctcaagtcagatacattttcattcaatcataaaatcaaagctatctccagagcaagatataaaggtctttagcactattcatagtatctttcattttctgttcaaccccttaaacacattgttgagaatatttattagcttcactggacactttttttctttccatactaaccctatgcagatttctttcctcgttcattagtaagatttccaaaaagttcctaatccttttgaggaaactacaggaaaagtctcctgaagtaatgatgtttttgagtgagttgacagtaggaaagaggtaggcatggatcacagtatctttgagtaattgccttaatcagcaaatgtggcttgtcacaaaagacacatcatcagcaagggtcatgaggaagtagtaacaaatttcatgagtcatcaaaattgtataagcctattagtcagcttttaatataaaacaactttttgctaattttcattaactcaaaaaatattgattaagcatcaattatgtgccaggctttatgaagttcgcttctttgcatgacttagtcattttaactatttcttttttaaaagcgaggcctaaaaactttgtgcaaagtaatgggctatgagtcatactctactattacgacaatgatgacaactgctactgttaactgctattactatcatttgcatcattcccttcaatttccaagatcagaaacactatacacacagtgataaactgtacaaaaatggttaaaagatattttttaaatgagtaattcagttgaaagcaattagcttatacaaaattatgatttaaataaatgctagaagtagaaaaaaagtcaggttttttggttttaaaataacttcacagcctttttataaatcttgcattgtcactgtggctttgtgtatgtgtgtatattgcaggaggtaagttattttatctcttttcgctttaagtcatataaatgcagagtcattcaggaaacaagcaagttatctaagacctaaagcacatcttatgttagctattttaaaac

SEQ ID NO: 1881694 - DNA, 4001 bp, Homo sapiens; identical to SEQ ID NO: 317251

SEQ ID NO: 1881695 - DNA, 4001 bp, Homo sapiens
tagtaagccaatgatgtatgttataatttctaggataaccactaagaaaataattgaaaaatgtataactaacaagcctatagagaataaaagcaaataggaaagcaacagattaatccaaagaagacaagaaaggagaggaaaaaagacaaatactaaggcaatagaaactaccaaaactgtagattgaaacacgaacatatcctaactaccttaataaaaaacgaactatatactccaattaaaagacagttttatcaaactggattgaaaaattaaaattcaactatatgctgttttacaagacacatgacttaaatgtaagtatacaaaaatgtctaaatggaaaaggatatacatgcaaaaactcatcgaaagaaagctgatatagatacagtagagcctagggcaggaaacattactaaagataaaaagacacattatataataataaatgggtcaatcatacaggaaaatgtaataattttaagtatgtgaccgctgaaagacatggccttaaaacatacaaaacaaaacacaaaagagcatatactatatgattccattcattaaaaacttccaaaagtcagcatactggttacctttggggaagtgtattaatttggagggggcacacaggaagctatgaaggtgctatgaatgttgtgtttcttgatctgggtagtggttacaaaggcatgttcatttgttaaaattcataaaatcatttgcttataatttctgttatcttttggtaggttggttatccttccttaaaaacaaactatattttaaaaaaacaaaaaaaacaaaaaaaaagcaagaaagtgatttaaaatattcaagacagtgattacctccagcagggacaagaagaaaggactgaacacggaacaccttgggctttgacagtattggtaacattcctttcctaaactcggtggcttattcactgtactgtactttagacacactttacatacatgctttaatatacatctaaaatactcgagatttttaagaaagaaaataattccttatacaccgacatgtcaacagtagcttgtctgtggttaggctctggttattttatttttattatttctacttttctgttttttccaatttttataaaatcacctgtatttcttgataattttttaaatactaatttttacaaaggaaaaatttatcccaattctctacctcagttgcccataaaacactttatataaaacatattttataatccaaaggtaaaattctaaatagttatacaataattgatgggtaaattaaattattaacaaattatgaataaactttttagaatggatatgttctatagcttgattgtgctgatagtaaaagagataccggtatttatcaaaactcacttaattggacacttaaaatgaatgtatcttatcagatgtaaattacaccttaataaagttgattttaaaaactattattgcatatacattagaagcaattagataagaacactttacatacagtacctacaaattccacagttttcacagtgatactgcttcttatctttgtcaaacaaatggcatatatcgcaataatattctccaaacaatgtgctacattcttcacaagtctgttgggcctaaaaaagaaacataattaaaaactgcaataaactaaacattttgagttaccatttgaatatctagaacttatgttcaactatatgcagtttatttttataagttttgaaacacctaaaccaaagatattgcttattctagaagttaaagaaatcttatttatgatacttttgattaaattttttcaaaccaccttaatacagcttttaaaaagaaaatagaaatgtcataaaatcttacatgttgaattttttcacagtttatgcactgcacttccttcactttaaagcgatctagttgatgatcttcattgttatcatgacacaagcggcaagtataaagcttgtcacagcaaggtgcctaacacccacggagaaaaaagagatatagtaagaagcaaaagaaactaagtgtgcaatacaaaaagaaaatttcttcctcctcctcctggatggaactgaaagattacaaccaatagatcagttgctaaactgatcctaaacataacatttcactagtttcttggcatattttatgttaattcttcccttcaacatcactacgtctgtatgaagttgaacacaactttaaaacaaaagaattatgaaggaaatccctagattgaaacactaatcccacaacacctgatatgctttggctgtgttcccacccaaatctcaacttgaaatgtatctcccagaattcccacgtgttgtgggagggacttagaaggaggtaactgaatcatgggggccagactctcccgtgccattctcgtgataatgaataaaatctcatgagatctgatgggtttatcaggagtttccacttttgcttcttcctcattttctattgccaccaccatgtaagaagtgccttttgtctcccgccatgattctcaggcctccctagccatgtggaactgtaagtccaattaaacctctttttcttcccagtcttgggtatgtctttatcagcagtgtgaaaacagactaatataacaccccaatttcattctgagcctaaacagcaaacaggcaacctcttcttagacatttccagataaattcatttacattaaaaataataaagattatattcttattttactagcttttattaatcatcaacctcatatctaatattgcacaaaatgcaacaaatgtaagagacagcccttgttttcaaacacggcaaagactgccagttgtccaccaaaatctatcctctccttcctgggcacaattgttcagctatatcagacagatggccacatgccctaaaacatgacaaaatgatacaacagaaaaatctcatccctggagtgaccatgtggagcaaagcctcatcaccaacctgcatcactcgccttggaattgttaaatggaaagaaataaaacctttactctttaatctacatcactgttgggttttttcattacagcaactttaccattacaagtatatcaagagatttccaggccagtgactttccaatacactgtgaccttgcagatccactcatttctgaaggcttcctatgccttgacttaccataacgtagttcattccttaaagattttaacacttaactggcttcctttttctgcaactctcagttccttaactttgtcatttccaataaccttgtcctccaacccactattctcatagttataccgcagaacagtagttctcaaatggtttggtctcaggatcccttcacactttttaaaattactgagaatcccaaagagctttggtttatgtggattttatctattgacatataccacatcataaattaaaaagaataggtttttaaaatattacttctttttaaaagtaacaaactcattacttgttaacataaataacatgttttaatgaaaaataactatatttttccccccaaacagctgaattcttctatctgcttatgcattcaaacagttgtggctgaagtacaaaaagaaactctggcctcacacaaatatgtacactggaaaagaaaggagtattttaatagcctttttggagaattatggatatcattctctgatattacactagaacaacaactcttaaagggtagttgcaacatgaaatctgaaatcgtatcaaggaatatgattgatatgatgcctcttttcttccttggttacattaaaatctattgctctatcttgcacttcaaatggatgttttactcatgcattggtcatctggagaataccagttcagtgagttatttacatcttctaaatgttcacacatttaacatgcaatatcaaaaaatcatattcattaaaagtctttaggtattgaagaaaatctcaccaaaaaaagtcttttaaaaag

SEQ ID NO: 1881696 - DNA, 4001 bp, Homo sapiens; identical to SEQ ID NO: 317278

SEQ ID NO: 1881697 - DNA, 4001 bp, Homo sapiens
cttatttctccacatcctctccagcacctgttgtttcatgactttttaatgatcgccattctgactggtgtgagatggtatctcattgtggttttgatttgcatttctctgatggccagtgatgatgagcattttttcatgtgtcttttggctgcataaatgtcttcttttgagaagtgtctgttcatatcctttgcccacttgttgatggggttatgttattctctttctggctcttaaaattccttttattcttgagtttctctgtattggttttgggtcacatcagatcaagtatataaaaggacaactttaacgggagggaacatctttttgtagagaagggatactgatgaaggtaccctccataaatgagagtatccctctcatataggacaccaatactgagaaactataaaggatgggaggacacacagagtggaagaaaaaacttagaagtaatactaaaaagtggcacaggagacccagacagtgttaattttttggtaactgaaagaaaaggctagagagcaacagaaatgtgtgtcccttactttgcttatgtggctgagaattatgtatttcaagtaatgactttggctgattaactggtggcagatttaaattccacactaggacttctctttccaggcaactcttgatagaattgcaagactggagctcactaaagaagaaagtgtgaatgagagctagttataagaatgtattctcttgagagctgggatatgattgttgttgccataaacatattcttcttttaagagtactttttttcattattctttagttagtgtgacagagataataaagtgtttttaccaagcttgtctaaccctcggcctgcaggctgtgtgtggtccaggacggctttgaatgcagcccagcacaaactcacaaactttcttaaaacatcatgagatttttttgcagtttttcttctttagttcattagctgtcattagtgttagtgtaccactgctcaaagaaataagagacaacgcaaacaaatggaaagaaattccatgctcatggataggaagaatcaatattgtgaaaatggcctacttcccaaagtaatttatagattcagtactattcccatcaagctaccattgactttctgttcagaattagaaaaaactaccttaaatttcatatggaaccataaaagagcccatatagccaagacaatcctaagcaaaagcaaagctggagacattacgctacttgacttcaaactatactgcaaggctatagtaaccaaaacaacatggtactggtaccaaaacagatatatagaccaatagaacagaacagagacctcagaaataataccacacatctacaatcatctgattttcgacaaacctgacaaaaacaagcaatgaggaaaggattccctatttaataaatggtgctgggaaaactggctaggcatatgcagaaaacagaaactggaccccttccttacaccttatacaaaaattaactcaagatggattaaagacttaaatgtaaaaacccaaaaccctagaagaaaaaccctagaagaaaatctaggcaataccattcaggacataggcatgggcaaagacttcatgtctaaaacaccaaaagcaagggcaacaaaagccaaaattgacaaatcggatctaatcgaactaaagagcttctgcacagcaaaagaaactatcagcagagggaacagaaaacctatagaatggggaaaatttttgcaatctatccatctgacaaaggtctaatatccagaatctacaaggaacttaagcaaatttacaagaaaaaaacaaccccatcaaaaagtgggcaaaggatacgaacagatgcttctcaaaagaagactttttttcaaaaaatatggaacgcttcacgaatttgcgtgtcatccttgcgcaggggccatgctaatcttctctgtatcgttccaattttagtatatgtgctgctgaagcgagcacaaaagaagacatttatgtggccaacaaacgtatgaaaaaagctcatcatcactggtcattaaagaaatgcaaatcaaaaccacaatgagataccatctcacgccagtcagaatggagattattaaaaagtcaggaaacaacagatgctggcaaggctctgaagaaataggaatgcttttacactgttggtgggagtgtaaattagttcaaccattgtggaagacagtgtggcgattccacagggatctagaaccagaaataccatttgacccagctgtcccattactgggtatatatccaaaggatttataaatcattctactgtaaagacacatgcacacacgtatgtttattgcagcactatttacaatagcaaagacttggaatcaacccaaatgcccatcaatgatagactggataaagaaaatgtggcacatacacaccatggaatactatgcagccataaaaatgaatgagtttatgtcctttgcagggacatggatgaagctggaagccatcattcttagcaagctaacacaggaacagaaaaccaaacaccgcatgttctcacttataagtgggagttgaacaatgagaacatgtggacacagggaggggaacatcacacactggggcctttcgggtggtggaggtgggaacgggagggagagcattaggacaaatacctaatgcatgtggggcttaaaacctagatgacaggttgataggtgcagcaaaccaccatagcacatgtatacctatgtaacaaacctgcacgttctgcacaagtatcccagaacttaaagtaaaataataataataataataaagccagtctaactgggtgaaaaaaagtaaagatgtgttttcttctatatatattttatctgtgtactaataataaaaccagacttacttttatgtctcttcagtctcaaaatatttaaaaagaagctcttttttcactggttaacattaggaagaaggtgaacaactatgacagttttcttggcttgtgaatttttggagtgtctgaaatcaatcttttaaaattatattgttgttgaagacagcagtgttttatgctgaattacacagagataatgtatttttatggacacatttggcagcttgttatgcctgtgcaatgcataacctctcaaaacaacttcttttcctctctccatctcttaaaaaaaaaaaattagtgtgagtgtattttatgtgtggcccaaggcaattcttcttccaatgtggcctggggaagccaaaagattgggcacccctggtctttaccatatagagacttctgcattaacaagtaagccactaagattcctgtggatgtggtgactttgtggctttttaaattttgtctgatggaaggattattttactaatgcataagccggtgaagctggctggagggcccctgcaataccatctcctcatttatatgtatacacacacacttgcaagctacaccagagttaagaggacacaagtatgtcagattaaaaatccatctgattttcttttcaagtctaataagatttgtcggtaagaagagagaataattaatgaatgttttataggtctagtgccataattctctgcaaggtgtaggtacatgattttctgtccgtccggatttatgtttattccagaatcttctttcatagtttttccttggaaatggtctggacatgtaactgaagtagaaacactgttgcagcagtgtctgacttgccacttttccttttctgtcattctatgattaggagtctccaagagcttttagattaccccggggaggatgtggaggagactttctgcctcaacttcacggtaagaatttccacagtttacttaggattgtggctgtctctcttaccatctttagagtgatatttaacattagttcttcttcaaatcatagaaaaaagtcagagacttctttgaatcaaattattttagtcatagtgtcttgagtgttatagg

SEQ ID NO: 1881698 - DNA, 4001 bp, Homo sapiens
atttaagtaaaattaaaattgaaatgtatcattaagtattattgcctctaataacatctaaagcagtgttctgttcttttctcctttaaaatctaattactgtacaactaaaactcccttctttgtaataacacttttcttaagtgttatttgtggaggtattttctttcacaatcagagagtctagaagttgcctttagaccactagaccactgggggttaaactgccaatcactatttttttttttaaactgagcctcatcgttcatttttcctcataccattaactgagctttatcttccactgcattcctactgtgcttgcttgcgtcagctccatagatcactttcctttttttttctttttttctcctttcccctcagactaatgaaaattttattgtcaatgtttctctttatttggtaatattttaaactgaaatattaaaaataatattaacaccagagtaaacagtttcctttgctttttcctgtcatcgggtagactttagtacacagtacacataattatggtcaccactaaattcacatattttagaaatagtaagctttgcattactttcctttgttctcatactcaacttttaactatttttcttttaattggatttttaaatgaaagtacatttaaaattgaggaggttgtctcagtggtgtgaaaagttcagtgtgttctcttattttttcactgaaagtctgtctaaatttttttgtaatggaaaattttgaggcatactgaagctcatgttttctttatcatggcaaatatccattaagtatgaatattcaagaaaattatcttgtatcatctttcatatttaattgaatcatacatatttccttttggctaataactatcaatattattttattcatattgtgtaatgaagctatatttgaatatcttagttttatggaaacttttaaaatgagaaaataaaataatgctattctattttggagtatttctctctaataagatgctagtaatttgttcttatgtgtgaacaggactgcaaagcatgtattagggtacctgacatataataaataccaaatatattttaggagctaacaaaaagtattttgttaataaagatgtcttcattagcaattatcattaccttgattcttccaatcagtaatgtacatcttcttctagccccacatgggctttagtatgacttacccaaacaggaatgaatagctttctctcaggtgccatgctgtaagctacagaacttagctggtatttctgctttcatccaaggttagcaattataattatacacttagtcaagctgattcctaagcatcctctgaaattgagacaacctgctcaattttaaatgtactttcatttacaaatccagttgaaagaaaaataattaaaaattgagtgtgagggaaaaggaaagtaatgcaaaatctagtcatacttggctaaattatttaccactgactttctaataaaaacaaaagggattatttgaaaacaataaaacccatgttatgcaatgaagtatgtacagtttaaaaatctgtggagggacaattcctgctgtacagcatccttggtaggatttggtattgtctgaatttttttttaaaaaaagattgccattgtagtagatgtgtagtggtatttccttgtggttttaatttgcattttataatgaactaatgatgttgagtcttttttgtatgcttatttcccatcctatatcttctttggtgaagcgtctgtttatataattttcccactttttaactgggtcattgattttcttattgaagaggttcaagtattatttatgtattctgaatatgtcatttgtaaaaattttctttttctattctttttttttctctgtaaatatggaacgcttcacgaatttgcgtgccatccttgcgcaggggccatgctaatcttctctgtagcattccaattttagtatatgtgctgctgaagcgagcactcatttgtaaaaattttcttcccatccatgagttgtggttttattctcttaagagtgtcgtttgcatagaaaaatgttttaatttgataaagtatacatttttactttatggtcatatttttgctgttgtatgtaaaaatttatcaacaagcctaagatcaaatagatttttcttgagtattttatagatgatttgtagtttcatttcttacctttatgctatgatttattgatccattttgagttaagttttgtataagttgggagatatgagtcaggactcttttttttaatatgagtgcccaaatgtcttagtactatttgttacagaggctatcttttcttcactgatttgattttccaactttgtcaaaagttaattgattatatttgcatgggtcaatttctggactctattatgtttcattgacttttttatcctcataggtcttaaaattatttagtgagatttttctaactttgttcttttctcagaattatcttgactattctagttagtttgatcttccataaggattttaaaataagcttgcctatgtctataaaatgcttgcttagattttgaatggaattttttcaatctatatgttacattgggaaaaattgtcatgttagcaaaattgagttttccaatccataaacactgtatatctttccattttgttagagcttttatttctttcatcagtgttttgtactttctagcatacatatcctgcgcacatttttctttgttagtggaaatggtaaatggtacagatactttggaaaacacttcggcagtttcatataaagttaaatatccatttgctacacaaccagcagtcctattcctacttattcatccaatgaattaaaaacttattagactttcctacataaacttgtataggaatgtgttacagcagctttgttcatgattaccccaaattggaagcaaccaagatgttgttggattaaaagaaaaacaaccaggtacatttatactatgcaatactacttagtaattaaaggaaaaaggaaatgaaagaccctattcactcaatctgaaggaattgctaagtgaaaaacaccagactgcaaataccactactgtatgattgtctttattttatcctcggaaaagataaaactataggaacggaaaatacatcactaattgtcaaagtttggtgtgagaggaaggtttgactacatacagtcaacccaagtaaatttttagcgtgatggaattgtgctttgagaaacttcagtggaaacttaactatatacatttatcaaactcgaaactggacaccacaaaatgagaactttaatgtatgcaaattttaagaaaatcaaccagggcgttggaggattccagcatgtaatacagactataactggaaatgtatgacataatctcaccaaagagatggggggaaaggaactgacataagtatctttggaaacagtgtttgacgagatactacaaggccacagacaagcatcaccatacataataagcagtgtactcaactaataaatttaattttcacaggtctatgaattagcaattctaaaacaattttacatgtatttagatttgataaactatagataatgggattcaagtttctcattgtcagaggtagattttaaaataagtaagcaggggaagggtaggataaactttgtggtgatgaattaaaattggagataatactatgaatgtatgtttcttttaacatagatgctgataggtaaaatatgtaaataaatataaatgtatgtgtatacttctgtagtatacatacatatgcttcctaactctctctattaaaagggcctagaagcagtgaaacttcaataacaaacagcatacctagtccctggatctaagattttaaatatcagtctctaataaaagaaaacgggggttcctggagaatagctaattctgtgaactaatcagggaaaatacatgattaacctaaaaca

SEQ ID NO: 1881699 - DNA, 4001 bp, Homo sapiens
tccgttacctccaatatcctggagtctcgaaaattttttctcacagtgctttcttctaaaaactaaccttcagaggagccctcaaggacaagactgtagcaactctggcaggaagaaaatgttcccgtaacagagggcatgccaaaatataatagtaaagtctcttttattgaatggttcactgctccttaaaaggtaaacatgtgcagctgactacataaatataagcagtttttcagtacctttaagaagagcaaattatttgagaaaaataatatgctaaaaaaaaaaaaacagagaccaagtaagcacagaatttttcttcttaggatgttttctgcttatagggctgacaggcaaaaagtgggcagtgatgggaaagacccccatcctggtctccagggtctaggtgaagccagctccccttctggggtgctgatggtgagatgttactgctgttatgggaagaagattcaggaagcaggagtcaaccattatgaatattgagaaaagaaagagaagagagctggagttctaattcagaacaagaaatactgcctttttaaagtaatattttaaaatccttgaaagtgatttaaaatgctgagtccagacattctcaccgacctgcctagccctgcaaaacttatccagcagccccacaaattgacattacaaatagtgagattagttgcacagttgaagagagatacccatgttcccatctttattggattgtgagtaataaaaaaggatttattccagatgctattaaattaagaaaacttggaccatttcaaattctcaagcccagcatcgtcctaatcaggaaagccagctctgcagcctgcctgaactgaatgatttttagaatctctaatgcaaatagagattagggtatagaatatccccgagccaagtccctccccttcactgtagaccacccaccaacctaccagggcaaatcagtcctggttcagacaggcgtccagcacacatgcaggtatagcctccctctgtatttgtgcagctggcattctctccacagctgtgctcccccagttggcactcatcaatatctgtcagaaaagacagagtacgggagagaaaagtggggtacagaaaaagagggttttatagttggacagcctttggaagaggagcttcatcagcttctgtcatgctatatgttctcagagacctatatatttttttaatatatattttttattatacttaaagttctagggttcacatgcacaaggtgcaggtttgttacatatgtatacatgtgccatgttggtgtgctgcacccattaactcgtcatttattttaggtgtatctcctaatgctatccctcccccctccccccaccccacaacaggcccctgtgtgtgatgttccccaccctgtgtccaagtgttctcattgttcaattcccacctatgagtaagaacatgcagtgtttggttttttgtccttgtgatagtttgctgagaatgatggcttccagcttcatccatgtccctacaaaggacatgaactcatcattttttatggttgcatagtattccatggtgtatatgtgccacattttcttaatccagtctatcattgttggacatttgggttggttccaagtctttgctattgtgaatagtgctgcaataaacatacgtgtgcatgtgtctttatagaagcatgatttatattcctttgggtatatacccagtaatgggatggctgggtcaaatggtatttctagttctagatccctgaaggaatcaccacactatcttccacaggggttgaactagtttacagtcccaccaacagtgtaaaagtgttcctatttgtccatatcctctccagcacctgttgtttcctgactttaaaaatatggaacgcttcacgaatttgcatgtcctccttgcgcaggggccatgctaatcttctctgtatcattccaattttagtatatgtgctgccaaagcgagcacagccctatacatttttaggtttaaggggactttcatgaatgttggagagatgaactaggtcctacaacgcatgcccatgcacgtgttgttttccttttttgtttccgttctttctctctctgtcttttttttttttttttttttttttttttttaaagaatcttgcttggttgctaaggatgaggtacagtggtgtgatcatggctcattgtagccttgacctcctagggtcaagcaattcttccagctcaacccaccaagtagcttggaccacaggcttgcatcactatgattggttagttcttgtttgcttgtttgtttttaattttttttttgtggagaacagtgtttcgctatgttgcccaggctgtctcaaactcctggcctcaagtgatcctcctgccttggcctcccagagtgttgggattacaggcatgagccaccacacccagccccatgcaggtgttctaagctcctgagagaggctggaagctttcttcctgctttgaaggaaaggagacttcccaaagttggagattaataaacaacctctaggcaaacatttaaaagttcagatcctaaagattcatacttaactcttttgtatagacatcctgtcattgacatacatattatatcaaatacaacagttttgctttttatataagaataaactatatcagaaaagtcatcctttctttcccaactacccaccattttttctttctcagctactgccaccctaacatttagggcctctcttcctctcaattttacattactgcaagaacagccttactcattcctggatcccatgtttcctccgcgccatgcctaaacaccagtgccacattattctccctccagcacaacgatgataaacccatcattgcaccactttactcaaatgctgccagtggctccctgttgcctagaactttgctgtccaacttcctagccttcgccatttgagagtattgagtacctgaaatgcatctagttcatattaagaagtgctgtgagtataaaacacacattagagtttgaagacttagtaccaaaataaaaaagaatattaaatatctcaataatttttacactgatattaaaatgttaatattttggatatatttgaatacataaaatattattgctaaaattcatttcacctgtttcattttacagttgtaatgtggttagtagaaactttgggacaacactgactgtctgaccctcagccagtttcactggagaagtgaaacctcagtgactaaccctcagattttagtcttccgcagaggtaacccaacccatctgttacaggctgaaatgtgtccctgcccctccaattcatatgttgagccctaactcccaaagtgactgtatttgaagaaagcatctaccaagaggaaagtaaggttacatggggtcataagggtggggtcctaatccaatagcatcggtgtccttaaaagaagaggaagaagaaaacaaaagaggaagagaaactagagcgttctcttgctctctgtctccctttctctctctctccacatcaaagagggaaggccatatgagaacacagtgagcaggtggccatctgcaagccaggaagagatccttcacccaaaaccaaatcagccagcaccttgatctaggacttcgagcctccagaaccatgagaggatatatttctgttgcttaggccatccagtctaggatattttgttatggcatacactaccttatcagccttagtttctgttcttcccctcatataacctaaacttagtgctcaactaggctactctctacccttaatggcagtcatgtgatctgttcatgcctggactcctcccatcccttcacatttctgcaaatgaaattacttatcccccatgctccttccaaaatgacacttcctccctgaaatctttcccaatacctcaaacaaatatttctcccagttctgaactttcattgtggtttttacttctctt

SEQ ID NO: 1881700 - DNA, 4001 bp, Homo sapiens
acatgttgaactgcatctaccgtcaataaaccatcatcaaatgccacagaagtttattgtgtcctcttggggtacatgacagcttggtagttttgatctaacatcaaattctactcaatttacttcctgactccagaagataacaggtccaaaagctcatctattctaggccaaagaggttggtttcattcatgtatcttttttttttttttttttttgagacagagtctcactctgttgcccaggctgtgtgcagtggcacgacctcagctcactgcaacctctgcctcagtctcctgagtagctgggattacagcagtgcaccatcatgcctggctaatttttgtatttttagtagagacggattttcactatgttggccaggcttgtctcaaactcttgacctcaagtgatccacccctgcctcagcctcctaaagtgctggccaggctggtctagaactcctgacctcaagtgatccgccttgaggtcacttggcctcccaaagtgctgggattacaggggtgagccactgcgcctggccatttatccactgattcattcatttattgagcaccgacatgctgagggtatcctgtagatggttgatttggatgcagtcagtaaaccaaatttctcttcttgaaactaccatgaaggaaaaaatgcccacatcatttttggaactaaatccacagatgaaaaatcatcttttctctaactgcatcagaactaatgctactccctccagctcaggaagagcctcctatcccagcccctgtgctagggcctccattccagtggaagtaaatgtgagctacatgactgatagtttactacttctgaatagctttgtactggaatttggaaggaatgtgtatagtgctcaatatgaagctcagtttggcttcagggaccattttaattaaattaattatctctaaaagaaacacttagagttgtttaagcctaaacaataggtacttgttctcatttctaataggagtcacattgttcagagagttctcttggtgagctgaggacaatgttaccaccagctatttaaggaagaccttccccttcttgccccatgccttccctctcacacacaggagagaggctttcagagaagtgggatggagggcctggcacattaatgtaccaaatctacaaatgcactccactgctttcttttttgttgttttttgatttttttgttttgttttgttttacagccagaggtcttttattttattttattttattttattttattttattttattttattttattaacacctatgatgccatgaattcacagggaataggttccagcagctcaggctccttcccacaagctttcacaaagtgcgcttctctgggtggagcaggctggtgcttcacttgaacccaggtaccttcctctttggcttctttctttttctgatcattttccttcacacatttcaggaagctatctcggctcttacagtgcttaatgtgctcaatatgcacattaattctcttggcaagaatcttacccttgtttacaacaatgccaacagcatgctggggaacactgtagactttcagttttgccatggtaacacttgtggggcattcctttttgaacagtatccattccgttgatgtgtaccatatcacctttcttatagattcgcatatttgtaaccaaaggaacaagtccatgttttctaaaaggcctagagaatgtataccggtgcctctcctcttccccctttgtgttcatcattgtggcaaattactggaaggtggcagttttggccgaaaggaaggactgcttccttaactttcctaactcatatgtgtcttgtgtttgtttctgttgtggattcttagtcacatggccttgttctgtatggtctgcattttcaggaaaagcatcccagcctaagtggcccttgtacccgtgaagaaataggcagtgtcacttttactttgtgttctcctttcctccaccatttcctcctagtgtgtccttgttttcagaaacactagactgatttttaaaaataatattgtatactccgcctcattgcaagaagactcaatctggcttcttcgctccattctttttttttttttttttttttgagacagagttcactttctcgcccaggctggagtgaagtggcgcaatcttggctcactgcgacctccgccccacaagttcaagtgattctcctgcctcaacctcccgggtagctgtgattataggtgcccaccaccacgcctggctaatttttgtattcttaatagagacggagtttctccatgttggccaggctggtctcgaactcctgacctcaggtgatccacctgcctcagcctcccaaagtgctgggattacaggtatgagccactgcccctggcctcttccttccattctatctgttctttttattattgcagtacaaagaagtaaaatgatatctccctctcatcttctgctcctcacagtcagccatgcccccacaaccttgtcatcactaggaaaaggagtgtaggagggctctcttcacccccgacattcacttttcagagctgtgtgttatttttaaggatgcatcatggctttgtgggaaagccttagtgtgtgtgtgtgtatgtgtgtgtgtgtatgtatgtgtgtgtgtgtgtgtgtgtgtgtaattccagtcaaaggtaagagtgtttaaagcttttctgtgttgtgctaagcccttctccctgagtcttctctcttagatacagtgtgattcatctaactccagtgactaatggccatgccaagtacagggtgttggtctctgttctttggtctctctctcagtgactgaagagtggacaaggcacacaaaagagagctctaaaggcagtcaatcaatactgcagactgactgacaatggcagtattaagtgccatagtggttgggtttactggaatgagtgcaaaataaggaccagagctggccaaattagctttacataataacactaggcaattggtattggaagagatggctaaagcccaggccacaggataagcaggtcccttccagctttgactatagttttggtgtttgtttttttgttttgttttgtttttgtttttttgtgagacagggtctctatctcccaggctggagtgcagtggtatgatcctggctcactgcagccttgacttcctgggctcaagcaatcctcccactcagcatcccaaatagctgggactacaagcaggccaccacggctggctaatttttgtattttctgtagagacagggttttgtcatgttttccaggctggtctcgaactcctgagctcaagtgatttgcctgcctcagcctcccaaagtgctgagattacaggtgtgagccaccgtgctcagccttcacctttaactatctgtagttatttagcaagtaggacttggtctgcagcacagcggtaattccactactctttaactaaagtaagaagtaacaatgacactcagaattatttttaatttacttttggtatattctaattcattaatgagcaaacaactgaaaaaagaagaaaaacatgttaatcttccatcgttattggaaaaaaacagctttgttgtaactaaaatttcatgtattattaatttgagacaaggtctcactttgtcactgaggctggagtgcatggagtgcagtggtgtgatcatggctcactgcagcctcaaactcttgggttcaagcaatcctcccgcttcagcctctaaaataactagaactacaggtatgcaccgccatgccaggctaattttttaaattattttttgtagagacagggtcttcctatgttgcccaggctggtctcaaactcctggcctcaaatgatcctcccacgtcagccttccaacatgctggaattatactcagcctcatgactaattgttaatgtctgttttttttctttctttctctagaatgacccaaccc

SEQ ID NO: 1881701 - DNA, 4001 bp, Homo sapiens
tttccatatgtataaccatttttcccaacttcatttactgaatagtcaccaatctttccccaccaatctgatatattacctttgtcatataccaaagtttcatacatttattattattattattattattgagataggatctcattctgttgcccaggctggagtatggtggcacaatcatggttcactgcagcctcaaacttctaggctcaagtgatcctccagcctcagcctcctgagtaggtgggactaaaggtgtgtgctacaacacctggctaattaaaaaaaaaaaatttgtagagatgggcgtctcgctatgttgcccaggctgatctttaactacaggtctcagtgatctttctgtatcagcctcccgaagtgctaggattaacaggcatgggccactgtacctggctgtctttgaagtttttaataagattgccatatctctctcaagactgatcaagaaaaaatgcaaatacaaatttaaagagagggaaaaatagtattatggaactgggttaagtaccttaagggaaaactacaacaatgagaccactattcttatctacttgggtgggggaaggcacggacagagacgtaaacaacagcatagtgtgccaagggctcccatctcctgttctcttctgctctgcaaagtctctcttaaaatatagagaacatattgcaagtaaatacattcattagtgcatttattcaaaaaccacatttgtctctctatgcaagcttccatctcaatgcctggcacagagacgaaaaggatttcagaggacaaaaatcaaaggactggaaaggagggaagtagctgatgacaaggtcgggggagaagcagctatttgagagtgagcagagggaaggatataaccagagccttccatctggtgttgtgacaaagatggcagtgatgtgaggcttgatagaatcaataggcctcacagttcaagacagactacatgccctcagtcacttgcctgctttcttggtttgctagatggattagaaatactagaaggaaagttgagtgggtactgggatatcctatccaaatcctctcttctggggcaatgcagctgcctcacagcaaccacgttgtggatcacctgaccccgcctttctcagcttcctggaggtgcattctaagagcgctccccataagccaacactcaagtctcttcgaggtgtgtttccagggagcctgatctaagattaaaaacttaaaggccccttttagaattgtcttttacagcccaggcaaagagttctttacttttttagaggtcatgaatccctttgacaaggtgatgaaagccagggaccctcttctcagaaaaatacacacgtgcgcttaatgtaaaattttacatactgttttaaaggttaaactttaccacccatgaaaagcctcaagtagttctttgtacataatcataagattagcaaccatttactgagcacttcctctctataagaccctgtgctaagtgctttaacttcataatgcctttgatcatgacataacatggcacggtagttcctaatatcttccttttagagatttaagggcttgctcaaagtaacatagctaataattagcagacactggattaaaatcccaatttgtttgtaaagcttgtgctctgaataaatgacaaggaaagagaagggaaggttgaagaagggaaggttcttgaaggtccctggtccttgaaggtcccttaaccataaatgtcaagagttgggatttaaacccaggtctaacgccagagctggcgccctttagattaaaagtgcagtgtccatgacaacgaaagaagttgattttgtcccacctttgctctttgcggcttttcatttgcgtttgtttccacagcgatttccaatagatttctgcgtggccttgacacagacagctagtgtgaatccccgcccacagaggggcggcacgttggttgccgtacaacgtggtggttccctgcatctctgcccacgtcggagaggtgcgtcggcttccgtacaacacggatactctctctctgacgcaacttcctgtcctgcgcaattctatttgacctttgaactggcaaaggcttttttcttcctcttccggggacgttgtctgcaggtatggatgttgttctcttttccctgtctttatttccttaccaatcggctgccatccgaggagctgaggaagcctagagctctcagaagcagtcctttgagctggtgtaggggtaaggggcacaacagggaggttggtggtgaggaagttccttactttgatctttggaaatcccttgttcctggtggcacctccaaagccgtgagtagccacagctcaccacccgggactttgctgcattccaagtgtagcgtttggagactaacgagttgtggtttggcggtttgagtctggaaaatcgccaaacgttttcatattttacacccacgttttcacagcacgcctgtacgtgtccttagtctttgggagggcagggtccggcgagttcgggtggtttcgctatttggcttctgcgtccaaggcccatgtcaaggaagagaaaaatgtgttagaagtttctgtcttgcttttggagatgcaaacagaataatggcttcataaatcactcgcactggttttacgtgtcaagttttggtgtctggtaattctgttttagtttaattttagtgagaggcttgtgacaacaaatgaggtggttacaaggggtggaatgggaagattaaattagttcaagtattgattatgttttacgttgggtagttcccttaacgaagttgctcgtatgcatatctgtataaccgatttgctaaataacatcacgatgtttccagaagtgggaagaaagcaggtgccataacccaaagaaacttgtgtaatatcaaaattagtattaaagggtatgcctttacgcaggtggtgctttagggcaagacattgaaccctgatatgtgccaggcattgtgttgggacggatagcccacgtcgtttaatcctaatgacagctgtataaagtagacagaattcccatgttagagataaggaggctagctccttgccctttatattcccagtaaatggcatagctaaggattcgacttcagagctcactttttgtgctctttgtttaaagcggtgtttctccaactgggctcgtggcacttttctggacaccactccaaacaaaattagactctgagtaaggagcctggtcatcagaacgttaaggaagtgccacgtttgattaccatcaggaaagctaacattcttggcctcttgtttatcagtcacctttaaatacaagtagttttaaaatgtggaataatacatcttaatttaagggtgttacatacaaggatatgtatgtgaatgaaatagaccacatgatactgttttgagattttatttacttttacaatggaaagatttgatgttactctattcttaatttaggcactcagaatggtccagcgtttgacataccgacgtaggctttcctacaatacagcctctaacaaaactaggctgtaagtatttctgaaaattttaagtatatattgtcatttactctacaaaatgctgacctactgactgtttcactttctaggtcccgaacccctggtaatagaattgtttacctttataccaagaaggttgggaaagcaccaaaatctgcatgtggtgtgtgcccaggcagacttcgaggggtaagtgtaccttttactgtgtgcagcctaacaagtcttgaacttactgagctttcatcccttgacgatggaatgaatcaaggagaggttaccactaagagggttcagaattactaaacattcatgagccaaatctgccacgaacatagactttttaaaccaatctgagaaatgcagtgaaatgcctttcagataaatgagtacaccatttccctttgtaacctactttaaacttgcccttaacacttaacaaa

SEQ ID NO: 1881702 - DNA, 4001 bp, Homo sapiens; identical to SEQ ID NO: 317304

SEQ ID NO: 1881703 - DNA, 4001 bp, Homo sapiens
cttggtgcagaacttgcggtcacacagcaccagctgcccgccatcaccgcagcggaagcactcgtcctctgactgcctcttcccttccccttttgctctgcgccgcctcgttttcttcttggtctttttgcccttttcctctgatgaaagggtcgtcgaggtctagagtcaagaattaagcacagatcaccggaaagaattacacaggctgaagcaaatagggcagaagagcgagctacactccaggaacttcagagatctctgcaggtgcccaacactaagaggagaggagaggagtgtcctcctcgtgctccccagacatccttagactcactcgactcagcgtgaaaaagctgaacaaagactacgactagagtgagctttgtcggaagcctgcaatgacgcatctcagcagcatctcagcagacacacagctccaggatctgctgatgggacccactggcaaaggaggccaccacaggcagaacagctcccgcccgccacccagggtctcctcattaggaaattccacaggaacgtgggcacaggtgggcggcagtgacctgagggcagtgaccatcctcagcaacacggctgaggacagacaccggctcagggccgagctggtgccaccgccaggctttcaggaccaggttctacacagcacagggaaggggtgcaagagtgcccccccaaatctctgtccttcctggaaccttggaaggtgactgtatttggaaatagggtcattgtcaatgagatctgttaagatggggtcacacggtagcagggcaggcgctaagtcaacaggaccagtgctcttataagaagggcaagtcaacagtcatgttcgcagggagaatggttgggcggtgctgctacaagccaaggagcagcaaggactgtggccgccaccaggaacgggagacaggcctgggaaagagcctcccaaggaaccttcagagggcgcacggccctgcccacacccagaactgcgaaaccacgcgtctgtgaggcattgttctggcagccccaggaaacacgttcagtgaggaactcttaaccactggcctttgttgagagccatcctccccagcccacagcagggaacttgctcccacctgtcccggcaacaagccagcctggaggaagccgctgttcacgggggacacaggtctccaggagtgcaaaatgccaacacagagcctggggggaaggagggcgccacagccttacctttggtctatccccgaggaatccactgcaattggaggctccacaccggcagaccgttttttcattgcccagacaatcgaggttgtagttaaaagtcagctccgtccctgggagaagaggagacagacaccaaattggaaacacctgcctttctcttcaaaagctaaggggcgtgtattaggtcaacaaaaatactcttattatttttgtatctgtactggcttgacccatggcctttcaattttgcttggtaaaagagatattcaaaccaaaagagactccacatcagcacccacctcccccagagcctttccagtccagccccacgcagccctcagcgatggccactctgcccccatagccaggagccccatgcagggtccccagagcttgtacctgcaggaatgtcacagacggcaaacaggcccacacgagtgtccccattcactgtccacttgagggtctcacagttgggctggcagctgtgattcataaatcgagagtagtttcctttggggccagcgtctattatacggtcctgtaaggtcaagtgatatattcggtcaagtgttagcaatcgcatgttatttttaaagggaattttcaccatcataaagcacattgaacaagttgtgttccttgttgtactgaaaaccgtggtgtcctgtgtccactgagacaggacacccccaaaccagtcctgtttctcttgctcacagaggacaggtcaggaccacgtggagaggaccgagccttagtgagcgccggggaggacaggacagggagctggagctcccagcatcctccatgatggcaaacaagggagctaaggtcagcagcaacagcctagccaagtggcactcaaggacaagaacaagactcaccctggctgggcgcagtggctcacgcctgtaatcccagcactttgggaggctgaagcaggcagatcacctgaggtcaggaatttgagaccagactagccaacatggtgaacccccatctctactaaaaatacaaaaaaaattagctgggcgtggtggtggctgcctgtaatctcagctactcgggaggctgaggcaggagaatcacttgaacccgggaggcggaggttacagagagtggagatcgcgccactgcactccagcctgggcaacaaaagcaaaactccgtctcaaaaaaaaaaaagactcacccaaccgaaaaccagcaaaggatgcaaagaaacaattcccaaagagcaaatccaggcagaggtggagaaatgcagatccgagtgacagtgagctctgactttgcacccatggcgctgatgtggcgttggctgagatgaggggtggctgcagggccggcaggaaggctttcgaggcagcaacctgataagggccacgggaatcacaaatgcaagcacgatgtggcctagaactgacccactcaaatccaggtgcctggaggccaaaggcaggaactggagacaacatctccacccagcagcagggaatggacggccccggcctccacctgaggagccgccagatccaccgcacaaccgcgtggggagaaatcaaaaggccacataaagcgtaacagtcacgtgttcaaacaaaaccacgtgtgtgaacagggataaacactgggataaacatggtcccaggaagcggcaggcttcggagtcactattcacacgcggcctctgacacaactgcccacgcacccagccctggtgcaatctcccagggtgcccctgtctgggaccgctggccccgtgtcctttctacatacccacacaggccaccctttaaaaccagaaatggtaccagaatgtggttctctgcaagatgcttttcacaataataaaatgcactaatcaacccagagtgccactcttcaacacagaagtgggggtgctcatctgccctctgcagatgctttgtcatgacgcgctgagccgcggtgctgatgtgcacgttggcatgcacaccacttctgcagggccctggggacgaggacagcacggggcatgcacatgggacatgccaccaatgccaacaggacaacccagcctctgacgcctggcagcaccgtgtctaacctacattcctaccattaccagcggggcccagtgccacttccttcttatcgggccagttttcatctgtgggttgcccgccatgtcttgaccctgttttatttatcttaactgacttacagatgttccctagatattccaaacatcagacccctttataacaatatgtcggccgggcgcggtggctcacacctataatcccagtactttgggaggccaaggatcacttgaggccaggagttcgaaaccagcctggccaacatggtgaaactgtctctaataaaaatacaaaaaattatccagctatggtggtgggcaccggtaatcccagttactcgggaggctgaggcaggagaatggcttgaacctgtgaggcagagggtgcagtgagctgagattgtgccactgaactccagcctaggcgacagagtgagactccgtctccaaaaagaaaaaaaaatgtgtcaaaaactttcccatagcttcccagctcccaatggaatcttccgtgcacaatgtcttttctcacaaagctgcctccgccttatgcaactattttacccttttgcttcatgcgttttcggtttgctgagtagttgcatgcagcttttcccaccacacagattataaaatgcatctcccccactcctagctgttcaatccatctggaattggcctt

SEQ ID NO: 1881704 - DNA, 4001 bp, Homo sapiens
tttgtcacattttggatcattatttcatttggaatttagttttatttctgtcgtggtatcaggattgaatttcttatttttatataaatagccaatttaactagaaccaccataacttgtgttttctatatcccacgaacagttactatactaatttacactcccaacagtaatgaataatagttttttccccacaaccttagaaacagttattcctcaccagacatctttattgtataccaacttccaggtaccctttttttcctaattttctttttgtctattcttgtgtcaataccacttttttaaaagttgctttaaaatagaattaccatatgattcagcacaaattaacacacacttctgggtgtatatccaaaagaactgaaaagagggtctcaaagagacatttgcacacccatgtccatagcagtattattcacaatagccaaaaggaggaagcaacctaagcgtccactgatagatgaataaacaaaatgtggcataatacacataataaatgatatatagaactattcagccttaaaaaggaagttctgcaatatgctataacatggatgaactctgaggcattatgctaaatgaaataagccagtcataaaagggcaaattctgtattattccacttaggtgaggtacctagagtagtcaaactgataaacacaaagtaagatgattactgccagaggatgaggggaataggaaatggagagttgctctttaataggtatacagttttagtttggcaagatgaaaagagagattggttctggagattggttggagaacaatgtggaatgtatcttatactactgaagttaaaaatggttaagatggtaaattttattctatgtatatttcactacaattaaaaatatttaaaaatactgttctagcaaaaacaaaaggttgcttttaatagtttctcttgatctttggtgtcctgcaatttcaccgttgcatagaattcttatattaatcctgctcaagaataagtacttcttgaatctgaaaattcaaatattccacaatcttggaaaattcttagttattactctttgaatactgcctgcatccattctctctagtctctcttttttggcactcctattagatttatgttggattttttttcatttatttagctcctacattgcattctagtaaatttcctcaaactgaatattgcagtcgcagccaaatgcatagttctcaaaacactgaatagaagatatttttatatagctcttaaaatgattaaggcgatgtgtcagcaaactgtgccagaagtaaaaagtcaagaaacagggagacataaggcttgtctctacagcttaggaggctgtgccaaagccaaaataataatgtattgctgtggatgtctaccttgtactcaacgaatattaaagcaggatgccgctttgtgtcaagtactagattacgatgaacggtgtcacgaagaacactccactcttgataccgtatatgtgaccttgagcaagaaatgtgttcacgctcaggcttcagttcctttctgtgggttgctgtgaggctccacaggggtaaggtaagcacaagtgctatgcctcagtaccactagggtattttctcaattctaaaatattaaatggccacgcactacagatttaataatagtttcggaggaggggcgtgaggagaggaacattccactagctcaactataagctttccgatttcggaaataagaaaaatatgaaaaagtctgcttttagaattaaggaacgacggtgtcgcgttgactttctctgcttggttcgcaaacgctcttttctcgaacttgaatgacttctctgtcgctcataccaacctctttcctgaatgacttctctgtcgctcataccagcctctttcctgattttccacactgggattctcactccaattctcaggtttcctgatagacctgatgagccgcttcaccagcgccgcttagcttcgcttctttactgtcattggctgtcgctgttccaggtcccgcccacagcgacctcaatcctgattggatgtcagtgtccttttgttatggcaaaggtggatcccggtgctttgagattggacgactggggtgaggcgggcagctaatgcgcaggcgtgtattctcgagtcaggattggcgggcgagcggctgggacgggatgggattcttctcacggcgcacgttctgtgggcggagtgggcggagctgccggggtcagttggtccaagtgtcccggcctgaggtgtcggccggatccctccttctcccggcgcctcaagcggaaggtgagggccgtcccgggcagcggagggcctggccccaggcgactagagctgcatcctcagtacctccgagggcctggagggcggggcgggctggacgcggccctgcgcaccgggggcccgggaggagcggtctcgggcctgggcatttggtgggcggcggaggcctggctcccggcagaacccttgcgcgacctctttttctcctgttttcgttgtcaggcccaggcgttctttgggagagggacctctcgcggtccctgacgcagacatcgtgtagctttctccccgcagctcctgggtcgggagccgctttgcagctctcggctctggaattggactgcgggaggggcgtttgggtggaatgggacctggcacgcctggaccttcccgtggctgctctgcgagagcctgagagatgggaggggaggctgaggtggggagggagcctagagagccgtaaaataaggattggaccatttttccaggcggcgaaagcggcacctgggtttgtttcctgatcgtcttctcccccagagtcctgctgaacaagttttgggaagaaaggtttggaaaggagaaagaggatacattcctgaaaggcagggcttctgttatacagtgtgtcaacctcacactattacgcaacaataaggacagatgccattccaggttgccaacacgttttctatgcccgaggacccaaagctgtgcccatgtattctggtacctctattcctgattaaaatcagtgtagctagccattctctgagagtatagcttccatttaaatcctcatttggccaaacagttccttgatcttgtggaatttgaaactggatttatttaaccaggacaagtcaaagcagaacttgaacagatctgaacagacattatattgaagttccgtagcttgaagggaatggagtttattttcagttgcttagtaaagattccagaggagtttgacatcagtggtagcaaaatgtttggcaaacttaagattagggccatattaaagttttttccattgcataatggaaaaagcatggactgtgaagttagacctgggttcaaattcttggtagagacattggctgtgaaacctctgaaacagcttttctgaaagatatatagactttctgaaatttagtgtccatatctgtaaattgcagtttccttctgttgatttgatgaaataacatatgcaaagcatttagcacattaatgcacgaagacattattttagcagtcttagtagttctccagtatgacagatggtgaaatcaattttagatgcagaaaagttgagtggctgaagatggacgggtattaggaaaaagtctcaaaatctgcaggctcagatgtgacaatagttgtggtggaatggtggaaaaaacactgggcatttgttgtagtcttggccctgttgctaactacttctgtggtcttcagtaagccattgtcatctttggccttgattttgtaaaatgaagcagctggaccagatggttttctttaaattctttctgttgcccaaattagagctaaaaggtagagaagacgatagcagacatttattgaatacctactatgtactaggtactgttgccaacacattgtatctatccactcattctcacaacaaacccatgagatacgtacggttattatccaca

SEQ ID NO: 1881705 - DNA, 4001 bp, Homo sapiens
aggaaacgaagacctgaagaaacctgagcgttttataccaagcttgatgaagagtagactgttatggaaaactgtgataagacaaaaagatgggctaagggcagtaaactgggggaaacctaccaaggcctattcatttagattcctcttggcgtctctctgtcttcacaaataagactgcttcttttctccaggtatagagagggcatctctcacatgagggtcttatgacctgcttcatgggaaggtcagagtcctcacacctgccatttctcaaattccatcagcttaaaacattcaatatgccaaggtgttatattttggggtagtgtgccctgaacaccatcataaacatgctagaaaaattctacagcaaattagtggacaaggggaaggagcttaggtattaaagattgtggagaagatctattaaaacacagggccccaatcctcctcttaaggagtctccccttaagagacagggttcactttcatcccatatacttctgattaaaaggagcctcttatacccaggagaatacattccaggtgcagaaagccaattacctagttattcccttacccacgtaattatagaccttaatccaaattcaaaggactcctgggagatgctggaatctgtaattgtgtaatctctttgatgaagcacagagtgtgatcttttgctcatgtggggctaggtttctgtggagaagctggaaatgctgtggaaaagggcttgccccttttgtgtatatgaactctaatgtagttgaaattcctagaagtcaaagatataaatctaactactaaaattcatttagtgcattaaaatgccagttattaatttacggcaacaactaaagggaagctttgtattattctaggactacaatgcaatttatgctttgcataatcattcagtaaatgacttattgctccagaaataccatcttgctagatcccattctgaattcagtgtttctgagcaatctcatctccaatacagagtgatgacatactcaggattccaagacggcaaaatgacttgggtaatgtagtctagggcctgccagtgagtatgctgagacagaccagaaagacttaaagattccactaatgtagacaaagcaagctgagccacaacttctcggaacaccaacaggatgcaccaacaatcgacaaaaaaaaaaaaaaaaaaggagataaagtttaaagtttgtcttccagcattcccttaccctattttccccttcctcttccctactttatcagtgggaaaagttctcaataatgcaattcttactgagattcttgtgtttatcagagaaatgtttcctctttctttgccaaggaattatatattcccaacagacatggcgcttgaatgctatatttcctttggaatcaagaaaggggaggtgggggaatcaaaaattaaaaaccaaacccaagccattgttcctcttcgaggaagggtgggtggtcagtcgtcgcctgagctccgaacatcaacccgcggctctcaagttcccctcccagtaatgctgggcccagcctcgccgcggccgatccagcctctgccctaggtggaagcgggccacccggtcccttcacccactgaggcccagtcctttcgcctcaacacgaaggcacctggccgggccggagcagcagccgcggggccggcactggggccacggaaccccgggccagactcaggcctgggccagctcggctccggcctgcagggggcgctgcggcggcaccggcgcgaggcccgcgcgtgcggggagcgaccccaggtgtaagtcccggggcgtggggcgcgtgggtcaaggcggagcgacccaggatccccgcgcccgcggcggccgccgagtggcagcgctggactcgcggagaagcttgggtacctgagccgcggtcccgggtgacaccctcagtgacgccaggcgcgttccttcctcttcctctctcctctccggccccgccttcccttccctccgcccacctccctgaagcggagccgccgtcgccaccagcgccgtcatgtcggcccccgccgggtcctctcacccggccgccagcgcccggatcccgcccaagttcggcggagcggccgtctcaggagccgcagcgcccgcgggcccgggtgcgggcccggcgccgcaccagcagaacggtgaggcgggcggcccgggcggagcgcggggcctagcaccggctgggcggcctgcacggccacatcggggcggggcgggccgggccgggaagggcgttcggggccaggcccggcccgagggacgggagcgggcgcggtgcggaggccgcggggtccgggttgggtgcgggtagggggcagggaaggcacggcgcggggcgcgcgggggtgggacgcccctggcgtgggggcgggggccggcctgggaaagctggggccgtggctgtttatgtaatgcgaccccaggcccgaaacggcctcgggcgagtaggggcgactgaaaagctgggagcccacgtagtaaaacccagttacctagcctggacgcgggcgagttgccccgagcgaccccttggctgcgagagctggccagaagccgaggccgctgagtgcgtggtccggagaaggctggtgcagccacccagcagggtggattgtgcccttcctgtctcaggaaaattgcttcggttcccgaggcccagcgaacacgctgccttgaggaaacttaagtttgcactcaagtttgtagacaaaagggtgtaaatatgctatataagtgtaactgtaaccctgacccagttcggcctcaagaactgtcattgccgctgcggctgctgctcaagcttttggagtttgcttgtagtgtttgaaagggagcagatgtaaacggatttaaacgaacatctttagatctgggtgtttttcctagctccactttcagagatgaaaaaacgtgccagagttggccctgctttgaggcagggccttcatacaggcagcagccaaatgcagcacgaaagccgctttcatattaaggtcgtgggcttttagtaggctgcaaaatgatggatatgcattccctaatgctgagatttggaatgttcgcggataggggccaagggtggaggaattctccttacagacttcttagtatgtcagatgagaaccttggaaagtaattgactgaatttagaaaaatacctctgtcctgtgttggtacgagaaccaaactgcattagtactctccagatgattgacctgttttatctaatttcctaatgaaaatctgctggactttatgaattagtttaatcaacatctaagttttacaactgatgcttttcaaacatgaagtgtatcgtttgtcctgaggatcagaagttgagtgatactttagccttaatattctttggatcagccttacctatcagtattacatgctgtactctcagtagtcattgtttactataatcgcttttggatataaacctgttctgaacaaatgtaaaaatactatttgtgagcagtgtttgttcttgtaaccttaatataagttcttgtttttgtttgtttttaaaatagctttatgaaggaactagaacacgataatttagtaaaagagcccaagtcttttagaacattgtagactcatgtttaccagtgattcaaggattgtgtctttccttgattttctgaatatgcattatcatcttagtgaacagtttttaaagtggcaaatgtttattacagccttataaattttgtgaacactcaagaatgccaggatatgtactcagccaagtgtaatcaggatgttaaaatctgtaagaacaaatcaatgttttgatgccaaatatagatgatgcttgagttctcttgtttataatcactactttcctttaatgttgcaataatcatttcaacatttattgcatgcttaccagttggggactcaaggttagggtagcagatgagacagagtccctgcctctctcct

SEQ ID NO: 1881706 - DNA, 4001 bp, Homo sapiens
tccattcagtaatgacattaattttgggatttttgcacattttgcatgtgattgacaaagcagctttgaaggcttttccaaagaagaagttgcaaaaatagttgcattttgagaataggaacacaactttccaaaagtttgaaaaatactcattttagaaagtatgctaaattcttgttgttttgtggtttacctttctgtttaaagtagttaaatgctctatgtcattcaacaaatatttatcaaacagctattatgtatttagtgctgtgctttgaacacagatattggtatagcccttgtgaaccaggagttcacagtctagttgagacagaaaattaacaattgaaatgcaattcaacaaataccataaatagactgatttatattaatagctggatgccatgggaacatgcagtagaaacagtgatgagctggtacatgttgaacaactgacttctaggggagtgggttggagtgtaagggcctgattagcggtgtttactgatttccatggtgtaaatgctcccaccatggccaacgtgacatcatcaaaagaggagttggaagatgtgcagtagtataacattacattgaatttccaccatatagataaaatgcatgtaaataacctgaagagcatagataatagtaaaatgtaaaataattaggaagtgacaaattttgagtatttttacttttgcttgtaatataatttttgagtggctgtatttgaaaactagctcacaaaattactgaacatttaacaatcagctcttgcaagtgggtgtgactcagtgcaaatggacaaaccaccaggtgaaagcaatgtcaggaattactgtaggctcacataagatgaagattgtaaggaaactggaggcagggatctccagcagtgaacctctaagttgttgaactgttacagcactgccaggttcctatgccggctgtgcagaaacagaccagtattccgacagcaggcttgcagcagagaaagttttaataatcacaagttacaagccaggaaacaggaagagttctcaagcttcaatccatttcatcaaggggttctaggcaaagttttttaaggggatttgtggagggtgaggggctggaaaatttggggttatcgattcgttggggtaagggagatgaaatcattaggatgtgacaattgcattcctccatgaatcagctttttattgggccttccagacaagttggcgtccttagttttgttggtatgcgggacctaaagaagcaatgcaaacagaaagcttatcttctcataatgtcttagattttatcttcagagcagaaaaagaatgaagagtcttgtgacaagggccacattctcctggggtagtaagtagcaaccagctacaagaaagtcggccacactgcaagctggcttaataacagcagctgtaagcctagttggatttttttcccctccttaatcaattttacaaaatgttcttggggatagtttcagaatggtcaaactaattcattaattcaatatcaactttttttttaggccctactttattctgggcactgttttaggtgcccgggggaagggggcaccgcagcaaaaaccgaggtcctgccgttaggttagagagtttacattcatgggtatgggtgtgtgtgtgtgtgtgtataaacaaacgtctggcatgtcacgtggtgagtagtaagtgctatggctaaacagtagtgtcaaggggaaaatgagtggggcactgctatttcctatggggttgtgaggcagtaataagtgtggaaatgtatcaaagtaaagatcgaaggttctggcatctgacagtttgaataaggcggaagcacagaccctgcacagatctcaaccatccaacaggactgaaacacagaacttggaaaaacccacgtacctgcttcttactctgctcgcccggtctgcacaagtgcaaaatcctttcctgaagtttgtgtcaggaacaccagggtttaactagacgaatcagccgcagcggggcggggctaatttcagtccttcctttgccaaaagtcagcgaaaagcgcggactccctcgcgcatgctcaaatacgccaacttcctcctggagcgccatctgagaaggtctgcgcatgtgcacgaacgagaagtgttttttttgttttgttttgttttgttttgttttttgtcccaaggcgctgccgtaccgtccaggcggcgagttgcattctggttccgtcgtgtgtctggcgtgtggagctagtgctcccgcttattcgccactgtcgccaccgctgtcatgaaccgcgagagcttcgcggcgggagagcggctggtgtcgccggcttacgtgcggcagggctgtgaggcccgccgctcgcatgagcacctcatacggctgcttctggagaaggtaccgagctgtcggtcccctccccagccgccgcgaccccggggctctggctccgccgggcgtccccgctggtgctgcctcaccggcagctcttcgctgcttgagactagtcccaagtctgtctcagcttggcttgccctagctgaccgactgcggtctgtgccttctcagccttgccaaagccagtgaaagccaaatggtgttgttaggagggggtgttggggtcggggttttgagtcccgctgtttctaacttcgggatgcggaagtgagggaaagtcccagtgtacttttttattcgcggaaagggcaaagttcgcacctccatctttcaccaaccctcaacgactcagaacacataatggtgtttgtagactgtatgctaactcgaaccacgagctttccgcggaacttcacaggtctccctcctgccagcgttcatgtattttaatttcattaaaagttttgttgtgttttgtttttttgaaacagagtctcgctctttcgcccaggctggaatgcagtgtgacgatctcggctcactgcagcctccgcctcccgggttcacgccattcgcctgcctcagcctcccgagtagctgggactacaggcgcccgccaccacacccggttaatgtttgtatttttagtagagatggggtttcaccatgttggccaggctgatctcaaactcctgacttcaagtgatcggccattcttggccttccaaagtgctcggattacaggcgtgagtgagctacagcgcgtggccaaaatttcactgaagtttgacaactaccgcccttctccacgtcccaccgccccagtcgtaacgccctggtttgaagcatcttcactggggatgtgttgtattggttttcagttagtttcacttacggaaatttaaatatctcagtaaacctcattgtatgcatttatcatcacttctcgaaatctgtaaataattgtaatcaaatgtacaaacgttttgcctctttgcggtctctatacagtggtgaatttatgcttgaattttagaaaacaagcagcgtggcaaaatacacgttaaaaagaaaaactgtattcctgtagtattctagagaacggtagttttattaaatataatcataagtttttttttttttttaagggcaagtgtccagagaatggctgggatgaaagtacacttgaactctttttacatgaacttgcaatcatggacagcaacaatttcttaggcaattgtggtgtgggagaaagggaagggagagtggcatccgcactggttgctcgtcgtcattacaggtatctttttttaagtagtacaggagatacatcgtttatttatttttggttcaaaataatggcagcagtatttatcttattagattatcaaatgtcagtttgtaaaccacttcttccctgctctaatggatatgtaagccaaatgcaacagggagatggaaacaattttatctcagcaggtgcttttcaaagacaatagagtaaaaactaagtgggggttaccctgtcaggttctgggtgactaacacaggctatacgttttcttaggaacggttacccta

SEQ ID NO: 1881707 - DNA, 4001 bp, Homo sapiens
gaaagctggcagaggatgcacgtgttttactcacctgagtgtttacaatgctcgtgaggtgcctccctgatagtaagtgctgctctttcttaacattcttttttcctttaaaatttgtttcaatccatgaggtaaaaaataatgacgatatagatagacgaacagttcatgttgtttttccctgcagtcaaatagacaaaaatttcaacacaaacttttattcctggtatttggcttaaaagtaaacgtcagctacgtcaagaagctaatggtgttctctgcatatctcaccagttactgattcttctacttaatataaaaatgcatttccaaaatcttaccactggggggcagcatcgtgcaaagctagcctttagtttttccttcctgtgtccagtatagagtgctcctaatatctatcacagactggtgctgtgccattaatggaagaagagcgagcgtgcgtgcgtgcgtccgtccgtccgtctgtctgtctatcggtctattttccctttgccaaattctttcctcttcctttttttcccagttctttgtgagttaaaacttctgtttttgaaacttccaggagcttaattaataaacatgaaaaccaagttgaagctggcacaaagcccttttttgctcaaccacttgggcatgctagggtaactgtagttatttacatttggcatccaactgactcaaagagcaacactgcttttttctttcccccctatgagtaccgaagctattaaattaaacaggttaatgtggctacagcatttcgccccctactatcccccagctatagtaaatctgccacctgtttatttccataaaaattcaattacagcaccacgagttattcttcttatgtgagcaattaactttaggcagtttcaggccacagagaaaggccaggctggcctgctcctttcttcttcgctccctttagccgcaggtcgttctttcgctaagtgactgtgctccttcacaccagtgaaaaaatgaaaaaggaaagaatagactagactgctgggcactgtcacgccaatgaaaaagcaaaaagcgaaaaaccgcaaacaatcttctgcctccctatgcccaagccttagaggcccggggaagttagcagcaagcaggcagccaggaccacaggggcacaccggtgttgttcaatagcacaccaaaatgaagaagaaattacttgcaatgtgttcattttctttcttctttatatttgtaaaaaatgtgaccaagaagggaaaggctggtaaaatgccacagcgttctggctaaagcaacaacgcaattgtgaagagagaaaactgcattcatccacatgtcccagcaagagctatcaccaaaggcattgtgaagcagttgagcagttacatctgctctcctttaacaggaatgagtctttagtacccggttgcaaatgttgacttttaccttttctttaaatgtctgctactctttgtcatatttcttctccttctctccaaattctaccaataaaagtaaaaattactgaatcgtacatctagtgattttctgcatgacctaattgtcgaacaggtattgaggtacttgctttccatcgatccctgtaatgccattgacactgacttatatttctagtaaatgtataaacatggttttaagagtgggttagactctgaaataatctttgagtaaatcttaccccaggttcaggttaaaacaaatacttcttcgtaagtaggttggtaccagttcctattgagaggtgacagcttgctggcagccctcgctggctctgggcgcctcctcggccttggcgcccactctggccgcgcttgaggaacccttcagctcaccgctgcactgtgggagcccctttctgggctggccaaggccagagccggctccctcagcttgcggggaggtgaggagggagaggagcggcggcaacggcgcggcgggaaccgaggatgcgcgcggcgcttgccagacagaatgagttccgggtgggcgtgggctccgcgcgggcgggaaccggggctgcgcgcgttgcttgccgggctgcgcgcggtgcttgcggggctgcgcccggcgcttgcaggccagcacgagttctaggtgggcgtgggctcggcgggcctcgcactcggagcagccggccggccagcccgcaagcaccgggcagtgaggggcttagcaactgggccagcagctgctgtgctctatttctcgcagggccttagctgcctccctgcagggcagggctcgggacctgcagcccaccatgcctgagtctcctccctgctctcctctccccgctcccccgccgtgggttcctgcgcggcctgagcctccccaacgagcgccgccccctgctcccggcgcccggtcctaacgaccacccaaggactgaggagtgggggcaaacggcgcgggactggcaggcagctccacctgcggccggtgcgagatccactgggtgaagccagctgggctcctgaatctggtggggacttggagaacttttatgtctagctaagggattgtgaatgcaccactcggcactctgtatctagctcaaggtttgtaaatgcaccaatcagcactctgtgtctagctcagggtttgtaaatacaccagtggacactctgtatctagctaatctagtggggacgtggataacctttgtgtctagctcagggattataaatgcaccaatcagcaccctgtcaaaacggaccaatcagctctctgtaaaacagaccaattggctctctgcaaaatggaccaatcagcaggatgaataaaagcaggctgccccagccagcaatggcaactgtacagggtccccttccacactgtggaaactttgttctttcgctctttgcaataaatcttgctactgctcactctttgggtctacactgcctttatgagctgtaatactcaccgtgaaggtctgcagcttcactcctgaagccagccagaccacgaacccaccggggagtaacgaacaagtcgagagtgtgccttaagagctgtgacactcaccgcaaaggtctgcagcttcactcctgagccagcgagcccatgaacccaccagaaggaagaaactccgaacacatccgaacatcagaaggaacaaactcaggacacaccgcccttaggaacttttaacactcactgtgagggtccgcagcttcattcttgaagccggtgagaccaagaacccaccagttccggacacactatcgaagtgtagttattatcaataaattcagagaataagaaaaacatcaaaagagaaataattagggtataaatagatgatacaacccaagggcaccttgaacccctatctaggacaggtgtatggagggctcagattactcatccaaattgtcatgtgtctgagttgattcctgagcaacattagctcaggcagtgttgctgggcaggcatggatgtcagatgtcggccattcctaaaatactcccaggggattaagtgagtatataaatatctccctcctgtgttcctgcatctgaaggtgccctacacccgagagcattagtgtgctgctaggataaaagaatgtaataaaatggactttgaaggcacatgtcaaaggaaaaaatacagtctaattaaatttaatcatcttttaaatggttactcaaaagagagactctgttagaagttcaaaaggcctatataaatcctcccgaggcaagtccataccgagagctcacatatggcagttggaagagtaaaggaaaatttagaaagtttgtttcatcttggtagggctgatgggactttaatgaagacagaccagtatcacatggccctgagatcacattctctgctgtcaaatgggttcaagttcacagtcttgaaaattgtccttttcctatattcaaatgttctcatgagcccttttcttttcagttcaaagtagatgttaaaatgagttttaagtgtttattctttat

SEQ ID NO: 1881708 - DNA, 4001 bp, Homo sapiens; identical to SEQ ID NO: 317363

SEQ ID NO: 1881709 - DNA, 4001 bp, Homo sapiens
tgcccttcctggacagctcccttcctgcccactcctggcagtttccactaaggcttgtctctaaatgtctgcctcacagacacgtgtaatcctgcccagatcaacaacagctcccgctcacagcgggccccagccactcaagtccagaagggtgtctcgccgcccttagcgtttccactggcatgatccctataggcccacacttgctttacctccacaagtctggtgtgagtcttcataaaaacttatgaatcaacgagctgctctcttctcctgcaaaaattatttctcctagtttgcaagtgggcctttacatgcgtacatgtgtgaagtatggttacgtggaaatgagggattccaccagccacacggggaaatcctacttggtaatatgctccatatacaccctctaaacatggatgaaggatgccagtccttgttgcagtgtgcatgtgagctggaggtctgtggtttgttcatgcaggccatgacactgagaaggcctctggtggagtgtgacttttgagttgtaaaccatgctgttgattgagcgtggctcccacagcctggatatgttgcctttagtttgcttcttccaaatccttacctgagaatgaacccacagctgtagttctatggcatgaaaacaagtcacttgcattgactgctctagtctcaagatggctctcaccctctgccaaggacaaggggtccgagcggtacttcctgctggcctggagctccctgagggcagcagccttctctgccctggtactgtgcacatcatgccagaaaaactcaagtccttgctgagtgaatatagatctgataactattctctgtgacttgtggagaatgaaacccaaagcgccacatcctctgtggcaggctttatgaagcataggattaaaatgctaaagcaagtcgctaaccatatatatgctaacatatggatgtacaaatttcaatctctcatgcaaaagggccaccggccagcatgtgacctggaggtcaagagatcgtttggtgtggaatttagtcatccaactaggaaacgagatcagttatacccaaggaactggttctgtgtattgtaagatatgaacccatgctggaaccaaggtctgataacaatctaaacagtgaatctgtgatagactaactgggttagtcaccagaagtaaaccttaatccaggttctgatattcttaaaattaagtcttagaaaagacgtgaaggcataaaaaagtttttacttgctaaaatttattcccttctccaatatctaaaaacaaacaaataacacatatcacaggtttttgttcaagtacattatgatcttgtagtagttgtcaaaaatctttccgaactaatttgacaagtcagtcatctcaatgcccataccacggctctcataaggagaggaactcacatattctctctggagggtctccatcccgctggcttagaaggagcaggtgaagggcagatgccacttgcatggggctcatcaccaatggccccctctggcaaacagggccacacagcagccattcccattcccgggtgaccctaaggcccagtacccaaaattccagtggctcctctcggtccagcgaaactgcttccacagcaagcagcccttgaggatgcctccaatccagagcagggccaggctggctgtgccagcgtagcactgattgtgatcactggaggtgtagctgcagacggagataaggtagcctgcagagcatctcagacattctgaacttctgtgaatgtcacaggggtccgtactaactgggagcagcaggtcttgcacacaggacttgcctgcactactacctccttcagcaattacaaaggttctcatctatattcataatggttcatggcctaaatctctcaaactctgataggtggacctgaaaccacatcaacaccaactcctgctctgattccatctatgtctgacctggttcagggatagaggatgagggaaggacagagtcactcaggttttcacagtcctgtgcccccttcatgccagtcctctccattacctgattcttttttttttttttttttttgagatggagtctcgctctgttgcccccgctggagtgcggtggtgcaatctcgggtcactgcaacctccgcctcccaggttcaagcaattcccgtctcagcctcccgagtagctgggattacaggcacacgccaccacgcctggctaatttttgtatttctagtagagacggggtttcactatattggtcaggcaggtcttgaactcctaacctcaggtgatccatccaccttggcctcccaaagtgctaggattacaggcgtcagccactgtgcccagcccactacccgattcttgacaatttctgatcctatacccaacagaacttagactctgtttttattttacctgtcccttttgctccttccatttccatcactacctttagactcatttgcctgcatatccattttcaaaagatcctgctctaggccaggtgctgtggctcacacctgtaatcccagcactttgggaggccaaggtgggaggattgtttgagcccaggagtttgagaccagcctgggcaacacagcaagacctcatctctaaaaaaattttttttaattagccaggcatggtggtgcatgcctatagtcttagctactctggagttagaggtgagagaacagcttgagcccaggagtttgaggctgtagtgagctatgaccacaccactgcactccagcctgggcaacagagcgagaccctgtctctaaataaataaacaaacaaacaagcctgctcctgggtttagaggctcaagccactgactcttcatattgatctggacagatccaaactttctatcctggtttactgcccccttccccaaagccctagttataatatacaactttctactactataatgaaggcagcataacagagttctggaccttctactaactgtatgatataattttacctctttggactcagttttcttgtgtataaaatatgaagattaaaagacaaagggaaaaaagtaacattgctgcatacttattgtgggccaagcagacattgcataactcttcagtcctcttagcaacactgaaggaggaaaggtactgtcacttcggttttccatatgaggaatctgaaggtcagaaaatcctggtgaacttgcccaaggttgcctggtctaagttggagtccagtcccacatctgccccatccctcttttccctggtccctttccgctccaacatgctcctgtactttgcttaactgcaaccacgtgtgtctgggctccgaccaatccgaaaaggtttccagtcactccagtgaagatcgttttcactagggggccatggggcttcaatctcagagaagaggctaaaacatgtagccaggctaaaccggaacactggctaacaccagaaatcttgcattatctgtgacagtgatgtaaaaagaaagcaaacccacaaaatctgcttctatccattgctcaaagtcacagagcagcagcagcaaaatccttcagaagatagaagctcttccttggcacgcagggcatcacagttatgactgtgagctgccactacagacacaaggacgtggttctccagacagggccctgatcagtccgggctccaacacttaagaaacactttttggattctgttcctaacccagcttgtctgtcctgttctctaatttaggtcttcattagaggtgaccagcatgagtgttaacctcctctttacaaccctgatttttatttttcttagggacaaggtctcgctctgttgcccaggctggagtgcagtggcacagtcatagctcactgcagtgtccaactcctgggttcaaatgattcgtccacttcagtctcccgagtagctgggactacagccatgagccaccacacccaactaattaaaataaaaaaatttatagagatgag

SEQ ID NO: 1881710 - DNA, 4001 bp, Homo sapiens
aaacccttttacctgcctgattttaattcaaggatcatgaatacaccatctgaagtagtcaaatgatggaggttctcacacttcctagttcagccaccaaatattcttttactgtgtgattgaggctgatgctaatgcaactaagtcatcataattataataaaataccaccatggccagcttttattaagtcatgctgtgcaaagacaatctgcatacagatccaaccacaacaggacgtgattgattcagcactgctggctatcccaataaagatgctgccctcagtctctgtgatcaccaatacagccagtgttaatgcacgtggctcacaaggcaaaacaacccacgcagttcagcttgacaagccatgaattttcagtgatgagcataagctttcaaagtctataaaatgacaatggcttcatcctcttatgtaggaagctcttgcagaaagaaaagaatgaaagaagggacaaaatgaaagcatgccagcctgaattatagtgtctggaaagctcataacttacagggcttagtcatgtattttccattccaaggtacacatgcacgtaatacatgcagtggagtcgggtgaacctcagaacaagcctggtgttttttctaaatcaaccaagagggtgaacatatgataaaaatcaattagtcaaggttttaaagatattaaagatttctaagattcaagagcaaaaattatttattaaaaaatgctcactagcaacaagtgataatgccagcactcgtcagaagataaccacattatcatattcggagaatgcttcccactggctccagatcccattcccaagggtcaggattctggggggaatgggaggagaacagaaatgtaattaggcttctatttgctgcttcataggctctcaaaatggaagagatcagaagaaatccaaacggtatcagcaagaaagttctcatatgtatctttaattatcatacagttatgagccatataaagacgtctcagtcaataatggatcgcatatacaatgatggtcctataagattataatggacctgaaaaattcccgtcaccccgtgatgtggtagtcattgtgacgtcttagtgtaatgcgttacttaagtgtctgtggtgatgctggtgtaaacaaacctactgtgccaccagtgatataaaaatctagcacctaatattatgtacttacagtacggtgtatgtatttactatactatactatttatcattattttagcatgtactcctactaataaaaaaagttaactgtaacatggcctcaagcaggttcttcaggaggtactctagaagaaggcattgttatcctagatgacagctctttgtgtgttatcgcttctgaagacattccagctggacaagatatggagggagaagacagtgatattgatgatcctgtgtagggctaggctaatatatgtgtttgtgttctagtttttaacaaaattttaaaaagtaagaaaaaacattaaaaatagaaaagcacttataaagatataaagaaagaaaaacattttatacagctgtacaatgtacttgtgttttaagctgtgttatcttgagtcaaaaattataaatgattaaaaagtttgtaaagtaaaagttacagtatgctagagttaatttattattgcagaaaaataactgtaaataaattcagtgtagcctaagtatataatatttatgaagtctacagcagtgtacagtaatgtcctaggccttcacattcactcatcactcactcattcaatgaacgatgcaatttccagtcctccaagcctcattcatggtaagcaccctatacaggtgtacctttttaaaaaaatcttttacaccatattttcactgtaccttttctatatttcggtatgttcagatacataaatacttaccattgtgttaaaattgcctacagtattccatatagtgccatgctgtatgggtttgaagcctaggagcaataggctattccatatagcctaggtgtagagtgggctattccatctaggtttgtgtaagtaccctctatgatgtcacacaatgacaaaatcgcctagtgatgcatttctcagaatgtatctccatcgttaagtgtcatattaccgtatataaaattctctcatgctaacaactggcatactatcaatttctcctgaagagcataggtatagtactctgcactgaactgatgagtgatctctggtatcgttgagaatcccacattctcctcttacctagtacttggtttcttcctctagaagatggcacactagtactatcaatgatatccattttgaggactttttttcaaaagaagactacgttgtcttcaaaacaaagaaaagaaccatatagatatcaagccatctttactaactctatctttttaaataatctcattcagaaacttcttctgacaacataagtcaagtcaggaaccatcagaacctacaactcagaaagataaccaggtcgccaatcatttactcaactattccaccatccagtattgtatggttgaatcagaaatcgtgctaaaacatgtttttaacctggcacttcaaagtattcacattttcaacaatatgctttcagcaaatgaattgtgtcatgaaaattccagcttaagtctaaatggatcagccataaaggcaaattatctgttgaacaatatagtcagcttctgtaaagaatgtactttctatgccaaatatgatctttccacagttgaataaacacttggtgcaatgaaattgctggcagtcctcttggtggtttctgttcgtgtgtatttccctgactgttgtatctccatctcatacactttgccagtcattcaaaacagttatttcatgcatcaggaatatcaagatgcttttgagatgggttatgtgcattgtggctgatgcacttttaaaaactatcaggttatcacccaccagagaagcctggagaaacatatacattattctgcaacaagttctgtaatttacataggtaaaaggatttaccccgacaattctaaccgtttttacaaaaaggctctttggcctttagagtcaaatagatatttatgataaaagcaacttgtatgcatacttccctgaagcacagtatgttttccatctttaagtggattatttatgggcaccgtaaaattaaaattctggaaaaaattatgtaagattatgcattcagatactttgtgtattttttccaatgaacttgaaatttaacttgaaagtaatcatgaactttcaaagaatttcatagcatacaattaagtaatgaatttcagtaatttacaatgaagtaaaaaaccaaaggtctgttttatggtatttggggaagtctaattgtcttagtatatatatatttttttttaaaaaaaaaaaataagatctttttctaaaatgttgaaaataatgactttgaaaaataatgtgttgatattttcttttacatttaatcatactccttttaataaattttaatcctaaaatgccaattaaagcagcactacttctaaatgaagaatacaacaaaaaaggaaactagtcattcttcaatgcagcaggccgacagtgccataggaactttgtgatgtctttttcaaatgacgtttcaactcaaactactagtggttttaggaactcactccatgccccagaacccctctgtcagaaaatatcaaagcctatacagcttgcatcctaatgttatctctgtattatttttcctatcatccactgcaaagcatcagtcttgaaaattctgtgatagtacttgcctcacgcatgtttgtaatttatattttaagatgcttattggtgaagcaaaatcaatagtgtcaattattcaatgcacggcaattttttttgtatattacttatatacaatattttacatttccatcagacagctgactttgcatttaattagaatagtgaggttacattttagaata

SEQ ID NO: 1881711 - DNA, 4001 bp, Homo sapiens
agaaagcccctgagtgtttcatacattttaacagcttagtcatctctagttaacattatgtcttgggagcaggctatgacaattgtcattgcagtactaatacctctaatttttaataaattgttttctttctaaatttattttttatgtctcacatggttctctgcatttctctagataaaattagctatgaattgtattctaagggaagaaaattaggaaagaaatgcattattgctgtctatatgcttaagggaagtacatcatgagggtagttgccagtgacttaaaccattctgaacttaagaacagcactttttatcatctctggcggaattttgctgtggcatatttcctatggtgaatatgaaggaattatatccttctatggaatcatttgatgctattactttataaaatatacccagtttttacatgtatagtcttttgggagggtatggtaaaggatatattttaaaatttatacggttttgccctcaagttagaatctacattctagagagttggatcattggaaagtgattagatattcaagcacttaaatgtctcattgtcgattgggaccaattttgttgatggattggctgttaatagttcctgggttactaaggctgtatattagaatcacatggctctcctcccagaaatcctgatcctgggatagcctggtaatctttgtttctaacaagtacttcaggtgttactgatgtagctattggattggtgtttaggaattactaaactagatcatgtaataacatggttttcaaataaaaggcattctgtatttttgtggaatatttaagacatattttaaaaaaagattttaaagaccagtagtataacaaacatctctgtatcccctactcattttaagaaataaaagattacgtgtaaactggaacccctgtttttgctcctctgattctgctccctttggtaaccactgttctgaatctgacgcttatcattctcatgcatgtttttatactgttattacatatgtatgagtccatgacaatatgtaatattttatatatttaaaaatgttacataatattggagtttctttgtacaacttatgttcatccaacattacgtttttgtgatttctagattatatactttaggattaccttgttaagtcctatgaaaaacactttgggaatttattggaatttcgttgatttcatttggggaagattggcctactgtgctcttgagcataatattatttagtgcacttttaagtttctccatacagctcctgcacttactagatttatttctagataactggtttttattgtatccttttaaaagttacattttgttacagttgctcttggttaagagagcattgccttttttctaacaactgtgctgaattctccttaccagtttggatatagacgttctttactgcttgttatatcagctgtgatgcagtgttcttttttctaaactcagcacagaggtacatgtccctcttctagccagaaatggaaatggagctaagagttttggagagtaaaatgtagtagataagtaatatgtaccagcaatattatttaggcacatgatttttttgatcctcgtagtaaccttaaaatgtattaatacataggtaagattttaattctactccatatgcgatgaaactgaggcccctacaagttaagtgccttgtgttagaactagaaaatagaggcatttgacatgaaaggcaaaattcactatttaaaagacactatgaatatgtcttctccatccatactccccctcaccctgcgctaaccttccagcatttcatcttgcaatgcagcaactgcctcctgactggtcacccccttcagtccattgtctacagaaagggatcttttaagatgcagacatgatcctcttgttgtcctacttttccctactcttgagaagtcctctagagaggtctgcacattctggtcctttcctccctttccaacttcctttgtactcttgcatgctttgtgtgcttgagttctctggaaacattccatgcacgtttcctctatctgtacctgtttctcctccctctttgtctagcccactcttatttatcgtttgtgtctagcacatggtcattacttaataaactaagtaattgtgtgatggaggtcagtttcattgggaaacctttcttgatacctcctacttcacacatatctccctactctgcttggggaggttaggtctcatttcccatagcaacctgaatttctttagaatgttcttcacacttataatgattgttctgttggtcttctctgcaagatagtaaataaagctccatgagggcagggactatgtgtataattaacatctctatttttagcaacaagcataatttgataaatttttgctgttaaatggtgatgctgatttttaatttaatatcgtcatttggccatttttttagtgctgaattttcagtttatctataccttttgaccatcttcttcccttctttggtcattttatggctattacacctctgatacaaggtgaaaagttaaaaccaatactgagatgaatttgttactcttaataacatatgtgctaataaaataatggggaagaggtggaaaactggcttacataggcattttgagactccacaaatgccatttcagcctctcctttacccaggaatcttgtgagtcatggatagaatagaacagttctggaaaacatggaggctgaggctaagatctatttaatttgaacatatcaagattttatgtatatttttcacattatgaagtgactgatgtgggaattggaacaaaggactttttccagagaccactatgaagcagtccctgtaccttctgaagagaaactctactaaatcaaagtgcaagaggcagccagatgtggtggtacatgcctgtagtctcagctactcaggaggctgaggtgggaggatcacttgagccccagagttgaaggctgcagcacactatgatcatgcctgtaaatagccattacgttctagcctgggcagtgtagtgagactctgtctcagaaaaataaagttaaaaaaatgcagcatagtaaaaccccatctctactaaaaatacaaaaataagcctggcgaggtggggggcgcctgtaatcccagctactcgggaggctgaggcagaaaaatcacttgaacctgagaggcgcaggttgtagtgagccaagatcatgccattgcactccagcctgggggacaagagtgaaactccatctcaaaaaaaaaaaataaaaatgtgcaaggtgacttagcccctcacactgccagaattgaagccctctataaagccgtacagagtacacctgggtattgtttttgtgaaatcagaaaaagggggtctggaattctaagctgcacatatacacagctcaacactgaattattttgaactttgtcactattttacttctgatgaagtatctcaaagaacagtttagcagtttaacatatttaagtctcccaaacttggtgacttctgctgaggtctcaatgactcttgaaaaaaactcaaaaattgagaatatttaggtttagagtagtggttttcaaagtgtcgtccacagagtagtagcatcagtaccaccttggaacttgttagaaaagctaattattatttttaaattgacaaataattgtatatatttgtggaatacagtgttatgttttggtacatgtatacattgtggaatgatcaaatgaggctaattaacatatctgtcacctcccatgtgtatttgcttatttctttctttttctttttttctcttttttttactgcctattctctgaaccatttttttgtttgtttggttggctttttttttttttttttttttttttgaggtagagtctcgctctgttgaccaggctggagtgcagtggcatgatctcggctcactgcaacctctgcctcccaggatca

SEQ ID NO: 1881712 - DNA, 4001 bp, Homo sapiens
acagctactaagtggacagctgcagttcaaacctattcaagttaaggacacttgttttctaatttagaaaccatcttaaaatgacaaaaaagtaggtagaggttttatttgaaagcatggagaatgtgccccaatttctcattctgggttttgtctgccttttgtttccattttcaaaatatgtaaaataaatggttaactttaaaattcctgacaatgacagatcaacaagttttatttctctcacctgtggaggaagtggcctccacccagttttactgaattaggagggaagtgattttttcaagtgataaaaagaaataaaattccatgctcttcccagaggaggagttcaacaattgggaaagtggcgtgagaccatatgttggtttgtaaaaggatataacttgtaaagatgtttcctttgatgcctgtgatgaatatggatgtgtttcccttctagagggtcctgattaaattatgcaattaagagctgagctgaaggatctaaatataggaagagagttcaggccgtcctgctttgtgtctgtcagttcacccctacagatgtgcatgtttgttgtcataaacagcacctgtgagatcagtggagcgagagaaatatgttccaaaacatgaaatacagcaggatttttgtttctttttttttttttaaagggatagttttttcctcctgtagttgattccattttcatctgtgaatttgatatttggattaccttttttttttttaaacttgactgagggacttcagtattagtcagtactggtttaaaatatagatatactacttaccagaatatggtctggagaaagttactttaacctctgagcctcaagtttattactaaaattgagataatgatttctaccttgaagcattggtgtgaggagtcaatgtaataatgtttgtaaaaacaaccagtataatgcttgtataagttggtaactcaaacaatttcgtttattagctactgacgaatcattcataactagccacttacggaaatctaccacatttagcattctttgtagtctaaaattgctattttaggataactgactcaaagagaatagttttttctgagacaactaccatagactttctcctgggatagtcaataaaattaaatcttaaaatgtctgtggtcttcaatctttcctgtgtttgaggagtgagcatttgtaggccaggagtctttacagtgtttgagttgacatgaatgtgaatggcctttatcaggatgagcttatggggagctggacatcttgaaaggctaccgtgtcctgaaggacagtatgccattacaagcatgaatttgggaatgggggttcaatgggattaaggaatgttgtacaacttttagaggaaatggcaagaagatatagaaaagccaactttgtttgttgaagttggggacaataagaaaactttcaattgccttaactattcaagtaatcatctaatcagacaaaacagatgtgacagctgctattttatagggaatctctgtgattaagaaaaattaaccaggtactctattagcagcctagatttgtcaggatggaaggatttgtgtatgcagaacagaaccagaaagaactctttttaaagaattttctgatataatgaagatacgttaatagcacacttggcacacctaaaataaataaactacagttatatccttagagactcttgtcattctgacatccataagttccttgcttccttttcatcaaggagatgctacttttgaaattgtttggctgaaatttcacagcttcagtgaacttacaagtggtaagtagtaagctggaattcagtctacatggtattccttttctttttgattcctaagatttctactcacttaacactgttgagggaccaaattgcatctcttgctggcatgtcacttaagttatactggagagactggaagacttgctgtcagtgtctgcgctttaaacgcacagtgtctgcgctttaaaggcaatagtacctgcattattgcatcactataaatagaatttcacgaactgaacctctctcctatctccaacccccaatttctccagatttagaaaatcagtctccggcaaaaataaattttcagtgggaaaaatgtcaaactagctattctgcatcatcagtcccatgtttggaagtagccagatcaaggctgaatagtaagaggctcagtaagatggaactttacttgtggtgtttgtgatggtaggactctcctgctgctgtgaactgagagcagcagagttctgtgttctctgtgggtctccgtatggctttcttgtgtaggaatttggtttaaatacatttttcccctaaggactaaagcgaaatagagttcattatagcctttttagcaatgaagttaagcgctgtactttatgaagtacgttagcatcagtaaagagcaaggttttatccattttcatttttctttctgttctagaggttttttcctcccttattttgcttagtggtgagttttatttagctaaatttgactcatttgagattgagacaaatgttgaaagttgagggctaactgctgttttaaaacaggaaaaaggaatgcaggcacttcacctgtttcctcctccaatacaaatacagcaggtcctcagacaacctcatttcattcaatgccatttccttataacgttgatgagaaaaaacattcccagcctaggccactgtctgtgtggagtttgcacattctccccatgtctgcttgggttttctctggctactctagtttcctcccatatcccaaaggtgtgcacgttaggtgaattagtatgtctacattgtccccattgcagtgcatgtaggtgtgtgtgtgagtgcgccctgccatgaaatggtgtcctgtccaggggtggttcccaccttgtgccctaagctgctgggatcggctcgggccactgcgaccctgaattggaataattgggtaaataattatcttgtttctgttcatctttcttaaatgtatatatggctcacatttatttcagtgttaattttagaagtgttttgggtctcagaagtttggtaatgtttttgtgaccagaaatgtcctgaaggaacttaactcttgtttatataaattagctgatgctaaaattaattttgttttacatcgtttcacttagagccacagtttccaagaacccgtaaggactttactgtatctgaaaacctggttagctcctaactggagtaactgggttaaagaagcatttgaacattatttgttgaaccagatcaaagaacattgctactttagggtattttctggaactgaaataactagatccatttctgtttttatattcattgtaatggcattggacttgtatagcaaattttaacttgtcttttgcctgtctgccttaaccttaagggtagatatttatcattttccttaaggagctgtacaataatctttcatgctttttgttaggaaccatttacaattcctactgtctgctacttatcgttgtgttctacttgttctagagttctgtctccacctgtcttcatttttaggggtactgttttttaggggtactatttctctgtttggaaatgtgagcggatggcagtttctgcctcagccctcttgctgggccattgtctcatgtgggttgtctgctgttccacatttaagtaatagttatttcagctttatcaaaagtttgtaagttcccagttcttctggacttctgattaattcagcctgattttatttagggcaaatgattatgatcccctttccattttgtgaatttttcatattttaccaataaatctcattgcaattctttgcttacaagatggcttgaaagatgcaagcaatgatggattgctctttattgttttaaaatatttattggccttaaattgctgaaataatatggtttttccaacctttgtgtttttatgcattttt

SEQ ID NO: 1881713 - DNA, 4001 bp, Homo sapiens
cctatcttccccatatattgattattcgtgtttctcacttccatggtagtgtgcacgttatttgcttaactttggcatataaattcagaagaaatatcatttaactctgtgcctaaggagggtatttagaaataaccgacgcagctaacatgagaaggcaaaaaaaaaaaaaaagaaaaaagaaaaaaatcacactaacggactttttttttttttctaacaacaaaaaaccgtgagacttcacttggggtaaccataacgtcgtcaaggctgtggcgtcacgcctctaagcggatacggcagaagttttggggccagacacaagacttccaagtttgaatgggcagcgcaaaacccagacaagttttccggtagtgccgccaacccctgtcaggcacagaagacacagcgagaaccgtgagccgttacgaaagcctaaaacactgagctcgcgtcctgccaagcagcaggcgcacaaacctacacctccgagcgctccctggaggtcccgcccactcttctctcccgagccggctagagatctggaagagggcgggccaagggtgaggagggcagtatgcgcatgcgcgctcaggacccagtcagtgagccaataaggaatctcgcgagtgttgaaagtcggtggcgtaggtcgtcgtcctggatgctggcgagatagatgttatcttccagaggaagaggaggaggcggcgaagcgttttcccagcctcagtctctctttcgttttccttttcccttcccccaaccctccgcccttctctaaatcagccggccttccttgacctcagtgacccgtctggccccgcccaccctcgtcgacgtgattcccgccgtgaggtaagcgccggtggaacctagagccccgcggaagagcagaacgtttgggagtgtgcagctcctgggcccggctcaggcccgtcgcggaggcgcggcgcaggggagcgctcgggtgggagtctcgctcctccaccagtttattgcgacgtagcatccaggcctaggcctccccgtccatccccgccggactcgggcctctggcagcagcgggtgacgcagacggaacatcatgtcgtccgcggccgagcctccgccacccccgcctcccgagagcgcgccttccaagcccgcagcctcgatcgccagcggcgggagcaacagcagcaacaaaggcggccccgaaggcgtcgcggcgcaggcggttgcgtctgcggccagcgctggtcccgcagacgccgagatggaggtgagggcgacttgcggcatggggagcgggtgcagcggggaggaggagctggctccctcgccggatcgtggcgatcggacgcagagccgggtttctctctctgcaccagactcagcttcacaccctgtggatacgaaatgatgctctcactcttgctcccttgttcttaccctattcgagctaagcaaaatggatttctggctcctcacatttaaattatttgtctctttcgtgaatcctgacaaatatttgaacgctctcagtgaacagatgttcttggttaccgtggcccgggggacccatcgtttttttcccactagactcccataattccctctcctacctctgaatgtggtttttagtttccaccaaacttcggggaagggcgaggagatgaccccttaggagcgggatgcacgggcggggtgaaggaggcatttaaaagcagcgcgtccgaggacttgggcctccttttcttcttcccggtccttgcaggggcggtatctgttgtgggcagaaacaatggcgagagctggatggccgagtgcgcagtggggataagcggggcgcagctgcttctgtgaagggagagaaggcccctcccaggcactattccactggaagggaagcaaccaaggcagcagcagctgtctcggatcccccgtctaatttaggggggatgaataagtgtaggaatgaattagagaaccaggcgcagttggttggctctcagtccggcacttttctctttttggcctctggccttaagaaaaaaaaaaattagtaccactcgctgccgagacttatgggtttgggttgggcaggggatgctgacagtactgagggggctggaaagatgggggaagctgccaggcgggtaaattggatatgcttccaggctttgcatctgggaacaaagtaattgctccttccaatttttattttcttggccttcgacctgttttgagatattttgtgagtcggagcccaaagatttctgggattttcctatccttagacagaatgaaagtaatactgctccgaagatgagtcttgatgcagaatcattatacagtaagaaaatggtagcgtaatttaccattgaggcttttggcacagtagttatatttgggtagctggggttaagtaacattaatgttagtaatcatttaaagaacttttagtggtgagggtaggtttagtgacataggaactcctgatagttcctgtagttttgagtgattaagataagattacttccaaattaaaatatattcagtgttgcttttttttccttaaggaaatggttcttttgggttactagggctctttaacttggatttctgttccaaggcttaaggggtttgacacaaagcaattatgtgtaaatgtgcagttctctacaaaaattgtttatagtttttcctcagcttctcaaaggggtctgccatccaaactttggaaaaatgaatgtttcaccagaggtcttattaatatctgaatgcagagtaattttaagcctaaagcaagtcaacatttttgacttgaagttgctattttaaatgaaaattgattttaagttcaaacgtgagtatagatgttatcactaccgtattaaattagtgatattttcatttgccagatggggaaattgagttctactaggtagaacctgtaataaaactcggatctgcctttaaaagtgagccgtttcccacccatcttgctctgccatgttcttaccaaaaaaaacatatttggcggttcaatttattgaataacattgttatttttaccttcctagtatagaaatattaggaattttatttttttatccatcttatcactgacacattttttttttggttgacattatagtgtgatttttttttttgtcttttaaaatgtcagtttcctgtttaacaaaattcagaattactgcaattcatgatataaactaagtttgagcacacatgcttaatatatatgtcacaacttaatctgttttgcacttggaaaatgaatattttataaatgactttttcttgtttggaagtatgatctaaggtgtttttctaaacagagtaaacccagcattcatgaatttttttttttttttttttttggtgacaaagctgattttcccagaaatagccttcctatgtattcagttactttttttctttttgcttgatactaataggtcaatggagcacttgttttttagttatccttttggcagtgtggaactcttctgtgttcatcctcatctctattgactagattgattaaatagtcacctgtataccaataatgtgatgtcaagatgcctgaagcacattttatttttgtaggttgcatttcatggcattttggaattttgtaaactggactgggtaggtggctttgtcacttacatatgtagaccagagatttatgatgaacatagggtcacacaagtgccaagggtcttaacaatgaagttagacttgacttaaggtcattttaccttctattccagtaccgtaccagatctcctccccacaactttttggtcacagatagttttattatagcatatattgcctagcatagatttgtgcatcattaatgaagattacttctgccaattttttttaatggatgaatagaactttgcagtgtagaagttgttttttgttgcttgtgacatatgaatgtcaggataaatatatttgcaagaataacatttattact

SEQ ID NO: 1881714 - DNA, 4001 bp, Homo sapiens
atgaccaatactgataaataactaaaacattccactgaaatccagtttacaaactgctttcactttcagagatgaaaaaagtgtggatcacagatttcaaatgacttgtctaatgtcccacatttaacaaaaatgaagaagcagaagcttctatggactcgaaatcccatgtctacaccttggctttcctgaactatctaactacagaggaaacagacaaatatattcattggaaaagcattaaaatacctggatgtcaaatatctattcaaagagtgaacacagggattaaaatcctggtgcttaaaatccttcagttgttccctatagcatttaaattcaaaactacttagacaaagcctttgtaaatctgactcctaatccaatctaccaaatcattctgccaatttccaattacaccaaagtatttaaaaatgttattctaatgataacttgcagaggatctgccatcattattacatttaagtagaagggtggcaaacaaaaagataccaaggataaacatgtgtgttaccaatctttcaggctacattaagttaaaagctgtttacgaaacagagttttgcataaaaaaagatattactgaaataaatattaaaatataacttccaacattcctttcacctttcctaagaaactaactaattagtttatgctcaggaatcatactgccaggacttgagttcaggctctaccaagttcctaataacctctctgaatctcatttcacattaacctctatgtcagtaatatctaccttgtaggattattgtgcaaattaaatgacagaaggtgaagcacttatcactattcctataatacaacaagagctcaaatatattcctctaatagttaactgttcaatgaacatagattcgagtggaaatcttaatttttggcttatcctcaaatacttttgtctctgacaatctgctgatgaggttaaaaatgttcattcaccatgaagaataccaattactcatttgcattctgaggacatccaggaagtcaggtggatgcaagaacttgatgtgatctgatcttcccttgtgtacagaggttgtctttaggcaccttgctcaatgtctagctcacagtagatgatcaatattttgagggaatactggaatgaatgaaaatgtctgcccaaatagcctcaaagtttatcataggactgaatcactgacatcgctcttccaatagcaaccgttctgacctatggatgccctaaattctaatttcaacttccaccatggggccatattcgaagaactcatataaaagtgaggcgacaatggatggatgctcagttgagggtacatggtgcttatggcagtcccaaagctgtatttaaaagggcacaccgcaggacaatgcatcaatatatatgacatcaagaataaaaatgagaatcccttctgcctttcatcttttaaaaactgtccttgatgttacatcaattttaacattgtaactcacctgttttttcagttatatctgaatcaggagtgtttgccctgctaacttccccttcagcattctcctcttcagcactaagagaaattggtgaagaagggccaggctgggaaggttgaggggttgcttcgggcgcttcctcaatcttattccttttctcaaagcgaaaacggtccaggttgaaaagattcatattggtagaaagcaccaccttgcagggatgggggctttaaatgaactatctgcaggggaaaaataaagagaggaaaaaaggccatgaaaacaatatacgatacaatgccacagcagtttattcccaaggcaataaagggcccgcaaacatgccagtggctcaggactgttatggctgcgcttcattgttaggccgcaacaattagaaggtggacgggggtatcttttaaaattttccattgcttttcactccccttcgtccgcctcccccgcccgcccctccttactgaaaccacgagctgaccctcatgcaacctcctcttacccaagcacgcgcaggcacgttccccagtataaccccctagcgggcctcgcgcccgcccacaaagagaagctccctgtgctaccgtgccccctgcctcgagaaaggacctgccagggcccgcgcctcgacactgcggggacacaaaggggccaaagaaggggagcggcggaggccgtgctggcgggcatccgcccggaagttgacgcggcgcgatcccagctgagaggaagctgataggattaagaacacacaggaaggttcagaggtggagtgcatgctaaggcatctttttaacgttcaatcgctcgcttgttctttcttccctcagtacttacgatcttgtagcctcagtgctatgtaacaaaggttgaaaataaaaaaaaaatttcctagcgtggggcgacggtagccgtgccgggaccttccaaaacaccacggagaaaccttaagagcgcgtaatgatgacgcaacacgcagcctaggctttttcttcccaaacaacgcgcgagccgacaatgtcgaggcgcgcgctgttgtcatggtaattcgtacccgtctccgccggcttgtaagggccagattgttctgtacctttgtcctgttaaattatctagagagttattaaatagaacaatagtaaatagcataatgacaaaaaataacaatatataatacaattagtatatattgtatgtattataatctgtagtgtttcacctataatataatgtagatagcataatagtaataatactgtgctaagctttttcagtgtataatcccaatccttacaagaagcctatgtttacaaagcaaagaaactgagacctgcaaatgtataggtaattagtgacggataagaaccccgggatgctgagcttcaaagcatttaaagtaattcctcactttcggcttgattgttcttagaatggaatttgattaattaattaattttttaaaaatattttaatttttaatgtttgcgggtacatagtaggtgtacatatttatagggtacatgagatattttgatacaggcatgcaatgtgtaataatcatatcagggtaagtggggtatccataacaagcatttatcctttgtgtttcaaacaatccagttattttagtcatttaaaaatgtacaataagctgggagtggtggctcacgcctgtaatcccagcactttggggggctgaggcaggtgaatcacaaggtcaggagtttgagaccagcctagccaacatggtgaaactccgtctctgctaaatatacaaaaaattagccgggcgtagtggcgggcgcctgtaatctcagctaatcgggaggctgaggcaggagaatagcttgaacctgggatgcggaggttgcagttagccgagatcactccactgcactccaccctgggcaacaaagcaagactcttgtctcaaaaaaaaaagtacaataaattgttgttgactgtagtcatgctattgtgctatcaaatactagatcttattcattcaaactgtattttcgtacccattaaccatgctcaccgaccaccggggtcctcccccgccccacactacccttcccagcctctggtagccatcgttctaccgtttctcatacgttcaattgttttaattttttagctcccacaaatataataaatgagaacataccaagttttttttctgtgcctgccttatttcctttaatataatgacctccagttccatccatgttgcaaatgacaggatctcattttttttaatggcgaaataatactccactgtgtatatgcaccacatttttcttattcattcacctgttaatggacacttaagttgcttccaaatcttggctgttgtgaatagtgctgcaacaaacatgagaatgcagatatcatttcgatacactgatttcctttcttttgcatataattcacctatcttgatggaaatgttagcttaagaatatatactcctggccgggcgcagt

SEQ ID NO: 1881715 - DNA, 4001 bp, Homo sapiens
aaacgagttgttgtttcccccctcctcttccagtgcttaactaatcttccgaatccaggcacagaaagcaaaggctttctgctagtgggaggagcttgcttctccattctggtgtgatccaggaacagctgtcttccagctctgaaagaggtgaaaatgtgttaagcgatgcaaaaattgtcttgaagttcgcgtgtgtatgtctgtgtgcatgtgcgtgtggtgggtggggggagagaaaagggggtgtcaattctgagggcaacgagaatcagaagtcagaaaggtgagtggtgtgtagcatctccctttcagaaggggctgaagaagaaattggatatgatggtccggtaggctaaatcacgctggatttgtctcccagataaagggaggtctgcaaagtaagtcccatttctagagcgaaaagccttaggaccgcttgttttagacggctggggaatatttattccttgttccactgatgggaaaatcagcgtctggcaggcgctgattggtggaaaggaaaatggtgatagtggcgtggaaagaggatttgctgagccttctcctgcctcctcaacctgtgactcttccttagtagtctccctttcaccctcaggaccctttccggctcttcctagattaagagcaaacgaaaaccttgaagatatttgaactaaagcgacccctaacgttgtaacctgtgaccgtgattaaatttcagcgatgcgagggcaaagcgctctcggcggtgcggtgtgagccacctcccggcgctgcctgtctcctccagcagctccccaagggataggctctgcccttggtggtcgaccctcaggccctcggctctcccagggcgactctgacgaggggtagggggtggtccccgggaggacccagaggaaaggcggggacaagaagggaggggaaggggaaagaggaagaggcatcatccctagcccaaccgctcccgatctccacaagagtgctcgtgaccctaaacttaacgtgaggcgcaaaagcgcccccactttcccgccttgcgcggccaggcaggcggctggagttgatggctcaccccgcgccccctgccccatccccatccgagatagggacgaggagcacgctgcagggaaagcagcgagcgccgggagaggggcgggcagaagcgctgacaaatcagcggtgggggcggagagccgaggagaaggagaaggaggaggactaggaggaggaggacggcgacgaccagaaggggcccaagagagggggcgagcgaccgagcgccgcgacgcggaagtgaggtgcgtgcgggctgcagcgcagaccccggcccggcccctccgagagcgtcctgggcgctccctcacgccttgccttcaagccttctgcctttccaccctcgtgagcggagaactgggagtggccattcgacgacaggttagcgggtttgcctcccactcccccagcctcgcgtcgccggctcacagcggcctcctctggggacagtcccccccgggtgccgcctccgcccttcctgtgcgctccttttccttcttctttcctattaaatattatttgggaattgtttaaattttttttttaaaaaaagagagaggcggggaggagtcggagttgtggagaagcagagggactcaggtaagtacctgtggatctaaacgggcgtctttggaaatcctggagaacgccggatgggagacgaatggtcgtgggcaccgggagggggtggtgctgccatgaggacccgctgggccaggtctctgggaggtgagtacttgtccctttggggagcctaaggaaagagacttgacctggctttcgtcctgcttctgatattcccttctccacaagggctgagagattaggctgcttctccgggatccgcttttccccgggaaacgcgaggatgctccatggagcgtgagcatccaacttttctctcacataaaatctgtctgcccgctctcttggtttttctctgtaaagtaagcaagctgcgtttggcaaataatgaaatggaagtgcaaggaggccaagtcaacaggtggtaacgggttaacaagtgctggcgcggggtccgctagggtggaggctgagaacgccccctcgggtggctggcgcggggttggagacggcccgcgagtgtgagcggcgcctgctcagggtagatagctgagggcgggggtggatgttggatggattagaaccatcacacttgggcctgctgtttgcctgagtttgaaccacaccccgagtgagcagttagttctgttgcctacgcctttccaccatcaacctgttagccttcttctgggattcatgttaaggatacccctgaccctaagcctccagcttccatgcttctaactcatactgttaccctttagaccccgggaatttaaaaaaggggttaatcttttcatgcaactccacttctgaaatgcagtaataacaactcagaggattcatcctaatccgtggttaggtggctagacttttactagccaagatggatgggagatgctaaatttttaatgccagagctaaaaatgtctgctttgtccaatggttaaatgagtgtacacttaaaagagtctcacactttggagggtttctcatgatttttcagtgttttttgtttatttttccccgaaagttctcattcaaagtgtattttatgttttccagtgtggtgtaaaggaattcattagccatggatgtattcatgaaaggactttcaaaggccaaggagggagttgtggctgctgctgagaaaaccaaacagggtgtggcagaagcagcaggaaagacaaaagagggtgttctctatgtaggtaggtaaaccccaaatgtcagtttggtgcttgttcatgagtgatgggttaggataatcaatactctaaatgctggtagttctctctcttgattcatttttgcatcattgcttgtcaaaaaggtggactgagtcagaggtatgtgtaggtaggtgaatgtgaacgtgtgtatttgagctaatagtaaaaaatgcgactgtttgcttttccagatttttaattttgccctaatatttatgactttttaaaaatgaatgtttctgtacctacataattctatttcagagaacagttttaaaaactcatagtcttttaaaaaataatcaagaatattcttaagaatcaaaatcattgatggatctgtgatttcttttaccatcatgaaaaatgtttgtcaattttaatccattctgatttttaaaatatgactttgatatgcccctgtgatgtgtataaagagacctatttgtggccctaaaatggaaagaacagattagtctttgatagagttacttcatgtgatcatttggtctctgtgaacactgaggacagagaaaagtgcttgagggctgctactaatctctcagaaacatttgtatagttcatccatcaaatgacacacatactaaaagaataaagaaattgatgcttattacctacttgttcctaaagttccaccttggggtatacacccaaactctgactctcttttctgtaacttgaactgtattcaattgagtgttattttacaaaccactttgaattccttggaaaagaatagacacacactctcatccacaggcatagacacacacactcaacacagacacattgcccattcttcctctcttctttctcctctgagctttttcacattctctggtggcaactatagcagtaagagtcacaggatgaacagtcaggtggaggatgaccacattgagttgcctagctgaaacatgtgctccgtctatgtctgcaaagtgaaagaaagctacactatctcttcaacatagatcagtgggggaaattttatacttgggatgatttatatgaatgcatctcatcaaagttcacaacacatttttttttcagttttttattttcagtttttagagtcagggccttgctctgtcgcccaggctg

SEQ ID NO: 1881716 - DNA, 4001 bp, Homo sapiens
ccctatggctatttctccaagagttaagggatagctgcttaactatgcacctttacagaacattcttagcagtaatgctcaaatttaaaaggcacactcaagatacttccatgtcatggatccttccccaggtcccagtagtataaatatagggaagaggttagcatgaacttacaaattgttttaagtaatcctcttgaatgccagtcattaaaggactttgcccttctacatcaaattacatccttttcacaaatccccatttctgtaataactggtgcaaacctaaaggtgctttatagttttactactttgcagatttgcaatgctgcatataatgcagaagagcattaaaaacttttgtaaaaactcatgattttgataaacttttaaagtagcgtttatatgtaaatagaactacacatggcacacacacttgcacaagggcttcagaaaaacgtgcaatataggtgagaaaaatgtctattgaaactttctcacaggctgcccttataattaaactagtgttggggcaagcaacatctgtttcaagtagatcagggactagcaaacctaaaaggcagcaagcagcctgcagtttgctcaatccttaagaatacatggttcatacaacatgcttttactatgtcttaagtgtgacttttgaaagatacaagtgttctgtgcatatttgtgtaaataaatacataattttccaccttgtataactgccttaaatttttgtatggtttaaaaagagtctgctgtctcccttgggggtagcctggtaatttttatattttacatttttcacaaaggctgcaattaccttagaactgtactcacactacttccacatgagcgtgtaacactaaataggaggtattatgctattaactacctttccgtctattaatcactcagtcaaggaacaatgagtagccacatgaattaagcattttatttaattatcacggaccaccttaaatattactttacaaaattcaggcctatatttaaaataggtgtcctgataacttccaggatattattcggaacacccgtttccccaactacgataagtccattgccggatgctgaataaacttcgcccattaccacttggatttcttgatagtctgcaagagaaaaaaagcattataaaactccgagctgtgtacttacctcactgttttgagatcttatcagctaattcagttggttgttaactcaaactacaaaagccagcaaaacgggccaactttagctttccaacgtcctgccgctaaggcgtttcagattaactcagaaatatcaaaaaagaaatgtaccttatgtttccatcatccatcgtaatgtgttcagctcagcttcctagaaacattgaacaacggtttagaaattttgcccaataacccggcaccctctaggtttttaacagtgaatgttacttgtgcaagtcagaatctgataccaattaaatggtgacagctttgccaataaacaaggatatgctcttccatggctaggaagggagactgccacggctgacaggtcccaaagatacatggagattcacaatccagaattaaccagcaaccaaactgctacaggttattactcaccatctggctcaaactgacggttctcggggtgctagggcacaagagcgacagagtagactcaagatggccacatgacacagacggctgaacaggcttcaccggagtccccgagtgcacggaacctttccccgagggcccacggcccacgcacgccggggttcagggtccagggctgcacgtggacgcccggcgacctaatgagcactcaagtccgcgcatgcttgtaaacttaagggtttccaaagccgcccccgacctaccaatatcctgactgcgctgccttttaggtaaggcagtaagtttcggcccaattatcattttaacttacgaaagacaactacgtactttcacctaatcccgacgcttcccgaatgtgaaaggccgaggccttcggcacacgctctcttatagaactgatgacgctattccgggggaagcgccgcgaggggcggagcctatgctgtttcactccccgccccgcctagccccgccgcggctccacctgttccgtctaccacccccttcgcggctcctttcccccctcccccgcacatggtccacgtctgagcgggtcacctggctccggatccagacgcatgcgcacatacgagagccaaaaggttctcgcatagcgaaagatcctgacgcttaccggtgtaggtcacgaaagcgagggggatttttttggtatttcctgtttaggatacttattttagacaatattagaaaaaggggccgaacgcggtggctcacgtctgtgatcccagcactttgggaggccgaggcgggcggatcacttgaggttaggagttggagaccagcctggctaacatggcgaaaccccgtttctactaaaaatacaaaaattagcctggtgtggtggtgaacgcctgtagtcccggctactcgggaggttgaggtgggagaatctcttgagcccgagaggcggaagttatggtgagctgagatcgctggttagcattttacaaattacctaatcactactcaaaaacaagaaaagtctgagaaactattatgccagagaaaatgatgcataatgattaaatgtaatgtggtatcctggctgggatctccagcagaaaaaggacattaatggaaaactagcgaatctgaacaaagtgtggaatttaggtaatagtgccaataccgatttctttattgtgacagatataccatggtattgtaagatattaatggtaggggaaattggatgaagggggtgtggggactccatttttgcaaattttctgtaaatgtaaaacaaagtttaacttaaaaaagcaattataaccttacagtctattatactttcattttaagacaaagtagtgatttagtagtggtttctatctactttagtgtgaaatttgtggctgagatgacagtatttctaagtttgacttgagatcaaacccaatgaatttagctgcattcaaaccaaggctttgagcctttggatattcaggagagacaatgtggtaacaaataaaagaattaaaaattggttggtaaatgaagattggcttaaggattttattttatgtatttatttatttagaaacattcttgctctgttgcctagcctggagtgcagtggcatgatcttggctcagtgcaacctccacctcctaggctcaagcgagcctcctgctaggcgtgtgccaccacttggctactttttttttaaggttttttttttttgaaagacaagccctcactatattgccctcaggctgatctcctgtgctcctgggctcaagtaatcctctttcctcggcctcccaaagtgctaggattgcaggtgcaagccactgcgcccagcctaaggattttaaagatagaatgcaaggtgaacctgttagaactgatcaaatgatggctaggtaacatttcagttctgcttttgatacatggagtgaacagttcattatagaatatttattcttcaacaatgcttttccctgcactatatcttttttccttttgtggtttagtgttgaaactggtagtcatcagaaaaatttaacatagaatggcacatctgtcatatgaatgctgagatgaataggagaaaatatagtgaggaaataacctgtggacttatttctatcttaaaacacttagcaaatctaaacttccagtgtatactagcagcgtgatacttctgctgtaaaaattggttttgctgcagtaataaaagtatagtgtattgcagtatgatctagtgttaaaaaaaaagcatagtgtccaaaagagaggagatggacgttccctcctatctatattaaaatattcttgtcagttctgaacatcttgttcagttgttaaacatttactagactccagcaaatgttt

SEQ ID NO: 1881717 - DNA, 4001 bp, Homo sapiens
cacattaacatatctactatatttgcttttaacaagcacctcatcatagtccacgttccccgaccatgatgtaagagtgccacccactgacacttccctgtaactgacttatacctgcaggttttcccaagcccaacctgatacaatccaatcttaaaatatactagtcaaaatgctttcctggcctacacattgaaaagttctaatacatacagcagttataacatatgccaggcactgcattaggcagctttgcacatcactgacaatttgcaaaaggccagtaaatcttatggtagtagcccttgttttcaaatgggggaaaacaggcttgcctcaaagtgagaccagttggtgaaactgattccaaactccagaaaaaatgctgatttttttccccatggttctcctacctaaatgattggtttccctatggctatttctccaagagttaagggatagctgcttaactatgcacctttacagaacattcttagcagtaatgctcaaatttaaaaggcacactcaagatacttccatgtcatggatccttccccaggtcccagtagtataaatatagggaagaggttagcatgaacttacaaattgttttaagtaatcctcttgaatgccagtcattaaaggactttgcccttctacatcaaattacatccttttcacaaatccccatttctgtaataactggtgcaaacctaaaggtgctttatagttttactactttgcagatttgcaatgctgcatataatgcagaagagcattaaaaacttttgtaaaaactcatgattttgataaacttttaaagtagcgtttatatgtaaatagaactacacatggcacacacacttgcacaagggcttcagaaaaacgtgcaatataggtgagaaaaatgtctattgaaactttctcacaggctgcccttataattaaactagtgttggggcaagcaacatctgtttcaagtagatcagggactagcaaacctaaaaggcagcaagcagcctgcagtttgctcaatccttaagaatacatggttcatacaacatgcttttactatgtcttaagtgtgacttttgaaagatacaagtgttctgtgcatatttgtgtaaataaatacataattttccaccttgtataactgccttaaatttttgtatggtttaaaaagagtctgctgtctcccttgggggtagcctggtaatttttatattttacatttttcacaaaggctgcaattaccttagaactgtactcacactacttccacatgagcgtgtaacactaaataggaggtattatgctattaactacctttccgtctattaatcactcagtcaaggaacaatgagtagccacatgaattaagcattttatttaattatcacggaccaccttaaatattactttacaaaattcaggcctatatttaaaataggtgtcctgataacttccaggatattattcggaacacccgtttccccaactacgataagtccattgccggatgctgaataaacttcgcccattaccacttggatttcttgatagtctgcaagagaaaaaaagcattataaaactccgagctgtgtacttacctcactgttttgagatcttatcagctaattcagttggttgttaactcaaactacaaaagccagcaaaacgggccaactttagctttccaacgtcctgccgctaaggcgtttcagattaactcagaaatatcaaaaaagaaatgtaccttatgtttccatcatccatcgtaatgtgttcagctcagcttcctagaaacattgaacaacggtttagaaattttgcccaataacccggcaccctctaggtttttaacagtgaatgttacttgtgcaagtcagaatctgataccaattaaatggtgacagctttgccaataaacaaggatatgctcttccatggctaggaagggagactgccacggctgacaggtcccaaagatacatggagattcacaatccagaattaaccagcaaccaaactgctacaggttattactcaccatctggctcaaactgacggttctcggggtgctagggcacaagagcgacagagtagactcaagatggccacatgacacagacggctgaacaggcttcaccggagtccccgagtgcacggaacctttccccgagggcccacggcccacgcacgccggggttcagggtccagggctgcacgtggacgcccggcgacctaatgagcactcaagtccgcgcatgcttgtaaacttaagggtttccaaagccgcccccgacctaccaatatcctgactgcgctgccttttaggtaaggcagtaagtttcggcccaattatcattttaacttacgaaagacaactacgtactttcacctaatcccgacgcttcccgaatgtgaaaggccgaggccttcggcacacgctctcttatagaactgatgacgctattccgggggaagcgccgcgaggggcggagcctatgctgtttcactccccgccccgcctagccccgccgcggctccacctgttccgtctaccacccccttcgcggctcctttcccccctcccccgcacatggtccacgtctgagcgggtcacctggctccggatccagacgcatgcgcacatacgagagccaaaaggttctcgcatagcgaaagatcctgacgcttaccggtgtaggtcacgaaagcgagggggatttttttggtatttcctgtttaggatacttattttagacaatattagaaaaaggggccgaacgcggtggctcacgtctgtgatcccagcactttgggaggccgaggcgggcggatcacttgaggttaggagttggagaccagcctggctaacatggcgaaaccccgtttctactaaaaatacaaaaattagcctggtgtggtggtgaacgcctgtagtcccggctactcgggaggttgaggtgggagaatctcttgagcccgagaggcggaagttatggtgagctgagatcgctggttagcattttacaaattacctaatcactactcaaaaacaagaaaagtctgagaaactattatgccagagaaaatgatgcataatgattaaatgtaatgtggtatcctggctgggatctccagcagaaaaaggacattaatggaaaactagcgaatctgaacaaagtgtggaatttaggtaatagtgccaataccgatttctttattgtgacagatataccatggtattgtaagatattaatggtaggggaaattggatgaagggggtgtggggactccatttttgcaaattttctgtaaatgtaaaacaaagtttaacttaaaaaagcaattataaccttacagtctattatactttcattttaagacaaagtagtgatttagtagtggtttctatctactttagtgtgaaatttgtggctgagatgacagtatttctaagtttgacttgagatcaaacccaatgaatttagctgcattcaaaccaaggctttgagcctttggatattcaggagagacaatgtggtaacaaataaaagaattaaaaattggttggtaaatgaagattggcttaaggattttattttatgtatttatttatttagaaacattcttgctctgttgcctagcctggagtgcagtggcatgatcttggctcagtgcaacctccacctcctaggctcaagcgagcctcctgctaggcgtgtgccaccacttggctactttttttttaaggttttttttttttgaaagacaagccctcactatattgccctcaggctgatctcctgtgctcctgggctcaagtaatcctctttcctcggcctcccaaagtgctaggattgcaggtgcaagccactgcgcccagcctaaggattttaaagatagaatgcaaggtgaacctgttagaactgatcaaatgatggctaggtaacatttcagttctgcttttgatacatggagtgaacagttca

SEQ ID NO: 1881718 - DNA, 4001 bp, Homo sapiens
tattttttgtactagtctgttctcacattgctataaagaactgagactgggtaatttataaagaaaaggtttgtctcatggttcagcaggctgcacagggagcatggctgctgaggcttcaggaaacttacaatcatggggtatgtctaacaggaagcacatggccagagtaggaggaaggggaggtgccacacttttaatctaaactctgccattcttctgcctctgccttgagataacatgtgcacaattgcataacctttatttttattaatttttcttttcaggctggagcacggtgacaagatcatggctcagtgcagtctcaacctcttgggctcaagcaatccttctgcctcattttttgtagagacgaggtcttactatgttgcccaagatagtcttaactcctgacctcaagtgatccccctgccttggccttcccaagtgctgggattacaggcatgagccactgccccagccacactacacatctaaacaaccagatctcatgagaactcactatcacaaggaacagcaagagggaaatccacccttttcatccaatcacgtcccaccaggcccctcctctaacatcgggattacaattcaacattatccaaacttgtgagcaattacctaaatttatgaggctagactttacaatatggaacataaaagtttagataaaaaggtaagaacaatgctatgaattaagaatgactccaagataaatattaatacttgctacatagacacacacaaaaaaacagaatatgctgacagatactccttctgtgccaaattttgtgaaccttcttaggctcaatgcaatgaaataatatgaagagtttatattcttaacagctcgactgtggtcctttcctagtttggttgaaataattcttaactgttacaccaggacaccaaatctcaagagacaagtgactttccagaagtcacattgcctaaaagttatacatgtgaagcctctcattcagagatactcacaggtgatgaaacttgagttatcactaatccatttctttacctgtgaaatgggagaatagaatctgtaaggttagccgagagaaaagacaagagacccaaggtcaggccaagtaagtttattaacctgccaggcttctccaccagtcggaggtggcagccctgagcttacaaaatgaggggtttatatgggggagagagaccctggggttgttagtcaattaactttaccacatataatctcatgaccggcttacaatatattatcttgtgaaaataggaatttacaagggggtgtaatccacgtttctcatgacctcccccgtgccacccagagggcttcggtgtagcaagtctggtgaccttgctatagcgcctagataacggttcaggaatgcagctgcagagtattcagggtaagggtcagctgcattgagttagcgggggcggagtggtcctggggcagcctgtccctaacagaatccacctccgagttgtgacaattaaatgaaaaggttgaaaaggtgaacatgaagcacctgctacactgccctgttgccaccagcattgtcactgctctagctcctgtggcactgcacggacacgtggttgctacaagttagtacgcatatttggccttattagaggcactttcctattgtaactgaagggatagttggcttaagtcaattgaaataccagcaacaggacattccagcttcaatggcttgtgcctgtagttgtcaacctatagaaagaaaagttttaaaatgacgttttaaccaaagaaaactgaaatgtattgcttgttctataaactgtaaagaaaatcacaaaggcgctcaagttgtaacgaaactttttctggttcagttgtgactccagacaggatccaaagaggagctttccagtctcttctctgggttttatggagacttactttacccttctgtgttagcctcttaaagcactgggtcaaccttaaaagggcacaggaaagggtgctttgtgattttttttctttgatttttacagggttcactactattttccgcgttgctctcaatacctcgtggatctctgcttctctaagtctgaaaccacactagaaacacagctgttttgtttggtgagcccctacatggatgtttccttccagttaaggggagccggattcggaccttggcgacaaacagacgccggggaaccctccggtcccactggccacgtgctccaggctgactcattccttcccccaccccgctcaaggctaggaacatacctgcgctaagaactgaggcagctgcacttccgcagacgtaagagacgaactcctggagctcaaggtcggctggggttgggttcctgtcccgcacgcgtggcccgcccgaaacccgctacatagtggcgcgtcagccctggggaagcaaagcgcaaaattgttacggtgcccagacctgcgccgggaacctccggctgttccgctgggcgcggcgcctgtgcctcgcgcagccccgggacgggcaccgccgcccgccccccgggccgccgagggctgctctacccctccgttctggccgccgggagcagaggagctcgaggcgggcaaagctcgtggggacaccgggcgagcccagcccctgatcggacccacgggccggccgggcgccctccccgcgggagaccgaaagccgaagactggagatgcactcaccgcgcaactccagctgacaaagaggcctgcgacctgcgacgggcgcacaaaccagagaggcggcgcggggcggggagggaagcaggagggtcgcgaggcccgcagccaatcccgggaagactctgggcaagggcggggcgcgcagccgatcccctggagaggtcgggtagctcagccaatcccgggaagatcctgagcggggcggggtggagggccgcggcacgcacagccaatcccggatggggcgggacgggcccggccattggctgtcggtgtccggggccggcctaggtgtggctcatgcagtagcacggggataagccatgtctgcgcgcggagcatccttctctgaattagatttttcaggctacctaccaatccccggcgttggtgattttggtgctcttgggccctagacccttcctcgggtgcccttctggagagggcatcgaggttactccagggttggcctaaggccctgggattccctttcttaaagccacactaatccggtgtgtgttcatcatctgtgtccgcctaaaccgtaagcttaaagagaagccacgaccatgtcttgttcaacaagctcactcccgtggcctctcctaaagctagaaggactacctcctttcctcatgctccctctttattcatttacagagtccaataagtagaccataatcagctggagggtaggagttggggaggttgagaaggcaaccatagcaatctcaaggtaacaggctcaaacttggcaaacaaataagtagaagaaaattggagtatatgctaaaaggagaacttctattgctgtttcacgtacttaccatctgctaacaaatctaatcctcaaaatatatttaatcatctccaaattatagatggggaaataattatgttatgtaacttgcccaaagtcacagagcagctagccagtggtagatccaggatttgaactcaagcagcctgaaggcagagcccctcaaacaacatgctacctagcctttccccaggtgttgggggtggagcaggaagggaaaccaaaaaatagcctacacttggttaacagatcaagacaggcagctctggtggggtgtggctttgtaaacagaaagaacaactcgtccagagccccaagataaaacaggaaagggctttacctgtttaaggactcccagaaatggaacttaaggagcagagtggcctgagatgagaatggcttggggccagaccatgcaggaaaccctggaagagtttttttgttttgttttgtttttga

SEQ ID NO: 1881719 - DNA, 4001 bp, Homo sapiens
ctagctactggggaggctgagacacaagcatcgcttgaacctgggagatggaggttgcagtgacccaagatcgcactaacacactccagcctgggtgacagtgagactgtctttaaaataaaaaaagctgggtgtggtgtggcacaggcctgtgtcccaactactcaggaggcctgagagggagggctgcttgagcccaggactttagggttacagcgagctatgatcacaccattctactccatcctgggtgacagagtaagatcatgtctctcaaatgtaatttttttttcaacagtctcattttgtagcccagactggagtgcagctcactgcaacctccacctcccaggttcaagtgattttcatgcctcagcctcccgagaagctgggattacaggcaccccgccaccacacctggctaattttattttttttaggtgagacggtgtctcaccatgttggccaggctggtcttgaacttctgacctcaagcaatccacccacctcagcctcccaaagtgctgggattactggcatgagctacgcacttgacctttaaaatatattttatatgtaaaaaagttttaaaaattaaaaaaaattaaatgataccaatatataaaaaattcctttgagctttgctataaagggacttagtaaggtgctctgggagggtatactagtatttgtatactagtatacaagggacagcgaggaattgataaaggtgtgaattgctgaagccatgaggctgattgggcaaaaaaaaaaaaggctgtcttatgtcttagcacaatccatccagtggtatgacagaaggtagtatgattaacacatgcataggtggcagaatataggtaacagaaatttgtggggttcttttctctgctttaaacttttttagtgattaaaggaagcaaggttatcagctaagcaagaaatgagaaaactgaaaaggcttgagaagaggtagaaactgaatgaatgagtgactataggtggatagcactaaatgcccacttggtaacagcttctccgccccatttcagcttcacagtaaaggtgcatagtagtatgtttatatccaatttgtctgggtcagaaaagtttaccagctgtcaaatttactgtctaatccaccaagctgtcagattatttttaaaaaaagaatgttcagaagcaaaccatcacaaatagcactttttatttgccactatttgaagtctgaactttaaacagattcttggactggtggttcatatccatcagctcgttcaactttagcacctgtctcgtccccagtggcttttccagaactactgccttcaccatgaagctccatgagctttcccactaaaaggcaaaaaaaaaaaaaaaaaaaaaaaccaaaaaactgttagtatatcttgaaataatggtcatcactactatgcaagcatgacaggaagaaaaagaaggccatgatatggccccacactcctcctccacccaaaaacaatgtatttggccctacaggaatcatgtgatttctcacttacattcaaacttgggcttcttcagcatttttacttttctaacgaagacatcatggagaggataaatagattggcaagccttttctatgtcttttccaatgctgtctggaatcctgcaaaccagtaacagtaaatttttttctaaaagtcctagttctcagatataagccatttcctttaaaagtagagaagccttggaataaacctacacataacacctacctcatttaacctgcataaatcctcctgttaagataagccattatttacctttcacatgtaaaggatagatgatctgaattacatagctagctagtggcaaagttagtagagtcttctgagtccaagccttatgctttttccattacaccctcttagctaactgtatattgcatgggaacatcagaaaaatgttgttatcactggccatcatctgggaccgaaacttttttcatcacttattcccgtgcatcattaatcatgaaaggttttgtctattcagtgtattttttctttgtgtgtgtatatatatatacgtatattttttattttttgggacagggtctccctatattgcccaggctggcctcaaactcctgggctcaaacaatcctaccacctcagcctcctgagtagctgggactccaggcacatcccaccccactcaacttattcagtgtattttccaagtaggggaaaaacatttcctgtccttcaactccatctactgtgagacagcttcattcaaaataaataaacacgaaaaaactgttatcatttagagtactggcagatcacctgaagtcaggagttcaagaccagcctggccaacatgatgaaaccccatctctactaaaaatttaaaaaaattagctgggtatggtggcagtcccctgtattcccagatactcaggaggctgaggctcaagaactgcttgaacccaggaagcagtggttacagtgagccaaggaggatcacaatactgcactcgagcctgggcaacagagcaagactctgactcaaataataatagtaataataatcatatttactgagtacttaacactctttcacttaaagagatatagctagaaggattcacagacaggatttcaacagacctttaccttgtctcatatgcgttctctcatctcaggaataatccaatactcaaggttgtgttgtgtgaggaagcaaagaaacacttacaatttattgaccacttctttcaagtcatttgtctgcacctctcgggtcatgatttccatcatcttcttccggatttggcggacctgttggtgctgagcataagaggtcttccgtatctgattgttgcgttttttagtaaaaccaacacagaacagacgaagcaagtaaccatcggtagtcttgacatcaacgtgagcttcaatcattgtctggagaaaaaagataccgtcagatttaacaggttttacgttatccatttatccctcaagttctaattttaaaaagctggattgtcaaacactcattattaaatataaagtatcctaacataagtaacatctctttaagtttacagaattaacttccttgaacttaccaagttacccccaaattcttacccaattaaataaccaggtcctctcaactgccctccctcctcctttctaccctccattaacactaccactatcttgacggcatccaaacccacatccattgcatatacatatacccctttaaacagctcataccccctcaagtgtaaaactacaccagaggaaaataggtctgagaggatccatggtattctatggtatgaacacatctacagtgattatgtcatttttcaaaaaactgtgttgtaaataggtgactgctataactctaaatgcacactttgaaagacgtcttttatgttccaaactaaagccatgctgatgattaaatacccaatttcagagctaaaatataattaaaaacccctagttagtggtcatattattgcctaaattgaaaaaacaaaaaacatcttgggtagtgatgaaaactgatttaccttgtttgcattttgtaaattttataccttagtataaaaaaaaactaatcaaatacaatttacagctaagggaccttaaaatatttctagaaatgtaaaccataaagccttagaggaatgtcaggataaatataatggtataatcagtatgtatcatttgggactgaaacattttgtcatcattcattcccacatacaaaatattcgaactgtgccaggtgcagtggctcacacctgtaatcccagcactttgagaggctgaggcgggcagatcacttgaagtcaggagttcgagaccagcctggccaatatggtgaaaccctgtctctactaaaaatacaaaaattagctgggcgtggtggcgggtgcctgtaatcccagctacttgggaggctgaggcatgagaatcccttgaacc

SEQ ID NO: 1881720 - DNA, 4001 bp, Homo sapiens; identical to SEQ ID NO: 317391

SEQ ID NO: 1881721 - DNA, 4001 bp, Homo sapiens
atttagaataaccaggccaggaggccagccggctataagccagacttgaaggaaatcagactgctatctctagtgacagtccaggaagcaaaacaataacccctttaacaatcagcccaaaatggctaggacttttttttctttctttttttttttttttgagatgaagtctcactctgttgtctgggctggagtgcagtggcatgaactcagctcactgcaacctttgcctcccaggttcaagtgattctcctgcctcagccttcccagtaggtgggattacaggcacgtgccatgatgcctggctaattttttgtatttttagtacagacggggtttcaccatgttagccagcatggtcttgatttcctgacctcgtgatctgcccacctcggcctcccaaagcactgggattacaggcgtgagtcactgcgcccagctgcaaaatggttaggatttgattactaactgacagcttccgtaatttctgtccttgattccaacttaggacaaccagagaaaaccaaatacacacccctaacccataccatagaatgttgtgcttctagttagctcacctacagcttccctgtgccaacagcctccaatcaggccatacctgaagccattccttttttccactatagttttcccactcctctctttgactcgagtccctactcaaatgcaagtgacagtggctgactctcttgctataacaagccctgaaaaacatagcctttgcttgttctcatttggttggtctccatttacatcctcagaatttaatttgataaagtacataaaatatctagtacaaggcataactttttctaaggaccttttgaatctttaaaggaaatattaacacaaagactgagctgttttcaactaaaacttacacttttatctgaatcaaaaggcctgcctgacaacctggttttaaacgcagtcctcaatggtttcaaaagtggcaggtcagacctgaaagccagcctccctcccaaacggttttgggcttcactgtattagtagaaacagtagaagtggtttgctacttaccgttctatattttgaaaacagaccaaattgagggatcagagaggctgtaagaagaaagcatagacattttacagtataggatcaaggtaaggtattgttcatgaagttttttttttttttaaatgaagtcttgctatgttgcccaggctggtcttgacctcccgggcttaagcgatcttcctgcctaggcctcccaaagtgctggaatttgaggcattagccaccacatccagcttcataaggatgttttaaaatccagtttgggatttatccaggccacatcttctattttcccctctaatgcctaccttctttaaactgtccccatcccacttcccccagaaaggatattcagttttttatggcacctctccccaaaagcacatagaaataacatttggttctgttcccattagggttggttgagaaaggactttgaagctatggaataaaagtcgcgctagcgcactgcagcttcaattcctggtctcaagcgagcctcccgcctcaacctccggagtaactgggactaccggcccaagccactacacctggccaaggaagtaacccttaattaatagttcatgatgttattttcctttacaactcggggtaacaaatacaaaatttaatataagatgtgagcattttaactccattttaagagaggtgtccagtgtggttggactaaagcccctttctcgtaagcatccacaattcctcattcctgcacatctcctcccttgggaccatacataaaaactcaactcctcatcttgggcacctgaaaatctactttaacagagaaagcgctctagatggcaggtgtccttagagctgggagcgaagcccaagcaagaactaaagagggtggctgactccacaaagccacccccacaacccccagttcgcgttcctccacctggcaggtcctctggggaaccgccagtaacgggcgcgcgggtaccgtcgccgaggccgcccggagcagggcagggtccgccgccggtctgactcccaaacccgcttttctccggaggtccccgctcgccaggaccgctccgagcgctacctgcgaaggtaactgccaggagcagcagcgccaagcgcagcaccgacagcgccatcctcctcccgcgccggctgtcttgcccctgcggtctgttacctgcgccactcgcagggagcgctcgtgcgacggggcgcggggagggcgggggaaggggcggggcgagaatgggaggaaaagcagcggtaggtggcgagggaagaggggcggcgggaagaggagcggcgggaagaggagccgtgaagggtcgggggagaaccggaaagggctgggaaggagaaaggtagaaggacgggggagggggccatggggaaggaggggcgagggagatagaggaaggggcagttgttccccaacaccttcccctccccccaaggagacgaaggggaagacctctccctccgacatacaagaacctgtgacagtcctagggggacccttgtggagctcttgggagctctgtcaatcaacacctatttcttaagcatgtactaagtcccagatagtgtttcgttgctgaagacacagccctgacctcgacaaaggaggtccttgctctcaggaagcgttctgcctttccctcttttaatatattttttaactatttgagttgacacataatgattgtacatatttatgggggtacatagtgatatttggatacatacaatgtgtagtgatcaaaataggataattagcatattcatcacctcaaacatttatcattactttgtgttgagaacattcaaaatcctctcatctagctacttgaaaatacataataaattattattattatttaaatttcagacagggtctcgctcttttacccaggctggagtgcagtggcacgatctcagctcactgcaacctccacctcccaggttccagtgatcctcccacctcagcctccctcccaagtagctgggaccacagatatatgccaccatgccaagctaatttttgcattttttgtagagaggggttctcaccatgttgcccaggctactctcaaactcctgggctcaagcaatccgcccaccttggcctcccaaagtgctgggattacaggcttgagccaccgtgctcgacctttataatatattattgttaattgtcggcaccctacaatgctatgaaacactagcacttatcctttctacctagctgtaattttgtatactttaaccaacctctccctatccccctatccttcccagcctctagtaactactgttctactcattacttctgtgagaaataatttttgccaaagaggctgagcaagttagtgcattaaggccaggcgtggtggctcacgcctctaatcccagcactttgggaggctgagcctggtggatcacttgagctcaagagtttgagaggagcctgggcaacagggcaaaaccccgtctctaaaaaaagtacaaaaattagccaggtgtggccattgagctgagattgagctactgcgctccagcctcagtggcaaaatgagaccatgtcaaaaaaatttggccaggcacggtggttcatgcccgtaatcccagcactttgcgaggctgaggcaagtagatcacttgaggccaggagtttgagaccagcctggccaacatggcaagaccccatctctactaaaaatacaaaaattagctgtgcatggtggtgcgcacctgtagtcccagctacctgggaggctgaggcatgagaattgcttaaacccaagaggcagaggttgcagtgagccgagatggtgccactgcactccagcctgggcgacagagtaagactctgtcaaaaaaaaaaaaaagtgcattagcagatccacttttttttttttctgcttcttatgcctgtgtgtcaaatgatt

SEQ ID NO: 1881722 - DNA, 4001 bp, Homo sapiens; identical to SEQ ID NO: 317396

SEQ ID NO: 1881723 - DNA, 4001 bp, Homo sapiens
attctcattaaaattaggagttttggctggacacagtggctcatggctgtaatcccagcatgtggggaggccaaggcaggaggattgcttgaatccaggagttcaagaccagccttggcaatgtagtgagaccctcatctctacaaaaaacagaaaaaaattagctgggtatggtggcacgtacctatagtcccagctacttgggaggctgaggtaggaggatagcttgagcccgggaggtcgaggctgatgtgagctgtaatcatgctgctgcactccagcctgggcaacaagaggggactctgtttcaaaaataataataacaatttaaaaattatgtgttttgctgtccagagcataagtttgacagggataaacatccattcaaatgggagtcaaattcaggtatcttataaatagcaagcctgttagattgtccttctatgagcattctttgttttcaaatatggagaactatttttctaaagatcagagaaatggccaccacaatatgggcccacctcatctatttttggtttcttcaaaaatgatgactccaatgaactttgcagtaaaaacaaaatgacaataaagatgacttacttgtgaaaaataaacagcagggaaaagcactgaagccagataaaccaaatctgcttcccataaagtgaaaaaagatccactgaattataattgtttttattttcatatgatgattgttgcataaaactaatttgttgctgaattaagaaacataagacacatatttaccctaaataattttagttcatctcctggcttttagtgaaattatcgatttctaggtgatataatttgtgtgccggctgggcaaagtggctcacacccgtaatcctaacactttgggaggtgaaggcaggaagatcacttgaacccaggagttcaacaccagcctgggcaatagggtgagactgtgtctctacaaggaatttaaaaattagcggggcatggtggtgcacgtgtgtagtctcagctactcgggaggctgaggcaggaggatcacttgaccctgggagtgagctgtgatcacgccactgccctccagcctgcatgaaagtgtgtcaatgcttttttttcctccttctttttatttttattttttcttcactctgtcacctaggctggagggcagtggtgcaattatacctcgctgcagcctctatctcctgggcttaggtgatcttcctgcctcagcctcccgagtagcagagactacaggcacatgccaccatactcagctattttttttttaatattttgtggagatggaatttcaccatgttgcccaggctgatctcaaattcctgagctcaagcaatctgcccacctcagcctcccaaagtgccgggattgcaggcatgagccactgtgcctggcccaatgcttttaatgggcccattttagccacatttctagtacttatattattcaaatagactcagaaaagctgtaagcctgtacagaattacagtgtaagacatcataaacaatgttttaaaaattagaaaaaccaattgcaatacatgtaagaaagaaaaaataaatattcacaatatataaaccgctcttacaaatcagtgaaaacacaactttacagcatgacaactttgaaagaggaacaccagataagaactgtctggggcgagcatagaagagtctcattcctctgtctgagtggtactgggtgagtggaatggttggtgattataggctgacaaagccctaggctttttcttagccccagctccctgccttctcccctcactgccccctcctgtgggggcactacctagcaactgaggtttgggttttacagtgaaaataattttatgagtcagaaaggagtgagaaaagtgtgttatcagatagcattccacagtggtaaaagcaaaacaaacaaaaaacaggactatttctctacatactgtctgggactttgggaccttcactgcagacctcttgtggcagtgtatgtgtgattccagtcgtatggtgggtatgtggttagggtattattacatcgtaggtctataaagggccaagccccttgctccgacatgcaaagaaaggattgcaaactggcaggctgcaggtcataccgtgctcatagacagctactgttttgtatgcacagtttttaaaattgtgaattagtgtaatggttaattatatgtgtcaacttggttaggctacggggctcagttttttgttacaacactaataacaatgtggctgtgaagatattttgcagatatagttaatatctacaaccagttgactttaagtaaaggagtctactttcaataatgtgggtaggcctcatctaattagttaaaagccttaagagcaaaatcggagatttcctggagaaggacttctgccccaggattgtaacataaaaatctggcttgagtttccagcctgctggtgttttctaagatttcagacttgttgtatgcctcctactggttctgtttctctggagaaccctgactgatatagttactatgacacagactattaattgctgaccccaagagcctttctccctttattccctatagtaagtgcctctgaaatagagactacatttcccagcttcccttgcaattagctgtcaccatgcagctaagttctagccaataagatgtaagcagatgtggtttgtggcagctcccttgaaacatacctgatgcataccctgtgtctccttgtttttccagccagtcctccatccttctgctgggaacttggatgctagagctcttgcagtcacactgggccatgaagataaaggtcaccccctaggaatgatagagcagaaagctggaaggaacctgggtccctgatctctgtggagccactgaactgcctctaatgaaggaaaacatttctctcatttatgctgcatgttcttttcgattttatgttatatttagtggagtataatcctaatttgatacaattgccaacttttaaaaatcaggaaatttcacacaaatattcagctctctggcttttctcttgaaaatttggtacatctgacaaaacatgaagtcatgcttcccattgcagcaactgacctgggcaggataatggatgcctgcttcagacagggatggagacctcaccaattttttttccttcattttaattgggaagtggggcaagatggaaaaattgtggatgccaactttgtaactttgtctttctccctgcatcatttttagcaagaacatttcgacactggtgtagtccacaagggaagatactgagagaggagaaaggaagaaacctttcaggcatcagttagggtgggtccttggttaaattctttcaaacaaaagaacagcctgaaaaatcaagctgcaggcacagataaggggatctgcacaggtggccttgactaagacattcccacagccacacagatatgaaagcctacccagatgacttgcccagatacttctgcagtggaaaattccatcccctgacacatgcgcagtaaggggaaaaaagcaatatggaataaaacttaagctaagggcccacatgcacactagaaggatgaggtggagctaccagaaattcatgccttatgcaaatgagatgcccagccctcaccggttcttataaaagcctttgcagtcacctgtaaaagcagcaaccctcctccaggtcccctctccactgtggagagctttcttcttttgcttattaaactttcgctgcaacttcatcctttgcatccacgctccttaattttcttggtcatgagacgaagaactccaggtgatacctcacctgctacattatggagagactgctacattatggtgcactggtgaaaatataacatttctgatggtggtggaagcagaggccatcctttgctgtttcatgcccaattctgtaggcctgcctcagagagaaggggagcacaggtctcagcatccacagac

SEQ ID NO: 1881724 - DNA, 4001 bp, Homo sapiens
ttacgtatttcaacttacatgaggtatgtagaacacgaaaatttttagggacagaaagtagaatagaagttactaaaggtggggttggggaggggaaatgggagtttttgctcaatgggtatagtttctatttcagataacaaaaaatgttatagaaatagatagtggtgatggtcaaacaacattgtgcatatattttatacctctgaatggtacacttaaaatgattaaaaatttaaattttgtattactgtgattttttaaatgtcagtgaattaaacattcagggtaaagggagaaaaatacaagaatgtgtcattgttagacaactagctattaaaagcataaggtcaaagctttataaatttttgtaactatagagaaactttcagatgggtctttgtacaggaaagagagaacgtgctataagaaattatttgcttttctgctttgtactttttacattatgtgtaatcaagattgtgtgccctattctaggctgatccaattaatcgcccctaacttaaaaatgtttgtggctctatacaactgtctgttactaaattataactttatctaaagagtaacatggtagacagaatgctgactccctaaaatgcctacttcctgattcccagaacctgtgaatgtattatggttatatggcaaaagggattttgcagacataattaaggttatagtacttgagatggggaggttatcctgggttatccaggtttgctcaatctaaccacatgaacccttaaaaacagagaaatttctctgcctacagtcagagatccagcagaagagaaagggaggagatagatgaggcagagaaatttgaaatgtgagaagggcttgagtcattgttgcttgctttgaagatggaggaaggtggcaatgagccaaggaatgtagtcagcctctagaaacagaatgaccttcattcaacatccagcaaagtaacaggagagagcctcagtacctcagtagcacaactccatggaactgaactctgtcaaaagattggattctaagtgatcagggaaatggattctccccaagaacctccagaacaaataaagccctgatggcacgttgattttggccttgtgggacccagagcaaagaaaccagccaaacctactgatttttaacctttagaactgggcaataattttatgttgttataaggtactaagtttgtgatatttgttatggcagtgataaaaactatacagacaatatctggaaacactgcagtgcttgtcaatgcatctggctaaatttctcccaaacattattcaaaatgcaatagcaaccaaaagaattccattaccaaacatattcaccttcctttcaggtggctctctgacatttaatagtttctgaaattaagcaacatgaccccaaagtctctgaaattcagtaccttttccctgagtatatcttgactttttataaagggcactcaaaaaaatcaagggacaacaagaaaaataaaagaacattgttatttttttttcctggcaagttagcaaaatctcaattcaaatattgcatatttgatgttgaataataatgactcaggagatgatttctcacttgcagaataaaaaatactttaacttgaagaaaggaaaacttctatctgtacactttacaagatgacactctgaacactattcgttttgggatttgctccaagtctcaaggtcaagacagctaaggtaatcccagaggtctagagtatacatttcaagagaggagaattcacacagatatgattcagatgcaagtgaaatgaaataaagatttttttttactttctgaaatattgctgacaatccggtttcacatccagaatattagttttattctactccataacaagtttctataaacttagtggataaaacaacacacatttcttacctcttattgtccgtaagtcaggagtctccagtcacaacttggctgggttctctgctcatttttgcagggtttcaaccgagctgcattttcatctggaggcttagctgggaaagcatcagatttcaagctcaatcaggtggttgcagaattcatttcactgtagctgtggactgaggaccctgacttttttctgcctgtcagttttcagctggaggctgccctcaggtcttacaggccaccagcagttctttgccatgtggactttttcaacatagttgcttacttcattgaaccagcaaggagaagctctaaagcagtcgactagcaagatttatataatgtgatgtaatcataggagtggcatcctatcactttttcatatactattaggcacaagtcacacaggtgccacctacactcaaggggagggattaggcaggagtgtgaatatcagcaggcgggtattttactgtgaggccggagtcaccttagagtctgtctgctagtcaaatttcatgattgtctatgcttagaaaattaaaaaaaacagacctttgtttctttttaaaagtttcctatactcattgagagacaaatatggtaaatattggttaacagcacttatattggaatatttgcatatacctgggatcaaataccaattctaatgtgtgattttgggctagttgttcaaccgctgtaaacctgaacttacttttatggaaaatgcagacaaaaatgcctatttactagtttttctgtgagaactaaatgatagaatacaagttaacatatttagtaaagtgagacaaaatttgagaaaaaaatgttatttatactttttttgtttttataaaaacttccttctgattctcaggcaagagtcaaaatgtgtatactaggaaaaaacagtatctatttgaaacaatgtctgtagcataacccagtctgcctaacagatgaaatacatgctctatggagagatttttctgactatacatttcattttaagtcattattattccattaacactagtttttgaacatttgaattttacaaatttttattttaaaaaataccaaatttatactcaaatttaaaataattctctcaatttgagttgaactggattgactgtttagtagatatacaaaaataaccgaacatctcaataattttgaggggtttatttattggcccccgtttaagtaacgagtttgcctgcaagaggcataaaaccatccaagtacttaggatacaaacaaagtggcaatggagagtgttatgttatgccgtgtgggctgcattcagtttcacataaattgttgaaatataaaatatggttcatggtatgagttcatgtaccagctgaatttatttttgtcaattaacagctgcatatgctgctgagatcctttggctaatatactgcattactttcatattgcagcatccaatacagatcacaccaggccactgctgtcttgcagagaataattttattgtagtcattattgtgatcatggaatatttcctttagcttttgattcttgcacttcactcatggtagccaaataaatagctagataggtaggtaggtagatgatagatagataggtagatagatagatagatagatagatagatagatagatagatagatagtacctgtgagtgattcatgccagatacttttggcaattgagctatattgaaagttccctagtgataaaatttattaaaatgaatgtatataaaccagaaaaagtatatattagaattggagaagaacatggagtcccgatttaatgatttaagtccattcttgtctatgccttaactacttttcctttctaattctttgtccatcacaactattattaagacaaataaaattcagaaaggagatttagacttgttaaaagatgtgggacagggtctaccacttaacattttattattttatggcaataatttaattctttttagcttcagattcctcccctgtaaaaatgagattgctaaatttctgccctgactaccatacacagttgttagaacg

SEQ ID NO: 1881725 - DNA, 4001 bp, Homo sapiens
gtactttcccggccccctccctgggttctggcttctcttttcttccccccaattcaatccccctcactttattatgcagggcaatctctctttccttctactctaccccaggcttaactttgcatggccaaaaactgattaatgtctggattaaacaaagggccatttatgcaagatagaatcattggcagagattttgtaatttctttctcttttcctcagtaggtggaagaaagctgtatggaaatttattttccttaaactgcaagaagtggctacagtttgggtttaaataatcttttcctggccgggcgcggtggctcacgcctgtaatcccagcattttgggaggctgaggcaggcggatcacgaggtcaggagatcgagaccatcctggctaacacggtgaaaccccatctctactaaaaatacaaaagaattagccaggcgtggcggtgggcgcctgtagtcccagctactcgggagactgaggcaggagaatggcgtgaacccgggaggcggagcttgctccagcctgggcgacagagcaagactccgcctcaaagaaaaaaaaaatcttttccttcctcctttctggtaaatatatactttcttgacatctatttctgataaactttatttttttaacacagtggttctcaaacttttggtctcaactcttttgcacacttaaaaattattaagggctctaaacaattttggtttatattgacattatcgacatttactatatgagaaatcaaaacaaaaacttgatgtttttgaaagtctttttttggagtctggcttaatagaaaacagctgttctgcatttactccgttgcaatatcacagtctccagcaaactcaactgtatgcaactcataagaaaatcagagcgaaaaggcaaataacatcttagtattgtgaaaattttatcttgatgaccattaaaactgctgttttaatacatattctacttgtgcttcctctttatgaaaaaagaaatcttgaagaaatcaatgagattttgaattaaaactgaaccataggccaggcacggttgcacgtgcctatagtcccagctactcaggaggctgagtccgggaggatcgtttgagccctggcgttccagctgtagtgagctaggatggcgcctctgactagccactgcaatccagcctgggcaacatagtagacccccgtctcaaaaaacaacacaaaacagaacatgaacctaaaatgcagaagaaactcattgattgagttgtcaattttaatagctatggctcaagacggtacaattaaaaactatgcatgaaggatgaagagaatccagcggcattagggccactctttcacctttgtctccatctaaacttcctattcatccttcaaatctctgcacaggtgacgccttttctctaaagcctcttcctttaccacaaataacagtgattataataataacattattaacgattactaccatttattggccacttactaggagccaagcaacatcaaaacacagcacgcgtcagctcacttaattttcacagtaaaccccgaggaggatgctggcttcactttaaaaagaggtgactgaaggttggagaagaaaggcctctggcctctagctctgtgccttgcacacctgatctgtctcagcatttattgcatcccgagggtcaccgtccacgtgcctctatcctgctcaaggtgagttcttgcagtcaaaggtcaagggtggctcgtctccacttcccccgcaaccaaaccgcccggtctcagtgagggagccgccagaagggaaggagcctcctagcttcccggtcctcacgctcccggagcccacacgccccaaacagacacagaagagctcgctgagctctccgcgcagctaaaccctccaagctttgctgggagaaaccgatgcccgagagcgcgtcgcgaggttcctcctccgccaggtgcgccggctgaggccggaacctttttcctcccgccgcggtagcagggcgcaggccggaacctttcttctcgcgtcgccgttgccggggggaggcgtgtggggcaggaccagtccttcagcggccgggttcgcgccgcggtcgccggctgcttacgtgggcgggcctagtgtggggctgagggtgcgggtcgctatggcggtggacatcacgctgctattccgggccagcgtcaagaccgtgaagacgcggaacaaggcgctgggagtggcggtgggcggcggggtcgatggcagccgggacgagctgttccgccggagcccccggcccaagggcgacttctccagccgggcccgcgaagtggtgagctggttgctatggaaacggcgggttgaggagggggcagtcctgcgacagggaccccgggccccaaaccagaccccgtcccgtaagcattgtgtgaagggggtggctctaagggggacagaagagttggcctcagagaccctacagctttttgggggaaggaacagccttattttgaggaagggggacgcatattggggaacagatttctcctgcggcgacagggattgggggacaagaaaggagatcctcagaaatctctatctggaaagtgcatgggcggctttgtgaggtcatgagttcgccgtcactacagacttgcactcaggggaaacctcctgacagtccttcgcttcctgttgcagcactgaccacaccatatttgcctgttctatttacttgtctgcctcccacccctagttgagattaaaaactgtattcagccgaactctttcttccctttgtctctgcaataagtaggactcagttcctcttgagacgggtttagggtaatctttcgcaaacacagtgttacagtcacctcaactactttctgttccctgatcagagcaggtgtcccttcatctccctgggaacaggaaccttttccttaagggcagggacagtgttgttttcatctcagaatgcatgactcatagcattgcttagtaaatgtttgttgaatgagtgaatgaacaaatggctgtctttcccattaaacagaaaactccataaggggagagctgtttgtcttgttcccttttgtgttcgtgacaccaaggaggtatctaggttttgtggggcctacagcttatatagttctgtctgccctcttcaagaaataaaaatcaccaagaaagattcagagctttggaagattgaagagagggaccctaaagcttaagcctcattaatttcacagtaaatccttctctgcttggcatacacttggcactgtatagacactcagatatttttgaatgaatgtagtcatgcatgcattaatgacagttagcagaggatacttaaacattagaaaggggattggaccagatgaatacactcgccctattgatgaccgtctatgaagcacctaccttctgaccagcctcgtgttagagtaatatgatgtaaaagcagtggtggagtagacggacatagacataaaacaagtgccataaagccttgcaggtgttgtgtagggcacaaaaagaatgtggtcagttctacctgaggaccagaaaaggctttatagaggcgatgatgcctaaaacaaatcttgaaagaggattagttggttccagtgcagaaggacatctcaggctaagagaatagtatgcgctaagctgtggaggtaggtaacagtctgacataagttggttcaataaacatttgagtgagactggaatgtgggactctcataaaaattggacgcggagatcttaaagggctttgtgtatcattgcagagtttgaattttgccctgtagatggtcagatgttatctggtagagaaagcaccagagaaggagccaagagacgaggttgttgtctgaaccctgcaactattagctatatgatttcattaagcaagttttaagacctcagtttatttacctgtaaatggtcctttttttctcctcctccttttaaaaaactacctt

SEQ ID NO: 1881726 - DNA, 4001 bp, Homo sapiens
attgaaattctccataaaacccatctaccataaaaccaaattcattataaaacagcagtatggtccctacatgagatgcatttgacagggggaaaaaaagactctcttacattatctgctcttatacacataaaggttttactaggaaacaccaaacaaaacaacacagcatcccaataggcaaacaggtctcctgtgagagctggtcctatcagtggatctacacagttgacatggactcaacaccaggaactactaacatggatgaaagtcccataagcatattacctagtggggaaaaactgagacaaaacagaggttgcccaaagcatgtatggtgtgacccatatgcgtgaaacataggaaatgcacacctagagctgtatacatacatagaggggaatctaaaagactgctcggcaaggtatcaatgattgtaggtggtaagatttggagactgctttcttcttcatactttttgcactttaaaatttttctacagttactacgtaaaatccttataatcagataaaacatgttattaaacaatcaaaaagggtgaatcttcccacatacttccttgactaaaactgtacattaccttcccctttaacccaggataagcccacatcctcatgcccaaggcccgccagtgccctacgctctgctgctgtctccagacgcaaagccctccctgcttcccaatcctgtcttctgactcactcctatgcgtgaggctctgctcaggtgtcacacctcctaaaggcttccctgctaactcgaggccaggttaaggatccatcttgcaaatacatcccttgcagagatgtcaccatcttctgagttttgaattgttttcatgtctccctgacataagctgctgaggcgtctgcctagcccaaagtggctcctcaataactatttaatgctccacatgggattttctttttttaaaaaactttttgaattgattttctatccccttcaagaatcagtaatagggtacaataaactccaaacatactaaggcagccacatacttcccattatccactagatggcaacacaagtattagagcagcagtaataacaggacctctcaaaaacagcagttttttcccaaggactttaaaaatttctctgattcttttgatctggaatcaaaggattaataaaggttcaccattctgtgcaggaggaagctgaaatgagattgtttttaagcatacatatgcactacagatgagttgagtccaggaatattctgaaacactgcactctaggcagattccacacaaagggagctctgggagcatggctgccagctgccatcccaggcggcaggcccagctttgtttttatgtgtcacccacagaacagccttgctagctgttccttcgtgggtgttttgtgaattacccaaagcacgatatactgtacaacaaaaaccctggtacaaaatgatgggattcttctcaaagagcgaccgcattctgactgtggggagagttcaaagcagtcggcaagtgtcctttgctgatcacagcagtggtttgacttgcaaaccccctcacccttcccaggatgatagaaattctgttctgctggcactcacaacacttccaacaaagacctgattgattatggaacactaagtactgatttgcataatttgcctctgcaagaaacaagcattgttcaagattaaagagactccagtaggtccctctggcatattgtaaaaaggtccctgtaacacaaaatcattatttttttttcattcaatcagtggacacagcttgctgttcagttagtatgcagccaaaggcacagccagaaaaaccactgctgtatgtttgccaactactgacaagttaaagtgatttttcacaaggatcatgtacccaagtttaatttggagcccactgactaaattccgagtctaactcctttcactcttaattgaaaaatgcatcaatagcaattactaagtcagagctaaaagttcagaactaacacacctctggagcatgttgacctgctgatgtcacagtggggactgtctgagtcctatccctgtgcaaaagaagctccccagtgaccaatcacccacaaaagaggctagcacagccacagacattccactgtgctcaggaccacagcagcgagtttgttgagggaatacataaaggaactgttcctttctcgctttcttcttttctttcagcagttgttgagtaagcaactcctgtcactttcccccaattcctactgagggggacactcttcaccaggcctcaccaaactcggatggctctcctccctgctcctgcctcctccttccttgtcccctcctgaagcactagcctccctcgggttccagaacaccactgtctctaggttcttttctaaaacctataactccttttcttcaccttcattcattccctctctgcctttgttaatctctgaaacttcttgtaagttcagcccttggctctttctttacatgttcttgctaagctcactcattccaatccatagctttatttactgtctacatgaattgtccacccagccgctgcctccctcctgtgttcaagctgagtgtatccaaatgctttttagatactgccactgtgtgtcccactgacgcctcaaaagcaatatgtcccaacggtatcctcatgcagccactcacaccctctggcttactcctagtccctcctgttctgacggccccaaagagaaagtcttcatcctttctagattccaagttagaacaccttggccattttacactcttctctctttttcaccctacaaatgaaattggtcagtcagtcccatccactcaccttgttaaacactggctaaaggagccagctccatctaccagcttctgttcctgcacttcctgcaaccacctgcgtgccagaccacagagcctttccttaagcaagcctcctcttctctgccctgcactctggcacctgcttctctctgcccagaatgtcttcattcccatcactcaacttctactcaaaattgcaggcccaaggaggctttaaaatatagtattctgggttcactttccaccttccttgaggcaagctgtaagtgataaatgttagctgaatatatcaagttctttattccatcagtctggaaatcttaccagaaaaaataaataaggccatcttaacctaggaaaagtataatcaatagctaaataacctattgctaagaaccaatactaatcttacgggactgcggcttccagaattcagcatatgtctttttagagacagaaggagagaaaacatgtgcacaaaagaggagactgacttttctagatccaaccttcttactgcagagagtctcaagtaacagacaatgaggctggttaacaggggggcatgggtggttaacactaggtaggtggatttagcagtctaatttctcatattagcaactaactttctaacaacctggaacgtatagcttcctttctaatattaagcccctatcatctttaaagaaacccagaaattaaaaaaaacaaaaacctagaatcttagtgttgatgacacaaagaactcatgatttaatttcaaaagttgagtggcaccttataatgcttaagattcccattaaactcaatgcaacttccattttaaaagacttctaggactcttacacccatagaaaaaaacaaatgtttattatgcactcaactcttcctcctcactccttccagccccaacttactaacttcaatctaattaaacatcttcattcccattcttctagttccccaaactacaattatttggcattactgaacacattcccactatttctgaagctctgtccactcccggtttacctgaccttactatttgcctagaacaggctagatgacacacagagcagtgactacctccctgcttggatggttaagactagcaaggatctagaagacacctgctttgccaaaa

SEQ ID NO: 1881727 - DNA, 4001 bp, Homo sapiens
ttgcaaatacaactttcaagccgtatgagcaaattcaacttacatgaaaggcacaagataacatcatgttgaagaactttatccgtaaatttcataaagtctagtcacaagttattggaaacttcgtaaggaatctcagaactgtttttaacatgatgttccgatttaaactgagaactgcatagtctttatatcacaaatgtaaattgaagtaagagtgaagatttagagagagaatagtttcttattttggatgctacctgctttaggcagtgttggttactaaatactcagagcagaaaattaaaattgaatcgtttttcattttctacagcttatctgctgtgttttcagtttgtaaaaaaaaatgtattttcacattactgcaatttttgaagagtcaatcactgaaagaaattttaaagtaaagtcttgctctactagcttcctacattgaaatacaagaatacaggaagtgctttcaacagaaagttacgtagttctacagtacaacctgtctaaagacttgcaagggaccagcacagtgactttgtctctttggatcaggcaaaagcagaagcaaatgaaaaatgaacttttaaaaaaaaattaacatattaaaaacattcctgtatgaaaacgaatgcttgtctgcacttagatttagtgctatagagaggaactgaggcacaatgaaactaagtgcacaaaaggaacatgtctgaaataaaacaattttcaatgtgactgaaacccttcgccattagatatgacttacgatagggttggaggactactttttcatattaaagaacattacaaacaccagggactggccaaactatgttttataaataatatgtagagtgatattaaaattatattgcgactaaaactctggtttttaaaatcacttataattttgatttttcataaaattaccggctcttttgctaaattaaaattaacttcaaatcaaaaacatcttattaaatttctggaggactgttagtttaacaatgataatgtacgtttctcagtttcccaaacaagctctatcagatacacatattttcttcatttatctcagtattagatgttctttccatagaacttaaagcattttggtaaaaggttgaatatgattcttcaaagaacagctcttccaatggcgacttggtagaaacagtaatgttgtaattagaaatatgctgcattggatggtaactgtttgcttattgtattcatcgtgactctagcaacgcctgccatctacgtacttgccgtccttttgactctttcatttcagtccagtgattgagttcttctccagagctgttgagacctaaataaatccagcctatcatctttcttctcatgctgcttttgttatacacagacagcatgagtgtcacatgagaaagctgaaatagggtcactttgaaaacaaaagtttccttgtatactggatttggccgccctctgcggatggatatcttgcatttggacatctcttgatccgtggatttccgtagagttaacttaacatatgtattgggtggtctgtttgctgcccaattttttaagtggctgccttttatcacttctgctgatagtctcccatttgtggcattataaagcaggctaatgagaatttctggaactgacccgtcttcgagagactgacatgcggatgtactttcactacaagacatttctgacacgctcatttgggagtcacagacacattttatcttgtgaattgttccttgtactgtattctgaaccaagatctggaagccctccaacattttcaaaacagaactgcttattaatatagagaaaaagaagcagcatcaggataataaacacccaaacagctgacaaaaacccaactgcctctggagatacttttctaaaacaggtaagttcatgtactccacaggttctctctccaccttcaatcgccatgatgagctcaccatggaccgcaccaactgatggcggaaacttaagtatttcttatttctcattaaaacattcagttaatctttttctctctttttttttgttttctgtttttgtttttgtttgttttgagatggagtcttgctctgtcaccaggctgcagtgcaatggcgcagtctcggctcactgtaacctccacctcccagagtcaagcaattctcctgcctcagcctcccaagtagctgggactacaggcctgcaccaccatgccctgttaatttttttttgtatttttagtagagacggagtttcaccatattggccagggtggtcttcatctcctgacctcatgatccgcccgactcggcctctcaaagtgttgggattacaggcttgagccatcaccgctggcctaatctttctctttaacgtagagtgaactagtacctagaaatcttaagttctggtgtttaatttatacaattactagacttgatgtcttttaacacccctagcaggttggacacaggaaaaagatacagattttattgactaaccaaaaaaaatgctcaaaatatttacaacccactttaatgtttatgatcatcataaattctcatacaatgagaaataattaaaataaacaaaggaaaaagctatcattacatttgcgatttaaattatatgctgaataaaataaagtatatgtgatttaaagtatatgtaacatatttatatctaggaaagacaaaatttgtgattacttactgccttgcactcccatagtgttctgtcccttcttatatcacctgatgcagttgtttcttttccttctatattagtctctctccctgactttttttttttttccaccgctctagttgagcagttgaggagatttctttctttcttttcttttttttcttttttttttttggagacggagtctagctctgtcacccaggtaggagtgcaatgtttcgatctcagctcattgcaacctctgcctcctagattcaagcaattctcctgcctcaacctcccaagtaactgggattacaggtgcacaccaccatgcccagctaattttttttgtattttagtagagatggggtttcaccatgttggccaggtgtgtcttgaactcctgacctcaggtgatccgccagccttggcctcccaaagtgctggcattacaggtgtgagccaccacacccggccaccactgctccaattgtaaactcaaatacaggacctgatttttactttttaacccacagtctcctgttctgcccaaggccacacatactggaaagaccattacttttattaaaagcttaagagggattctttaagatagatagctcgtttgatctcaagacattcttgtgctaagaaaattaggttgaaactgctcaccatcatctacaatggatccaaatcctgtgacgaacacacttgttttaggtggcaactttatagatgagtctgggaggcaaactctctggactatatttgaaaactcaactccagtagagagctgaaccaaagcaatgtcattttcatttgtttctctatggtaattctcatgaagaataattttcctcacatttcgtttcactgcgggtggtgttatagttgcaccaaaagtagcaatccattgagttgggtctttatttctgcaaaaaattaaaaagtaatacttgtgatgcttgacttaattctgtaaaaaagactgagactgtatttcttcccaactgtcagtattatgctcctgaaacattcttttggtgagaaagtttgtagttgataacataataggaaaaaaattgtttttaaatttattacaattaattatgtacaaataattaataactgattaatttccaatttttaaagttcttgcttgctgggaactcttcaggttcttttttccttaatttcaacaaactgtgtagtaattaattttgatttgttttggataatatacatagtaagaggcattttctctccatgtcatatcttccaccgat

SEQ ID NO: 1881728 - DNA, 4001 bp, Homo sapiens
tgggacggagtctcactctgtcgcccgggctggagtccagcgacgcgatctcggttcggttcactgcaacctccgcctcccggattcaagccattctcctgcctcagcctcccgagtagctgggaatacaggcgcccgccattacgcccggctaatatttgtatctttagtagacacggggtttcactatgttggccaggctggtctggaactcctgacctcgtgattcgcccccttcggcctcccaaactgctgggattacaggcgtgagccaccgtgccgggccctctctcttctatttaaaaggataggcacagcctttggaactgaatgtctttcctcaggcctcataatagaaaatgaggaaagtccattctgacaactggctgccttaggcaacagaatttgggattcctacccttccagctcctgttgagtcaaaggcaaaggcaataacccaataaatgtggtgagacagtaaatggaaactgacataaaaatagcaataaaagcctacttccttcttgacaatcaatacataatggaatgggtatgattttacaccataaaacatcagagaataatagaatatgggctgaagaaagctcagaagccacaacattttccccaccttttgattttcaaaacgattcttaagatttgtcgggagtatttgttttcaattgtttcagtgaggctcagttttgaccacatgcaaccaaaatagagaatttcatggaggatggtcacaggattggcttagaaaaatgtaatcctgtgagctgtcccctttcataaataataaggttccgacggctgcaccgaatgttcctcctttcaacgaggttgggccgaggttgggctcccagctgctgggacatttttagtccatcttggactctcacctctgcctcctgctcagctgtcagaatgccaggcggctctgcagcccaaagcccactccgttttaaacttgctcgtttgcaatcacgtaacccgctactgacgacagaaccctcaaggcccatttatatgcggttctcaagtttaggtctagggaagtttccaggaagcttagtgttcggggaggaattcgttttgcttttgctaatcaaagagacacaaaagcacagctgagtcccgaagctggcacacgggaaatcgaggtaccactgtcccctcaccggagcgcgcaacaatcacttggggagcggggaaaaggtttccaccttccccgagcctggggcaccttcgctcccaccgccccagctggtggtggtctcgacaccacgctcgttgcggggtcacacgccagagctggaaaggggaggtccagccccaagtaaagcgacaaagtaaggacacagtggtggccaagggctgtctcctaaccccagtcccgaaagacagtgtggaaagtccgccggcgcgccagcccttgaaactctgccggtccggccgcggcccctcccctgcgcgtccccacctgttgtgaagctgcccaagctccttcttgcccaaatgctttggaaactgccaaaggacactcagaggccagggaatgtaacaggcaagcataaatatgcagaagagatggaaccaaaatagcgggcaggcagggccggcgctcgtgggggtcggtgatctggagccgggcccccgccgccgcggccgcgccagcagtgccaagacctggcgggcggcgccggcgcactccgggcaccgagtctgcaaaagaggccctgagcggaccgccggacacctcgcagactgcgggcagcggtggtggcggccgcctctccggggctccacggccgacccgccgcccgccgccgccatccccggcccgctcctgccgggtccccgactcgagccccggaggcgcccgctctgcgggaccgcgcagcccggctgcatggagcccggcgcggtgccccggccggccgagccagccacggcgcgagaaaccgtcgcccgccacggcgagggcaggaagaagatggcggctaccgtggcggcggcggcggcggcagcggcctcacacgcgtcgctgacgccaatggctcgcgccggtcggcgggccgcggatggcggcggcggcggcggcggctcgggctccggcgaggggcggggcgaggcggggagggggccggccggaggcagaggctggagggaggcggcggggacagtttgttgtgctcggaacatggcgggcgtcggcgacgcggccgctccgggagaaggcggcggtggcggcgtggacggcccgcagcgggacggccgcggcgaggcggagcagccgggcggcagcggcggacaggggcccccgccggcgcctcagctcacagagacgctgggcttctacgagagcgaccggcggcgggagaggcgccggggccgcacaggtgaggcgggcggcgctaggccgtggcgggctccgaggggcggactggggaccgagggcggcgggggcgccttggaaccccggcccccgagccgcgcggctgccgttgcctcccggggctccccaggctgtgggcgcgcggagccgccgaggctgccgaggctccgcggccgttgacagttcctcgggcgggttgcgcgcgcagccccgaggcccccgcggccgcgccaggccaggtgtgccctagaaggggtctgcggccgggaaagttctgtccgggtccttgcatcgccctcggaaggtcttaggttagcgggcatctcccacgtctcggagcccaaacgtgagaagcacacggctgatttcttaattatattcatgccaaggtgactttttttgttctgtattttaagcaaacttgagccatagaaacctgttaacttgccctgcaagtagatttttcacagacagctgacggtgtggtagtgaccatgaagttcagtagttttgcccagtacagaaatatttaacactccataaaatgttgcatctgaacttttcctgaactgaaacttatgccaaaaaaattactagatgagaaaatgtgtacttatgaatcctacattcaatgaccagttttaaacgtattgttacaatgttacagtttctataagctgtaggtttttattctcattttaaaagaatttttaaaacttgcatttgtattcatattgcagttacagattagttttaaatgaaaaaaggttttgagatggatgtcttcttgaatatagagtgaacccaacgttttaattctcaagctgtaaacagcaactgaaccataactccattaaatttcttccaactaaaaaattacttctgttgtccaaaaggggctgtgttagccgttatttcctgaagttcatgcaaataactaagttgtgaggctgattacatcattgattgtacttgagtactgaaattttaaaactacttaaggggcataaagttgatcagatgcgattctaattgatttgctgattcccagaactggacgtaggttctatttgaagcagtctatatttttggaaaattacagacggtcttgtttggtctttttcaattaaccacttaaaaattctcaaccatactttatttggtttagttctcagttaaacatttgctttcaagagtatttactttcttcattggcaggatctcagtaagacaaaatagcaaatctctcaactgtctgtttacttacttagacttgaatattaaaagcactctgttgtaaatagagatagatgtagccaggcttcactatactttctttaaaacatttctcagttgcaggaaagccaccattttaaaagcctttttttgttgtttgcgtggagaggaaatgaagttgtttgaagcctattgatgagcacagatcttgagcttgcagtatcacttaacacttcttccctggctttttctgggactggatacctggacttccatggacttcattataccacgtatccattcttcaccaacatggttcaccatgtttaaggctggattttttttaacccatagttgcaggaag

SEQ ID NO: 1881729 - DNA, 4001 bp, Homo sapiens
tgttaaagctgtctaaatctaagctagaggctttatgatttacagaagttattgccatgtcttcttagagtttaatactcaaaacaactgctcattgtaaacagacagacatagagtatccatattttcatctacatcattaagtctagggaagtgaaacttcctgctttctagctgagttggcctcctttcaaggactccagatctaattgcttttgcagaacatgtatatttccaatacgttagactcatctgctcccaaggaaaaatttgacttttttctggtcaatttgctatgcacaatttgtcatcactagaccattcctattgtttatctttatggatggtttcccagatgaaattgacatatatttttttctctttctaactagccacaaggctagagttactcatgtaactcttcaacagctcagctctggagtttagctattagcctttctttatggagaaaaaaaccccacttaagcaatcctattaccatatctgagctgttttggtttttgtcctgggatgtggggcctcaccactctatcatcctacataactgcttagcttacaagaatctggacttgggccactctgattcaatgattatgagaatggtttaggttaagacgtttttattgtatttcaagcaaaaaaccatcacttgctgtaaatccaccaattttggttactttaaatttgttatacccataacattataacatcaacaggaattagtaaaaatcatccagatgtccatcactccaagaaatcaccttcattagttttcctgtattattttgtgttctgtttgtatacatgtatacattttacctagttttaatcataacagatggcacttttagttagctttccttcatataatttgtcaggaatcacttttttgaactgctaattcttttaaattattgtttgagtagccacattcaaccatgtcagatgttaaacttttagtgtttcttgttacttctttaaacaatgctaaatctggtaacctagcctttgaggtgacaagctcatgcttataccccctcatcatgagtgttgacaaccattggccacatgtaagcaaaaactaaactggcagcaggagagctcatcccaggatgttgccagtttttcatttgcctggcatgggatcagtatgcacccatctctttcttggcagtaatctaggcagatttggaaggttttcatcatacttaacttggggttcaaaagcaacgacaacaaaaaagcagctagagatcactgcaacaacacatttcatactgagggcaatacgggtcagtaggtgacatgcagtacaaattgaaactagtgttttctataagcactcaaagttgtatgcctctatcttctctccaaataggtcccaaatatgttacagaaaaatctaggatggcattttcctcctttgaccacagctgagactcagagggacttgaggtctttctggtactattagtgaacatctttgaatttttctcctctggaccctcagtcagtgcttctagaactgtgtgcctcttttggctactgtaaaaggcacggtgatttaagcctggagaaatgtaaatctgggcaaccaacaacctcccgtctatccttcaaacacatatacacacacttttacacatatcggttcattttcttatcaaacacaaatacatggaacaacacagtaacaagaaaagcaaagagaccgggggtagataagaggtaacctacatttcctaaggtatttatactgaccatccctcagccttacctttacagggggattctctcttaagtcaggttgcagtgtttaaaacgctatgcaatttgctactgtgttactcagtttccaaaagccacaatctactcaattcacctgttctgaatctttcttgattctcaaagaagcctgtctctgaagagctccatccttctgggtcacacttccttctgatatggggcctctctcttctgtgaaggtctctattccagtcttcctgaagcagcccgatgtacccttctttctctgccttttcaaatggccacagtgatgtcactctcagctgtttctaagctggttcctaacctcaagactaagggaatgactcagctggaatcagtaaccttgtctttaaaaggtcagactattttgaaccaccaccaccaccatagacttaatgcagtcaacccgtttaacagacaggtataaattaaatacgggcatactaaacatgtgttctgagtaaaagagacttataaaagatggaacattgtttgccaagattcaaaaaagttttaactttgaaatttcattacagttagtctgttgagaatggtagacaattttaaagctactagtgaactcccaaaactcaattcggcaggctttcctctgacctcatcttccttgaccactaggccttagagtccaaaggctggaggggccgaagttctgatgtccaaaagaaggagatgaagtgtgtccagctccaggagagagaggagaggaaagagagagagagactagcatttgatacaattgtccctctaaccttccgttcctatcctggcttctctgacacccacaatgccaagttagttttgctctcattcctttcctgctccctcaggtagtttattcatgacgagtgtctgcagttatcacctgcatgtggtttcttggtattagttgggagttgcaagtaatagaaacctaacttgaactagcataaattttacaaacatatttaaggatcttaggcaagaatgaagctgcctaaataaggaatacttgggatcagagactcaaacatgtgagttttctaccaattttgttttctttttctgtgtgactgtttcattttcctgtgtgcagaccattttgaatttatatctcttttgttccagagagcaggaagactgggttgtaatgtcttggtctcaattccagatttctaagtaaggcttttgattggctcagtttaggcttaggtctcgaataaatcaatttcagcagggggtacagtcaagggaaaaggttaagtgatcaccttggatcaatcaaccatggctaggtggtcataagaacatggtgtccctaatgtcacctccagacttaacctcccatctgagcacataaagaatttgctagatattatcacatgctgccatctccaacttaacaagcctgaaactgatctcataatttcccacccaaactataggccacctttactatttgtgaatgaatagtattatcattctctcaccatccttggcccaaaccttgaatcatcctgcctcatctctttctcttctgagtgcagtcatcaatttgtaaaatagtactgattaatatttagtggatatttactgtataccactaaatggtacatgtattatctcctttaattctcaaacaaacccctgagatagattctattggtaaagccatttttacagattaagaaactaaaaaagttagcttgctcaagatcatacaactacaaagcaatgggacttagaaataaatttaagtctgttcaaactctgagccaaagcttttgttttgttttgttttgtttttttgagaccaagtctcactctgttgcccagactggagtgcagtggcttggtcttggctcactgcaacctccgcctcctgggttcaggtgatcttctgcctcagcctcccgagtagctgggactacaggcatgtgccaccacacccggctattttttattctgtatttttaatagagacagactttcaccatttggccaggctggtctcaaactcctgacctcaggtgatctgccggcctcagcctcccaaagtgccgggattacaggtgtgagccacagtgcccggcctaagccaaagattttaacaatcatgcgatactgtcttatcgcttctctaacatttttgttacataatatttctgatatctcgtaccctacaaatccctccc

SEQ ID NO: 1881730 - DNA, 4001 bp, Homo sapiens
gtacacaaatgttcataatagtaaaaaaaaaaattggaaaacccaaatgtccaccaactgttgaacggataaacaaaatctgctacatccataaaatggagtacgattcagcaataaaaaataaagtactgatacgtgctataagatggatgaactctgaaaacattccaagtgaaagaagccagtcacaaagaccatatattagttcataattccacttacatgaagtgtacagagcaggcagaggcacacggaaactaaattagtgtttgctgagcggggtgggggaatatttggaggtgctgctagtaagaatgaggtttctttctggagtgatgaaaatgttctaatattgattgtgactgttccacaattctgtgcatatactaaaacccactgaattgtacactttaaaccaattagttgtgtggtatgagaattatatctgagtaaaactgttacaaaaatataaggcaactaattttttccttaaagatagctaaaaacaatgttatttttattcagcctcactcgggtcttaattggttgagcaggaaaaggctctaacagcccaaccaacttacagtatttaaatccagttcttactctctgcacacaccttacagccaaaaagtatttgccctgcacatcccccagggaccaatttttccaaagttccttgaccatctatccttaggccatgtgacttttaaggaaccataaccaaaagctattaattccattcagagaagatacaagcatattataatggaaaactggtgtgaataagtaataccttaatatgtatcttcggctgtaatctggacaaagtaaacacaaaggggaaaaagaagcaatcttgttaggcctggatatttggaattatttttgtgtgctatacaaagaaacggaaaagttgcaaacccttctctgttttctgtatgctaaggatctccttctcagagacaaaaacccactggcccgtttccttctctaagcaaattgaaatctcttcctcaaacataagagcttataactaagacattgttctaagctctatctcctgaaagctattcataatgcctcattcccaaccaaaaccacttaattgccccttgtcccctgcccctattactactgaggagccccaagaaccttaccttatttccttcattgtggcaaagtgtttcagaaaagggttccttgaattaaaagtcggcgtatcctatttgactcctgctcctccggtatcacatacctacagccaaccatgccaagagcttccccattatctccgcatcggagagctacaagataaagcgcaagaacacgacacgcatctcagtaaatcatatatttttggcccgactctgtcttcaacacacctaaggcaccgtgttttatccctcttccataccctttcctcccgatatcctccagtttcagagaccgcacccggagacccattggcaggttcctggattcgcctcaattttggtcctgcctctctgcttcgcattttcaggcttggcctcacaagaaggacgatggcgccagattgtgccagaatgggtgaaaacagaaggaaaataaaccggttgcagcaaaacccactattccgcctccaacgcggagggaggagcggtcaaatgcacgtcttcaggctcaggcccttccgattggctgctgggacacaacgtggcctgtcattggctacggcaccggcgcagggccttcggagaggaagtgtggaagtcccgcgcctctaaagcccgcctttcgtgacaaataaaggtcgtagccgcagagtcaacgggcggagctaaagtggtcgtgattcatgctgtcgcgggaaccccgaaggtggggccccacgtaacaagaagatgacccgaagttgctccgcagtgggctgcagcacccgtgacaccgtgctcagccgggagcgcggcctctccttccaccagtgcgtatgggagcagcctcgaagccttcgaactccctgcggggcccggcgggccgtggcgtggcgtggggcggggccgggccgcactgtgggtcgcgccgcgtgtgtgacgcgacgtgacgtgcgcagcgtcggggcgtgggagcggaattggggcactgtgagaattgagattctctctcttcccgcccagtgtttacctctgaatagccggttctcgcaccgcctaccgctttaaggagagttacgcgaaaggagtcctccattaattggatggtcttattatttgaagtgaggaggccgaaagggaaggcagtttaggacaacggttgaagtgtgtgtgtggcgtcttcctgagcacgagtacagatcagttttctcctgtactgcctgacattgcaagttcttaagtgctgttagccgagctgtgcaaggccggtccgattctggctggatttgatcatggcagggaagtttcatttggctcgacagtggggaagaatttcagatcagtcttatctgaactcatatccatggttcagactggtataggtcattcagtattcagggtacactagcaagtagaaaagtgggtaaaatagatcctcacagacaaaaggagcagatttatggaaagatcaaaaagaactttatggttggaaagggggggtaggaagagggtagttaggaatggcatgggaaaatgtaaaggatagaaagtgcaaatatagaggagtggaaaagtacctgagaaaccattttaaaaatgtaaatgccaggttaaggagtttagagtatgtatggtaggctatgtataaaattcattgatttttttttttttttgttttctattttttaaatagggctgattcctccacctaaattgttagcagtgtgaaccaactcattgtgtatgtgagaccataattgatttgggatttttcttgtgatagaggtagttttaaactagggagacatgaattccaattttaattgagtatttactgatgtctgtacttggctctgggtcttggtttcttcttctgtaagaggaataaaaacctgccttgtagaattttgtaaaactaaaacgtaagactttatagcatatgtaacgcacaaggtaaatgctttaaaaatggtattattaccaaattaattttttccagaactcaaaactagttatgctagttagattacaatatttcccaacattttccttcttttttttttttttttttttggagacggggtctcactttgtcgcccaggctggagagcagtggcactatcacagctcagcgcagcctctatctcccaggctcaagtgatcctcccacctcagcctcatgggactacaggcacagaccaccatcccggcttttttttttttttggtagagatgaggtctcagtgtgttgcccaggttggtctccaacttcttggctgggattacaggcatgagccaccctgcccagccccagcctttttcatagcattttacgcataggaaataattgttcaatactttggggcaaacctacagcactgtttggggctgccttcaagtaactactcaggtgtcccagcccaccccatggactaagaatatcaacagctgtactcactaggcatacctgttgggaagctttgcatcagaggaccacgctagtaatagaagttgttggaccagccaacttttgagggttccttgcacgtttagagactatacccaatctgtggaaaagctcccttgcaaaatatgttccatgagttagaaaagaactcagtgaaaaaagatagatttgccccaactttattggaaaaagaattccctgttcatttgcccttgatcaagtatcatcatcttcttagaacaataaaattataatcccagaaatggaattagttgttcttaggaaagatcgaactttggatagtactttacagtttacaaagtgattttgaatacatttgtagcctcatacactcttactacagccctgtgaggaagttctaagattgagagatgtgt

SEQ ID NO: 1881731 - DNA, 4001 bp, Homo sapiens
gtcctagctaatgcagtagaaggaaataaagagtttgggaaggaagaaataagctgtctttgttcacaggtgacatgactgtttatgtataaacccaaaagaattgacaaactgccagaactagtaagtgattatagtaaggttgcaggatacaagatgaatataagaaagtgaatcactttcctatatactaacaatgaacaagtggaatgtgaaataaaaagcacagtatcatttacattagcacgctccctcaaattacttatttataaacctaacaatatgtgcaagacctatatgaggaaaacaaaactggtgaaagaaatggagagaagtccatgttcatagataagaagacttattattgtcaaaatctcagttcttcccaacttgttctatagattcaacagaatcccaatacaattctagcaaactattttgtgaatattgacaagctgattctaatatttatatggagaaacagaagacccacaatagccaacacaatattgagggagaagaataaaagaggactgagactaaccaaccttaagatttactgtgaagctacagtaatcaagacagtgtgatattggtgaaagaatagacaaatagatcaatggaacagaatagagagttcagatgttgtttcaggcaatttcgattttcaaagaatgagtcttctatgtgttttaaaaaaaacagtgaatgggttttaatgtgatagtttttggcccaactaaaatttggctctgggtttaatgtgctttggagacattttcagatggtcattaaggattattgggaaagtatagaattggggtttgatataacaaggaacagaaagtatgggctagaagcatagatgtgggtgtgtagggaggagagggtagctgtcttgacaagtggctggagctaggaaaacagtcccagtggaattattgtcagtgaggtgccaaatgtgccgagagataactattgaacaggtgaaaatcaagtgtccaaaaatccaactggattggagtcttcagcacagctctctgtctccacataagtgggggtgtcacagtgtcttcctgagcttgggccaaccagttatccagtttcatgagaatgggagtcctgtcctgcctacttcaagcacccttttcttgccagccagaaagaggcctattctattctacaagtctttggtccaccaccattctgctaccccatgagcacagctccaggactagatttgagttagtgggctgagaaattcattgtcttgagcttacatggtgggggatggatatctctgttatatccattgtatatatgagaaaacagcatcaaagcagtcaaataacccgtccaaggttttagcttatatgtgacaatccatgcttgagtttgattctgactccaaaatccatattctttccacatttcctggtgacttttgtactcctctgctaactcctggtgagtaagaggtatgtaagaccagacagtcccagaggctgctgcattattagagaacgcctatgccaaaatgggaggagggaggagttggcttatctgacccttgtgcttgggtggggctgcagcaccagcaaagtagatggggcctggttggtgtaaaaccacaggatgctttggccttaaggtcccttttgcctagcaagatcggcaaacctgaagatgacaaatctgggaatcctcatttcattttttaaaagctttttgtattatgaagcctgtctctgcttctcaactaaactataggctcattgagggcaggcactttctatgtttttatgtcatgctatcattcagtgctatatgcattaaaaattgttaattctggttagtgagtgcttctgtagagattttaaaactgggctacatgatgcctgaatttctggcaaatgaaaaattttagtaacaaagtataaaagaatgttttacctcatcattgtaagttgtaatagtcacaaacattcccaaaccaggagcagattcaaggaacgtatgtctgcctatgtcccattgctgtatcttgaaagtccctgtttcaaaaatgtaagacattacaacatgtaagaaacagtaataatgtttattagatgttactgttaaattaaatgaatttatctttctcagtttacctaaatcgtaaaacactcttagtctgaacagctatagcttggtgattaggtatctaacagagtagaggactctggagtatagaggaagacttgagttcttcatttctcactctcgtttactaggtaacttgacaaattatttcaccactccaagcctccatttcctattcagaaaaataggggtaatatagatccctctcagatctcagttgtgagaactgccgaaaataagcctatgaaaggtttccacctagaatgtaaactccatgtgagctgccactaagagatggaactcttggaccttttccgaaacctccccagtagttctccctgctttaacttctttctcctgtaacttgatcccatacacttccagcagaattccttgctaaaatatcagtgtagtcatgtcaaatctttcgtttcattgtctccagaggtttctgctgaaggttggatctgaaggagtctctggctatctcccattagtatgtgttagctatcatatgacttaacttccctcatgtgcccttgaaaggtacagtgggaatgaaaaccaggtaacatttgttggacccatattatgcgccaggcactgtgctaaacacttaacatgcatcactcttgtatagatttatgtaactataatatgtgcttataaagtacaaatattataaaattttataaaagtgggagaaaaggcactacactgtctgggtttgaatcctgactctactgcttgctagctatgtgggcaaattaatttttctatactttagtttcattatatctaaaatcgttataaaagtagtatttaccagctgagcacggcggctcatgcctgtaatcccagcacttggggaggctgaggcaggcagatcacttgaggccaggagtttgagaccagcttggccaacatcgcgaaacctcatctctactaaatatacaaaaactagccgggcgtggtggcgcatgcctgtaatctcagctactcaggaggctgaggcatgagaaccgcttgaagtgggaggcagaggctgcagtgagctaagatcgtgccactgcactccagcctgggtgacagaggaagactctgtctcaaaaagaaaaaaaaagtagtatttacctatgtagggttattgtcatgaagagtcagatgtttgtaaattgctccattagaatggtgcttgacatagcactgaataaatgtgttatatgtaaatatatatagataacacgtataaattatacatatatacagttgtgcctcagtatccatgagggattggttccaggatgtcctcaggacaccaaaatccacagatgcgcaagttccttatactaaatggcatagtatttgcatataacctatgcacatcctcccatatactttaaataatcactagattacttataatgcctagtacttaaatgctgtgtaaatagttgttatactgtattgggtttttatttgtatttttatttttgtattgttatttcttattattttttcccaaatattttccatttgcatttggctgaatctgccaatgcagaatttgtggatatggagggcccgctgtatacactcacacactttttagtaaccgaggtgatttttcccttactaccacattatgttatctccatctggagaaaggaaattccgtgcagggacatatgcaaaagtcctgagggcaggaggatgcttggaatattcaaggagcagcagaatggctggagtgaggttagcagggaaagaatggtaggaggtggggttgaaaagatagcaggggccagatcatagagagtcccgatgtccattgtaaggatttggggaagcaattg

SEQ ID NO: 1881732 - DNA, 4001 bp, Homo sapiens; identical to SEQ ID NO: 317463

SEQ ID NO: 1881733 - DNA, 4001 bp, Homo sapiens
acagatgattctctgggttgtagctacctttaatttgtaacctaaagactttatgacaatgacatagattaaatagctgcctaaaaacggcaaagaaacttcccaagtagaaagaatatcagctattagccaatttctggtagtccatacaacaaattcttctggaaaatcacataaggaattactcggaggggacacagaatataaattatattttgccataaaaaaaaattcctggatgtaaacttctcaatacttcctttgcaaaaatctaaaacattgccttcttctgacatgttcctcattctatttgataggactaactctaagaaaaaatttgaaattgataaaatgtggttttgaagtctttatttccacttctggtatttttttttctttctcttaactattcatcaggcacccacatgcaagcacaaagttcagtaagatcttctcaaatgtacaagcaaagtaaaccaagtttctaaatcactcaatgttctgctgtgtaatcagattaatgcctcattctgagaagctaatccctgaattaaggcttgaacctttcccaggtaacaagtatttattcaaaagaatggcttaatcttttgaaatctttcaggttagaacttctcagtatgaacttgaaatctttcaggttagaacttctcagtgtcagtatgatgaaagaaaaggtggaggtgccttaaaggaaacaatatccactcagcataaaggtgatgactccctggtaggcaaaacaaaacaaaacaatcatgctgtttcttttccacttttaaatgtgtttgatcactcttttattgatagatcagaaatgctggtaataagaaaacatcagggttatgaataaaatagcatccttaataaaaaagaaataatcacataacaaaaacccttttactttacttaaagaaaaattcttagtatattctatcacagtgaatattctctgtcaaatcacattttcatatgaatactgatattgtgaatatatatatataaacacatacacacatatcttaaagggttcaactattgacttaaaatacacattttagaaaactatttgtgtaaggtatgcacttatatttcatagttatccaaacattaagtgttataagttaaattcagttaattttgctatattttatgtatatagatgaaaactccttgtgagctgaaagtatgttcttaaaatgttgccattaatgatcgctgttcacttattgtgataattatctagttagatactttaaaaatagatagcatgtgtaaatacataattatatgattctggttcatgaatatttaacaagtaaaatatgtagatttacatacggttcaacagagaatacttatgaagcaatgacactgtgagattcaatataatattcatgaaagcctttcgaaagcaagaattgtttaacaaatacaaggaaatcctaatcctcatcactatcaacaacaatttagcatttgttttataagaaaagaaaatgttccctccgctacctgctctctacaacagtcacacattcatattatttttcattcacaggaggtttagctgcacatcacctttctgaagcactcctcaaattattacaaaaaaactatagattgcaaacacaagtgtatatgacaggtttgtctccatgcaggaaaccaaaaatgctgtggaaaaactacaactttcttacccaaactcagttgttttactgcaatctttgggtgggagtcatactggggagatagtgttaattctatcgatgtcagaactttaggcaagcaaatctcaacttacctatacataatgtgctgatataatggctgttgaagtaaataaatataaagaaaagttctgcacttcttttgtcctgatcagtgcttctctggtaaatgtgctaaccgcaatgatagttgagattttaagggctgggtaaaatagcaaaaaacaatgaaaaggaaacttgtttaacaagtgtgatgacagctatggatctgtgatttaaaggaagaaatgtaaatcccctttgagttggatatttagaaaaaaaacaaaaaacaaaaaacaatagatattacttggattggtgttctgagaggtccacccccaaaataccaccacagatgggtgagtcagtgttctgactcaagttccatccatcctttcatggcatagagctcctcccagtaaaaccgactgtatctaacagatcagtctttgacaaataacttaaatgtaaattgtctttatttgatacaattattctgccacagcagtactcatttgaaacatgcttaatccaaaaattctcactgaggctctgcacatacttttgcagaaattgatttacagagggaggtaggttttagagtaagaaacagttctgttttagaaattctttatacgaaatggaactatttaatctaatcaatagttattttactaagtgaatataattcaatataataccactaaaaagaaaagaaacactaaataaaactgcacatttttaatgggtgctaataagtgtatttaaattcatgtacatgtttataaagagataaataaatatatgaaaatatctggaaggattcgcaaaataagaattacctcagagaaggaaagagacaagaattggaaatgatgattggaaaaaatattagcctgatctatagtgggttcattttcttcacaaatataatgtattcatatattccatatgtaattaaaaagcaattaagaatacttgttgaattgaaataaaagcttatcctttatatggatctgagtagggaaaaaagatagaattagcaataaaatttagcttttgggggtgtcaggacaaaattaatgtaaactaaaaacaaactgtatttgttgactttgtgaaactttccggactgagatggtgtcttaaaacagtaggcacacaatctatgagaatacagtggataaaaagtctcacaaaaagtgtgagccagtttttacagcattctaagaatatatcagggaaaaaaatgtcagagaagggcatcccagacttggagtacaccacttggaaagacacataatagcatgttctagaaatcccaacttattgagtggttgaaacataggctacatgcaaggacatgataggacataaaaaagaagcatgtagcagccagatcctgatagtacatctcatttttgttcagctggacaccatgactacctccatgaagccagccaccagtccaggaccacagagatgaaaaagagtccttgaggggctcacagtctagtaggagattcagatgcataatttttacacctgtggaaagtgtagtgacaggtgtaaacctggggcaacctggagccaccatcctggggatgtaagggaaggctacctggtgggagtgacacctgaactgtgttttgaataatgaataggaagagtaagtcaagctttttatggatttgcaagtcataataaagaatatgggttttattccttaagcgtggtgagatagggaggtaaggggaggagtaggagtttaagcaggagatagaggtgctgccagactaattctccatgatcattaagatgcttgttcttgaagaatgccattatagtacattaaggataggtaggaggactaacaattcagaattcacattttcttttaaaacaaaaatgccagattaatttacaacatagtacctctctggctcttaagttaccttctctgatgacggcttggtttgattttttaaaatcttctctttttttaatcaaatgcctgggaaaggtaatgtgggaatgctctctcattactctggttagtgatttctgtctcattgaatgttgtctttagcagatgagataaatctgacttaaagagcataaatctaaatttataaaacctgaggtggttatttaatggattcttgtataacatgtattcctatatttagtgaaaataaagttttg

SEQ ID NO: 1881734 - DNA, 4001 bp, Homo sapiens
tgtgaatttttccatctcagtcatcatctttaaaagggtcattgtatggccattttctcttttatctctgattctgcttgaaatgttcccagtgaagcagtctgctcaccaactgctctttatatagattttatgcaatctatttatttgagtaaatgccttagcaatattcaatactatctattttgttgtgtataatgtcattaacatttttaagatattctcaagttttaatcaattatatttcctatttgtaatttctgtgtgcaaattttcattttagctaattggtctaaaatgcttagtctcaattttcaaatgcttacaatcttttagtctcagcttaaaaaaataaattcaagtgctcgacaatgtaacaaaatactttacattaccaattatttaaagaagaaactgtccagagcgtagaatatttctgttttgcaagctgtctggtaacaagatttcttttcttttttaaaaaaacttattttagattcagggataaactagtgtttcagggtttgttgtataggttatttcatcccccaaatattaaggctggtacccaatagttgttttttctgctcctctccctcctcccaccctccaccctcaattaggccccagtgtctgttgttctcttttttgtggtaacaagatttctaattagatatgattggctaaatcttgggaggtaggagaagagaaccttagtaggtccttgtctccatttcaaagtgcaggaaaataaaaaaatacaatcaaatatctattaatttactttgatgccttacaaacccacaatgttattgtgaaatgtattcaacttatgagagtagacagctcattgcacagtattctgcacactattgggctttgaatgattcatgatgaagtagcaaatcactcccaagctctgggagtaggaggtgttaagtttagttaagattatagaggtaagcgtaatggtgctactcaagtagtagatgttttccttttctacttttatcaggaagtggctttaagtcttaaaggatttaattcccctttatactcatcaccatttcctatagaacaatgcagatccctcagagatgaggaaaatttgattatataatctgagattataacgatagtgcatccacctagactcaacatcagaattttagagtgtatattggagggaagccgacttctataaaaattaactgattagactcatatgacttcataataagagcttgaaacaaaaattagaaatttgagggcagattaaactctcatatgtaaaaagtcaaccaatagacataaaaatgggaaagtcatatcaggatctaaacatctatgtttgtagtttattgtcaaatttataaagtttcaggttgaagaacagctccatagatacacggatcagagggatcccatttaatatttagggccaggtaaagaataatcattcagtttattcatttaaggctctttctgtttagttgcatgatgcattgcaaaagcttatcattactagtgcttgcaaattatacactttatgaatcaagcagccatagcagaaactacacatatgaaagaaagcatttgaaagaaaaaatgatgtaaaaatatgctttaataaatttggaaaataaagctctaaccagtttccaaaatagtccatataaagacaataaatataggtaccgtgtaatagtaatggtgctaaagtttttgaaattcaccacatctgtttcttatttgtttgtttttgccatatttataatgggacatctgatttcatctcttatttattttgattttgtattttatttcatatctctgttcaaatgaaggataggtttatattttttgctttgttgttttactgagatactcaccatctaatttaagtgctccccatccagtgacaaacactttactcttaggcaaggcttcaaaagtagcttctggaagacagactctgtgcacctcattggaaaatatgatgggggtgaagagcttcactacagcgatatcatcctcgtgtttatgggcagcatagttctcatgaataataattgactccccctttcttctcattagtgagggattcgggttattccaaaactagccatccagagtttgggtttttcttcactgatcacagagtaaaaggaatacagttggttcatttctaatttaaatttgcccaggactgtggatgggcaggggacataaatgtgggagaagggcaaattttttaaggtaataattgattgggaccatcccaccttcttatctgaggcttctctcctaagactgctttgctttcatctacttgctaacaaaccgccattccaaggtagcttaaattactgtccttgagggaagcttgtatttttatattattccacattatcctatattattgccatttttgactataaaaataatacaaattaatttaagaaaacaaataattataaagtagacatatatacacgtagattcacatatacactcatatcaaggcacaatcatataaatgtatgtatagttataaagagaaagagaggtaaaattggagcgatattttatatatttatattgtttccttatgctttctttttatttagcatcttatccagaatattctcccattttatataaattttactagggttactgtatctctttattatttccaagtgttctatatgttaaattgtcgaaaaatatacaaagaataaaagcacagcaccaaaggtattcatgtgggatcaccagatataacctatagtttagaatactattaacagagttttttttttaatctaaaatatctctcaggagaactggtgagtgtgtataatttttcacaatgctggcttgttcctacttaaaattgagattgttggagtgtatattttcaggtggaactgaagatactctttctaattttttctgctcttcttcagttaactgtcttttattcctaagcctgctggacaatcataagtggcaccgggaggcctaagatgttttcttctttgggtgtttgtttgtttgtttgttttttgagatggagtatcactctgtcactcaggctgaagtgtgatggtgtgatctcagctcactgcaacttctgccgcccgggttcaagtgattctcctgtctcagcctcatgagtagctgggactatgggcacgtgccaccaagtccagctaatttttgtatttttagtagagacgggtgtcactatgttggccaggctggagcctaagatgtttataaaggaaatgtaaaagagagaactataggatgtgaagagatgaaaaagaggtgaagctggtgatcccatgggtatagactgggaactcacaagtcaaaacagtgacccgctgtcaggagccactcttcactgatcaaagatgcaccacacaaatggatcccctccacctgcaggctagcttgccaggccaatcaccttttcttgcaatccgaccatcagcaattcttttggtggatggaaactccttccctaaaccacaacctgtgagaagggaataagatggctaattccagagttataaacatatgtagatatgtttggcacatagttaaggacagaaatatctacaaatgtgtcttaccctaaaaaaattattgaaattaatgttaaataaagtaatggtaatgcacattgataaaatgtgattattcacactttaaataagtattaacgttttaaaaattatttaacactctctctggtgaatttaaaacaacatcattttaaaatttggcttttcacattttttggggtcatgttcttatgtgcagcagtttaccctaataatatattttgaatgccaagtgtacactatttattgcagaaaataacgtatatagtcttttaaaatacatgtctagcattacaaccaaaatactaatatagcataaatgtcaaagtttctatattaaagtttttgggtgtcatttaaccc

SEQ ID NO: 1881735 - DNA, 4001 bp, Homo sapiens
aatactaagcaaaaaaaaaaaaaacaaaaaaaaacagaagcaaaagagcatattccgtgagattccatttgtatcaagttcaaaagaaatcaaagatcatctacgcttttagaagtctggagatttattaaccatggttggatggacagtgatatgaaaggggcacaaggggcacttccaggttgctagcacgttctatcttttgatctgagtaaacagttacatgagtgtattaaaacagaggctttaaaaagagtgcctttgtgagcctttgacctctttatcaatacctactccccaggaatttgcaaccatttttatcacctccactttttgttttattgttgttgttaaaaatgaactcagtatgtttaataaagtttggtattatcaaaatcgcagtacaaacatcaagtcacacgcccacatgacagaattccatttataaaatgtttctcgggaagcccccactgggcccgtgcccaaagagagcctgaccacagcctggggtctctgggtgggcagaaaaggtgagtatgggggtggggaggaactcggggtagggggaggagggcggagaggaaggaaagtggagaaaaatgcagactcagaagcagtccatataacagctcaaaaagagctagccggcgatattatcacaacgatacagtacaaatcaaagcaaaaataaaaataatttggccgatacagcaggctacactgccaagaacccagatggcggccttcctgcggccatccgcacgggcctcctcaccccccatctctcccgtgcgcccactcgcttccttctcgctcactcgcaggcactctctcgctaggaaacacagaaagtattttgtgtttggagatagtaaccttagtcaaatgaatcttccgaagagtcgctgaaggaggaatgcaccttagcctctcgaagcagcaaacaaaaccactgcttcctgctggtggctggcttaggtttcagagtccgggagggggcggaggagggggtgtgtgccaggccctcttggtcagctaggggccgccagctgccttgctgtcctttgccaccatgccacacaggagggaaggcatcagtttggagctagccggaggggccttgggcgggccactctccttcaggaattcttcgtcttcctctgagtctgtattgtaagagtagctgctcacttcggaggcaaacgcggaatgggccgacttgggctggcctctggccttgaaccccacccctatcttcctggctttggcggcccttttgtgtttaccttctctggaagatttcagagacaggccggaggcccttggccagcaccttcctgtccttgcccagcaggctgtcataaggagttaagtacttgctgcagcccctgccagtttttgatttccccccagcactgtctgaaaacttgaagggtgacttcaacttgtcctgcttggtgagggagagggcctttgtcgagcttgcttgccaactgctcctggtcgctgtccatcttcttcttcttaatcttcagctgacttatgaacttagacgaagcctcgtgttcatcccaagtctggttcctctccctggctttccctgttccaataagggcattgtgttcctccttgggccctttgtgtctcttccttattcctgctcccagctcatagtcatctgatgtcggcagagatttgctgctcagctttccgctactgttgcagttcttccccctcttgcgggcgggcgacagggctctcgggggcgtgggtctgtttccacggcctgcgtgccaagcttccatgggactcctcgtgcctgtcctcggagtcccggcgccgctgcagcttcaccagctcatgctgcttctccttgtactggtgctggacctcggcccgccacattctgaagtccagttccaggacgtccatgtcctccacggaggacttcatggggtacatccgctcctccttcttgcgcatccagctgtacttattgtgggcttcagctcccgtgggagccgcaggttcttgagcgggtcccaccacgggcccatccagcacctccctcagcatgtggctgccggctgccagcaggctctccagtgagggccgagccaccagggcccgctccgcacctcccaccttcttgctcctcctctccagctccagctctgcgatctcgctcagcagggtgatgccgtgcagaaagctctgctccaagacaaggctctcggcagcttcctgcttctccaaggcctggactccagtagcacctggggagggcagaggcctggcctggggcagctccatggccacctccatgccagccagtgggtcttccaggccgggcaggaactgctcagagcttgcctcttccaggtagcaggtgctgccgggcacaggcacggcctcccggggctccagtctcgggcactctccctccccggcgggcacgtcacagtctgacatttctaggctgggctggggctcgctcagggccgcctgggccaggccttcctccggcgctgcctctgccgcaggaaccgccacaggcacctccactggctcctccttggcctccactagcgtctcgggtgtcagctgcacccccaggtccaatgcggccgtgcagggttctgtccggcccggggaatccacgcatgcttcaggcccctccgcaaagtctgggcactcagagggctcggtgcagccctgcccggtggcactcagcgcctgggcctccaacgggccacctctgcatccgcctgcagggctcggggtagccatggtttccatggcgggcagtggcagcggcaactccagaggcggcagctctgcggggcgctcgtccacatcctccacctccaccttcgcctcctgttcagccagcggctcttcctccgggtcctcccgcagcggctctgggatcttggagggggacaggaggatgagcttgtcttcgggcgagagtgtcaggcgcttggtcccatcagctgggagcagcacatcaggggccaggccatccgcatcggcggccactgtgggctgccccaggaaagggtagggcctcccgtagtgtggtggcagggcttggaacggatacctgggcggcatatctgagaacaaggcctggaaagtgctgggggcttccttatccaactccaagtccttcttctcgaccacgttgtcgggggtctcttccttgcgggtgatacccggggtggacagcagggagtggggaggcaggctggtggggtgggagctaggggtagcagggtaggtgtaggcaggcgccttggacacgtcctccagcggctggatgaccttggccttcagggcggccatgggggacgcgcggggcgatggcggcgggctcaccgccttgccatagatgctcgcagggccggcagccaggcggggggctttcgcagcagcatcccagggcaagcggtggccaggccagccttgcccccggcccccaggccccagttgctccacttctcctccatctctgcctggtactcctctgcgccttcagccgctccagctgggtgcttctttgcagttccagggcctgggccgcccgctgctgcaggtacaggaactcctgcagctgcaggaagtgctgcagcgaaaagagctgcaactgctgggcctggtgcagggggctgcagcctggagagtacagggcggggcaaaggggcagcacggtggcccgctccatcagctccgcaaagtgaggcaggtgatctctgggaatgaccaacagctggcccgactgggagtccctgacaaactggtagggcgacagcagggagcccccaggctgggtgggaacgcaggggccatgccctagtgcagagatggaggtcccaagccccaggggtgtccggcaagccacatggacatgctgcccgagcgggacaaccaggggtgcgtggccagatgggttgcggggtccacagaccagcaaccggagcctgccagcactgggcccc

SEQ ID NO: 1881736 - DNA, 4001 bp, Homo sapiens
aaaaaaaaaaaaaaaaaaaaaagagcaacaaaaaaagcatcaagttcaaatccatgcagttattatgtgaagagaataaggaatataacatcatcatcaaagataataaaaacatgcctgaaagatgcactacaaaacaatttattattttgaaactagctaaatgacattagagaaatgataaaagatatggaagaacttgattctgaattagaaaaacctcagaaatgaggtgacagaactcaggagaattagtaataaagaataaactacaagaaacacaaaagctaataaatgcaacagattatgatttgctgtaaagaaaccgagtcaatccttagatcaatgtttctgtaataattctgattgtcagacactttctccaattaattattaaggaggggctcatgaaaacactagtctcaccaaattgatatatcaattgttgataacagtttgtaccttttgtatattagttttgctgaatgtaaaatctttggcctacatatttttcccttaagtttcctcaatatgtcattctactttcttatgacataaagcctcactgtcaaaaagctgtgatcgcctagttttctttcccattttacatatgtgacaaaacattaaaatctgttaaatctggttgcttgttacatgcctgaaataattcacaccatattttatcaaatctaacatgccctcaattttaagatgcatcgttttctgtatttattttttaaaaattcatcctctattcatggatgttaaaatatgaagaagcgtgggtaatggcaggccattgttttggcctagccttctacactaggccccatcagatcaaaccagaatggagttgcttgtgctaagcaccatgtaattaaagtggattttgaaaaaatgagccagttttttttaaaaaaacaggagattctagttaacctagtgggcataataaggaagtatgctctgttttaacctttacaaggaaagaaactttgaaataatctgatttttgttctgtttctgctttcttcaatctttttcattatcttcagtcctgtagcattatcttagtgctagagcagagccttgaaagaatagaacacagatcaagaacattttaatgtggaaaaggttcacaactggattgaggaacacggataatgctataggtgagcaacataaagcttccaggtattttaagatgtgcaattttgaagagaatagagggcacgaaggataatacagttttgcctggaccctcatctccatatgagaggaaaaatttctaattaaaaatatgatacatcacagaaaattacataatacccaaagtatatgctaattttaaaaatcctgcagatgtttattcaaatatacagtgttatttagtgaaagacaaatcctaatgttattgtgtccaactcatttttgctttctaagaaaggtgacacggaagtaaatgaaaaagaattatatgagaactttttagatatgtgttctggtaatctaacagtgactagctctataaccttgaccaagtcacttgcactgaccggaagttcctttcccttacccacaaatttaagggaccaaactggatgatctaacgacatctatggcactaaaagtcacatgattctattaaatctgaggcagcgcctcacatgtagtggactcccaaaattatttattaaatgtataacatctttaagtggtatcccctcactgacaatctggagctattagcagccttcagtttatttataaaataaagctgtttcctcttcttaccgttaagactcttttaaggatttgcaacgctatcccatcatttcgcgggttactagagtcctgcatgtttggctgtagagcaagggtgacgcgtaacttctggactttggttccatctacatctgccggatgcggatgccagtcgcaacagtaacgcccccttcggccacctgcaccacagcacgccatgcggccacacccaaaccggaaaccaggacgcccctagggttgacgggaaggcgctgccgggctcctagcttccccaggcccgccccctctgatgacgtctccgcccgccccttgacccccccacggtcccgccccttcctaccttccagtagccggcggcggtgtctcaggcggcaatggaaggatccgagcctgtggccgcccatcagggggaagaggcgtcctgttcttcctgggggactggcaggtgagaggacgagaagggcgaaggtgaggggtcgcgggtgggacccaggctccgggtttctgcttctttctttccggcgggctgggggcgcccgagaggccgcggggccgagcagagccggccctgggaggcgaggggcgcgcgcggagtgggtgtggcgacgtgggctagggcctctgctgttgccggctttcctgagggaaaagtcccctttccgcacctttgagggctttctcagttctggctgggattcgggatcctccttcctccaagtcaccagacttggggggctccggtcgagagcgagttctggtctcggtcacttggcgtgagcttccccgactggtgccaagcacctttcctcctttccgtaaaaagaaagctaggagcgccactgtgcacctccactgagatcctcttttgaaaactattaccagaaggaacttggtaagaatgaatcagtagcaatctggacaccctgaggcctttgttgacttcggaagaaggaaaaaaaaaaagccaggaaaaaaaaatacacaagttacccattcttatttcccacttggttttgaagttcttcaggtctttcccgcccctgtaaaattagggggaaaatatttgtgctaggcctttaccaatttcttggttagtagttcctctttcaatcatctcataattaataaagcaagtggttacattctatccaccactgtcagaatacaccatgccaaagatagaattgatggatgtattattttcagctgatgtgagactttgtaaacctgtagccttttcgccagtttcagactgaagggatgctttcagtttcatggtgttgtctgccattgccaacactgccagagtggagggatattatgtaatataacccgcgccttatttgaagcgtttttgattgtcttatagatcatattatttttacatatttttgaaacattccagtgaggcacaactttctgaaaagggccagtcacgccattaagtggcagagctagttagactgcagctgttctcgtttttattcagatttacccaccaggcctattgcccccgccatgcaaggaaaacagcaagtgaaagtgtactagggataaaatgataggaaagtagataataaaaaactttggccgggcgcagtggctcaaacgcttgcaatcccagcgctttgggaggtcgaagcaggcgggtcgcttgagctcaggagttcttagactagcctgggcaacatggcgaaaccgcgtctctacaaaatacaaaaaaattagctgggcgtaggtgatgcacgcctgtagtcccagctactcgggaggctaagatgagaggatcgcttgagtctagagagatcgaggctgcagtgagccgagatcgtgccactgcactccagtctgggtgacagagagagaccctgtctcaaaaaaaaagaaaagaaacaaattttgttaatttttatattttgttacaatgcccaaacagggtatattgtgtatgtgtgtgttttttattaggtaggtgatctcttagaacacagctatcttctgatttgccttggtaattggaatcagtttttttaatagctatccgtttaattagctagaagctggtatcatttgatatgtgccagtgtttggtgagataaatgataacattttaattacctttgtttacaaattctttggcttatttatcaatgctaggactagaaagttggattccaagcctgaatttgatgccatcgcattgtttttagaatctt

SEQ ID NO: 1881737 - DNA, 4001 bp, Homo sapiens
agtgatttcatgactgcttttattagttattttggcaatcacttataactgctaacgtctgcttgccgatcagcccttagcttaaatgtcacttccttcaggacgccttcctgatcccctccactaggttaggtgctcctgatctctgctccctttcatacaactcttatgactgataaaaacagcacgagggggccaggcgcggtggctcacgcctgtaatcccagcactttgggaggccgagacgggcggatcacgaggtcagcagatgagaccatcctggctaacacggtgaaaccccgtctctactaaaaatacaaaaaaaattagccgggtgtggtggcgggcgcctgtagtcccagctactccggaggctgaggcaggagaatggcgtgaaccggggaggcggagcttgcagtgagccgagatcgcgccactgcactccagcttgggcgacagagcgagactccgtctcaaaacaaaacaaacaaaacaaacaaacaaaaaaacggcatgagggaaatttccatgtttattgtgttcatctttgtatgcctaattccaaactttccaagctcggcacccagcacacagtaggttcttaatatttgttgagtgaatgaataaatgaagtaaattggaaatgtaatttgtctttgtctaaaggcaagaactcattcaatataacctagtcacttgtcttgaccttcacctctttttttctttaacaaccttattgagggaaaatttacataccataagattcacccattaagctcctcttactaatttttttctctctcatttttgtgtgtgaaggtcattttctaatggcaaaaatggaaagaaaatagaagtagaatgttgtggaatcttagataaagaatgggctcttggagcccagtttagcagggtttacttctcagttttacttttcaattgtgaccgtaagcaaattaacttctctaggcctgggattctgatctgtaaaattgcactaatatgagtctcttcacggctcctctaaggattaaatgagagacacatgcaaaggatccccaaaaacaataactcaaaaaatgttgattccctcccttccctctgtcatctgttaacctcaacttcctaaatagaaggtctattcttttaccatcatcattattctcttcggtgcctatttttaaaaaatactcaaccttcttgcttccttcgctacctaagtatttctgcaagcccactttgttctgcagcttagctttcctggcacaattcttatagattttggtcccttttaaaattcattcttcagcaaatgctttctctctccatcttttgactagagatcattagagatcacctgagatcattagagaacagtggtttccttggttgccattccctttcttcttcattgggagtattctgcggtgaactcagacattttatttttcaaagcttcccattcttttaaaaatgcttttccttttacagcctctcgctcaaaatcatacccatcttttccctggatctgttttctcaagtctccaatcgcctgccttctttgtgtcttgtattaccctcacatcccccagctttctactgctctcccaggaccaaccatttcttccgcgggagtcacattacatcagcattcctaatgcagtatctgttatctaccagattctgttttattctaggtagtcacttaaaaacgaacctcggtactggtctgacttaacatggaggaggaattgtctaaggttaaacgcaaactgctgagagatttggggcggggggcacacatttacattcattcgtattaaatatatacctgttgaatttgtgctttttctcaaatgcttcagagactcgagctttagagtaattgggatggtgaaaggatgggtttccagaaacttcgcccaaaattaaagactccatcaaaaggactgctccatacactcaaggaacacccaccaacaaatcccgtctccacaaccaccagattatctcaccggcgagtgagactgcaaggtttgggggcccggccgtaccactccgcgctgcgcacggggggttcgtacccatctggccgcgaccgtccgtttccccctcgcttggttctgcccctgctccccctgcacaggcctcacagtgcgtctggccggcgctttatagctgcagcctgggcggctccgctagctgtttttcgtcttccctaggctatttctgccgggcgctccgcgaagatgcagctcaagccgatggagatcaaccccgaggtgagcgccaggtgcaccgctacccggagagcgcgaggccgagggagggggagccgagtcgctgatcggttcggttttgcctttttctttgcatttgcctttcagatgctgaacaaagtgagtggcgtctcgcgccgtctctggccccctcccccgcgagcgccgaggcgggggcgcccaccggttccggctgctggcagggaccaagccgcccgctgcgagcaccggagacggccgggctggggcgtgggctgggcgcctttcctgggcccctgcatttagcgggtgactctacgaaaccggtcacggggagacggagggggctgcgccccgtggcgagcgagcgccaggcggagctcccgagggcgtggcgcgggcagcacagactcggctgcacgggcttcgcgggcgccacgtgtgggccgcgctttgtgctgtgtcattgcgccggcccgggtgggggtggcagggcgggactggggctcctcccaggctcgggtgcgggcgcggagggcgcgcgcctcctggccccgccccctggcaggtgcccgcgacccgcgtgtccccgtgcgcctggccgccttgtctcctctccgcaggtgctgtcccggctgggggtcgccggccagtggcgcttcgtggacgtgctggggctggaagaggagtctctgggctcggtgccagcgcctgcctgcgcgctgctgctgctgtttcccctcacggcccaggtagggcgtggggcccaggatgcgccggccgccggcagtgcacgccgctccccagcttgagtcctcgggggctccccgccccgccccctcccctgtaggtgatgcggggcgcgcctacaaggaagggaggagcctgcattttcgtggtacctactccctgggctcctgttccagcggtgcctgtcgccttcttgcccatccgtccacaattgccttaaatttggaagagaggcagtatctcagttccatctatcccgttatccagggaaatcattcatcctactcatgagttccctcgaacttgggctttttcgagcctccggttccggggaatggctgctggtttccctttaagggctataacctgtcaactcattgtttgcttctcagactcccacctagctgtagaatggagggggaagggctgacctaaatcgcagggaaacaattaggttcgctaattctccgcctccattacttgggtttctgatggtcttaaggggttcttctctcttctccactcccaccacttgcacacttggtttttagcctcttgaatgtatttcttaaagcttaatcattttgtgtatggtttctgtgtgggaacctccttcctcttcacttatccttgttcatctctgaccttgtagctaactgaaatagggggttattagctcagttttgaaagcacctttgcatttcccttgaaatgattttcctcctacaagtgtgcatggatagatgtatctgaaagacagcgtcagatttttttttttaaaggatagctaggatatttgcagtcttgtgatgtatggaatcccagtcattagcgcatggcattgtcttatctcctattgctgtcacttgaccgctgatgtgggagtgactgaaattagctttagcaaaacttggggcatcactctaaagagtgaggttaactgaagcaccgtcctaaggctaggtgttctggaagcatctgtagccaaaatca

SEQ ID NO: 1881738 - DNA, 4001 bp, Homo sapiens; identical to SEQ ID NO: 317505

SEQ ID NO: 1881739 - DNA, 4001 bp, Homo sapiens
tacacttctgagagaacaagagtgaaaaaagcaagtaacacatgaaaactttttgacctcatggatcccagaaagaacctcggagattgtctacagtccccagctcacatttggagaacctctgtcctaaatccaaaggtccattctagctggcactgaaaattgacttaatttctgaaatcctattaaccgttttgaagagtctgattctaccaaaatactaaaaaagaatgtgaggtgaatactaaatagaaaaatgttgaattcaaaatgaagggactaagataagtggtttttattacaaagcaaactgtattagataacttaaatctatgtatgttcaaaaagatgtacttgtcatatctagtgcaattacttgtttacatatctcttctacccaacctgtgagctttgcaagaaggaaatgagtcttttttgtttggttatttttctgagacagtgtctcgttctgttccccaggctgcagggcagtggtgtgatctcggctcactgcaacagggagcctcctgagcagctgggattacaggtgcccaccgcctcacccggctaactttttgtatttttagtggagccggggtttcaccatgttggccaggctggtctggaactcctgacctcaggtgatccgcccgctatggcctcccaaagtgctgggattacaggcgtaaaccaccgtgcctggccaaaggaattgagtcttaatcccttttgcatcttcagtctttaggataacgtctgacacacaacaggcattaaatatttgttggatgaatgaactgaactgcatagaatgcagaaagcctacatatactggccaggcacagtggctcacacctgtaatcccagcactttgggaggccgagacgggcggatcacctgaggtcaggagtttgagaccagcctggtcaacatagcaaaacccggtctctattaaaaatataaaaattagccgggcatggttgtgggcgcctgtaatcccagctactcgggaggctgaggcaggagaatcgtttgaatctggaaggaggaggttgaggtgagccgagatcgcaccactgcactccagcctcggcgacaagagggagactccgtctcaaaacaaccaaccaacaagcctacatatcctgccacacgtgctacaatccacagcaaactgtttcatccacattcaaccactttcttaaagtcaccatcatgatcctatcaagaaaaccgtaatttatatggtattttaatgtgcctttataaattactaatcactttcttcatgatgtatgttaaaatggcttatgtcacctgatgtaatccttaatgagggaaataaaaggccatgattatgcctggctttttttcttatatgttagatttgagtgttaaaatgacctcgaagcggcgaaagaaaggaacggaactgccctccacattaaaaatgagcaggctccataggttaattttactcttcctcacgcacggcacttacatgttgcaaactctctgctccacagcacgcacagacatcccaaatcccggattgggcctgaggaacatctctgcaaagagcgccaggagggcgtgggggtcccgcctctctcgccagggaccagggagtggacactcactggtccagtcatgaggaactcagcatcctcctgacgggaggcgcctctttcccagaagcggtgggtcaggaggaatctgactaaaccctgggttgccggcccggagggcgcggttgaccccggggcctcgaggttgtgggcgaggagtaatccgcccgccgagaccgacccgcagatccaggagaccgaaacccgagggcggcgctccagggtgctgaggagaccggaaaggcggccaggaccttccggtcgcctcggcccaccacccacccagtgtccgcgcagccctaaagcctggcagacgcggagcgcacgcggcctttgcctcggccaggacagggcagcggggagagggctgctagacaacaattcttgacccctcctcgacccacgaccgccaggtaggcgcgcaaagctcctacacctgcggcgcgcccccgtcccctggtccagcggacacgccacgcacgcagccccgcccagcgccgctcgcggtaggggcggagccgctgagctggccaaagcggatttgcccagctaggccaggggcggggcaggccctcccagccaggaccagccccagtctccccgcccctgagccgtgaaggaaatagggacctggccctgggccttgtgtagcgggagggggagctaggaagcagctgagggcagaatccaggagggcctggctgcgggggaatgaagcctccgccttcgcaggcaaaagcctttaaatacgggctcaggcccgggactcagagtgtaacgcgtggcagcctgagggaggggcgtgcgccgagagggagctcagatcgagcggggcgcgggtggagaagctgcggcggcgcggcccgtaggaaggtgctgtccgaacgatcgggataggagcggtccctgcgcttgctgctgggaagtgggtaagcgccgctcccaggctggccccgccgcccgggcgggatgctcccaggtctgggcgggatgtggagggagcggggctggggtgtgcgcgctgctcccggtcgctcgctgcgctgggtcccgggcttcccgtctcacgaccttcgtctctttggggcttagggcgggaaccgcattttggaactgctgtcctggggatgtggtcgtctgggcttcttattcaagactcgtgagtcttccagccccttctctttctgcctttacccactttcctgacttggatgagatttccctgccgcctccaaagccgaacgcccaccacaggaagcggttctctcgttggggacctcattttggccgcagagtcgtagtcttttgtttgtgtttaagagtctgctcacctgaggggctcctgcttttctcatgccgcccctcttaagaaaccaaagagaaacgaagccagaaagccctcttgagagcaaaatactaagactgccgtgatatctgtccgggatgtcctggaatccattgttggccccctacaccacagaattgctctgtttgatgtcggggaaggcctttcctgggtgcctcgggagaccatgtttgtgtgagatcttgaaaaattatacgtcctataaatatataggaagataacttagtagggttaggaattctagtatagagaaaagaggggttcgctggtagggatctattcatgggcatacagagcagtagctgtctatcgacagacctcaaagacacagtgagcctttgagtttcttcaaatcccttaagaaatggagaacagtagtctttcttcaggggggttctggaaatgaaagagctgactgtctgctctgagatgtgcttattagtggccaggatccagtttaaggtaaggggtagacaaccctgattgaaaagatctcatttcttctcccgttgctgtactcctttttctaacaaaatctataactggataagcataatccatcttccttcttgtttacttccacagctttacatgataacccttagacataaaattaataccggctttcttactgattaaatatttttctctggtcaggcatcttttactgtttaatttctggaaatgattaaaatgtgtgaagctgatgtatccaactataatgcccatcgttagctcctgggtacctatgcaaaatatgctgtagagagctggggctagaaggattatattccgtttagattgtagtagggcatttgttatttgttagtgaccccttctgggttggaatgtttatttgaatttatgaaattttacatgaagagtagttttggaacggtttggtttgttgtgactctcccaaaatacagaggtaaaaactcatttcaaaataacccatttaataaggaaacactcctatgtctctgacagcagaatagagggccaga

SEQ ID NO: 1881740 - DNA, 4001 bp, Homo sapiens; identical to SEQ ID NO: 317510

SEQ ID NO: 1881741 - DNA, 4001 bp, Homo sapiens
tctgagatgttgtctgaacttccagttactcattgtgaggtggaactgcagtaacaatatttggtgtaaaatttcatgtgatggaagctgagatgtcctgcagtctcagagggacagaattctggtgaatctccctttggcctataaggaatgaagatttaggctctgacggttcagtcaaaatttataagatgtaagaaatggggacgtcgtgaggccatgaggcaaggcctacaggtgtaaagacataacttctaacccagggctcatgaagtcatcataatgtcagaggcgatggtggattgagcatagtatggtctttggaaccattccttccacttatttcttcacaggccaggtatgtgcaacaagggggcatcttgggcctgatgagcagagtcctgaagagacaaaggggcaatcctgaggaagagatttgacagggaggaagaagccaccaatatcactactgataaaactcctcgtccctagtaaaccataggattttccttggtctcactgagagtttacctgagtgaacagaaagagagacaaacggactgatgggttaactgtttccactacctgaagtgattctgaaacgttggggtcaggagaattatcttaagaatcaagagcaacccagataccagggttacacaaaagagactggaagttcttatctttggggggtaggcactaggcactgatattcgttaaagctcactaaatgactacaaagtgagaaaaataaatactccgctgcaagatttagacatgatattttgtttcacacacaattcattagtcttcagagccaagggctcttggttccctgcctcttgacacactctcactgtgtctttcccattcactcttctggatgtaaaagaggacgtaggcctgttgactcaggacagaagtgatgctagaggcggtgacctcggcatcatccattttataccactggccttcttgagctttgacataagagaagtaatgtccgttgtgacaactccacccagcgtggaccagcacagcatagaggacatagacaagaggtcctgtgttctgctgagacatgtatggctgcatgtcaaggcactcaggatattgcacattcttggcaatcttgttgcctgtgacatcggagaatctcttcaatacaaggatgaggaccttggcagaggtgtgtaaagttaacgtcttggaggccggcgccctctggagacaaacaccacaatgataggcattctctccattgagttcttcgggcttcaccaactgttccaaagcttgctggacactctgagctgcctggatatccagggcgatgtccaggtaagggtcaaaagtgtctgaaatgccgtggcagtggagacacttgatttgagatctccagtagcctccaaatatttggtggatgagggtggtgtccttagagtgatgatctacctgcttgtgcccgggaaggcatgcctttttcatggcatccacagtgaacatgagaaattcatgggcatcttcctgcttgcctctatggaagccagcagccaatgcctgtgagggctggatgacgtggccaggattgtggagggcccgtgtgatgtgagcttgcatagtacagagcatgcagcccttgtgacgatgacacgtttgagagtgctcccgggacagcatgtagttggcaaggggcggtgtgtatgtcaggcactgcaaggaagcgttcacgtagcaggtatttcccatattctggagcccagcccccaccgcagcaggtctcctgctactcagaggaagcttctccctgggagcaagctgtcttgccacaggagccaaatcatcacagaggtcgacacgggtctcacatgagagtggtgacttctcagggagagaagtccgctggatttcagcaaaagctgcatcgggccgagaagatgtgagttttgaaaagtggttgaactgccactcacctctcaagtagagtgagtcgtcctccatgtcgactggaacgaggatcacaaggtttgtctgctgggaccgcaggttgcagaaagacgctatcccttccgagagagtcttcaaatgacgagctctctggccgcatcagcccttctgtaagtcacccccaccaaccgcgaacaccccacccactcatcaggtgcgcgataagccaatcaaatatcagcactcaattcaggaaggagtcacagggtgtgtcccctggcatcgctgggaattcaacagacacagcccacagcatgacttccagaacacctgaatcaaattactcctcaggatgataggcacatataataggagtgtatccgggttgggacagtggcctcacagttgccttattttaggtaaagcaatggcagggaagaaatctttacctaggaaaccgtgtgcgtgtgtgtgtgtgagtgtgtttgtgtgtgtggggggggggcgtgtgtgtgtgtgtgtttgtgctgggatgaacctccaagtaggtacttttggcagctgccatcatcctctcagcgaaggaaggacaagaagtcgaaagtgcgctttctgacctgagaatagtcaatgaagtatagtatttagcacagcgtattttcttccctagtgagaaaggagagatccgtggaatcaaacagaccttccagcgataacctttccacgttgagcctattgattctctgtccgagtgaaattacctgccagtggagaacaagacaagtctttgcatgaaatgctcttgtggaagctagattgccaaataataaagcatcaaatggtagaaacatgcactgaagtttgaagagatactcagtgcacaaagtagactgtgaaagcctttggggaaatcatgcaatccccgagagactaattgatgacaatccccaaatttatgtttgccagaaaagagagacggtcatgacaccgcatagtgagcggtttcggacgtgcgacggcagtttaagaaaacacgaaacaaaaaacttgagaactcagaaggtatcccagctataaccttttgtttattaaggaattgatgaaaataaaaacaacgtatctcacagcatgtgtgataatatttccatacgtatgtgataatggatcaacgtttcctagagatgaaataaaaagttctaatttggacaaaagcaaacaaggaaaattataccgtagaaaagcccggctgacggaagtgaggccctgtctcagggagaaacatcggagacgtttaaaagcagggagtgaaacagaggatagcgtgccatttttaatactggcccttgtttcagtgggaaaaggccaaaataagccgtgcatatcctggattctcgcatcgatcgttcaggatcggagatgttgcctccatttccagttacgcattgtatggtggaattgcagttagcacatttggtgccaaaattgtaatgctgccgaaagtggacatgttccctgaagtaagagggacagaatttgggtgtgtcttccggctgtctggcttagcaggaatgaagatcctggctctagggattttcccaacatgtcttagacggtaaggaacagggcggaattgaggcccggcgccaaggcctctaggtgtaaagaaacagccctggcttcagggcccatgaaattaggatgattttaaggaggatgatgggatgagaggactgtgacctttggccccgtttctttcccttgtcttttcatgggccaggtgtgctccatcagaaggcttcctgtgccggatgtaaagtgtcctgggggaagaaaagagcgctgcttagaaagatgctccacagggagaaaggagccaccattttcaggagaatgatccccagaagcatgagcaatgcagatgccgaggcttcacacaagaccctggagggtcttattcctgcagccgggacctgggcatcggtgtgcttgaatgctcataaccgattttgaggggagcccaatcgataagctgtctgccagtcatgctcatcaca

SEQ ID NO: 1881742 - DNA, 4001 bp, Homo sapiens
cgaatgaaacacaccccaagagaaaatacgaaaccgagtcccctgcaattacctcacacgcaaacctacacgtcggtaggtcatattcagaaatacacactgaatgtcacctatcatgaacacaaacactcagacagtccctccagaggttcggaagactcacgaccccaaaacttgatgtttcccatatgcgggctcatcctgagatgtagccatcactatccagttgtccctgttgtagagacagaaagttgggctcctcattagtttatgtaggattgacggtgttcgtgtttgtgtgggtgtgtgtgtgtttgcgtgcgcgcttctgggtgtagttatgtgtgtgtctgtgtgtgtgcgtgtgtgtgtgcacccctacgtgtgggtcggtacttccactgagatcactggcacacaagcagagccctcttgctgtgtttgttcttccctttggatctcctggccctccctcgcagggaagcgagtgtgccagtgttcatggactcctgatgtgtcggggtcgacgaagagaggtttagcagggagctttgctgttcaggatgatggttcttcatcccacacttgtattttgattgatgaatcacaagtacgtcgggaggcagggtaccttcgacttttctgacgttgaactcaggcttcgttttgttttgctcttgaaggaatttccagtggtctaaggtgctttcctgagtggctctttccaccaagtgctcgtccaactcgggggcctggaggcaggggtggtctctcttgagctctccttgcgttgctcgcctgtctgtgtcttctgcgccaagggctcttggttccctgcctcttgacacactctcactgtgtctttcccattcactcttctggatgtaaaagaggacgtaggcctgttgactcaggacagaagtgatgctagaggcggtgacctcggcatcatccattttataccactggccttcttgagctttgacataagagaagtaatgtccgttgtgacaactccacccagcgtggaccagcacagcatagaggacatagacaagaagtcatgtgttctgctgagacatgtatggctgcatgtcaaggcactcaggatattgcacattcttggcaatcttgttgcctgtgacatcggagaatctcttcaatacaaggatgaggaccttggcagaggtgtgtaaagttaacgtcttggaggccggcgccctctggagacaaacaccacaatgataggcattctctccattgagttcttcgggcttcaccaactgttccaaagcttgctggacactctgagctgcctggatatccagggcgatgtccaggtaagggtcaaaagtgtctgaaatgccgtggcagtggagacacttgatttgagatctccagtagcctccaaatatttggtggatgagggtggtgtccttagagtgatgatctacctgcttgtgcccgggaaggcatgcctttttcatggcatccacagtgaacatgagaaattcatgggcatcttcctgcttgcctctatggaagccagcagccaatgcctgtgagggctggatgacgtggccaggattgtggagggcccgtgtgatgtgagcttgcatagtacagagcatgcagcccttgtgacgatgacacgtttgagagtgctcccgggacagcatgtagttggcaaggggcggtgtgtatgtcaggcactgcaaggaagcgttcacgtagcaggtatttcccatattctggagcccagcccccaccgcagcaggtctcctgctactcagaggaagcttctccctgggagcaagctgtcttgccacaggagccaaatcatcacagaggtcgacacgggtctcacatgagagtggtgacttctcagggagagaagtccgctggatttcagcaaaagctgcatcgggccgagaagatgtgagttttgaaaagtggttgaactgccactcacctctcaagtagagtgagtcgtcctccatgtcgactggaacgaggatcacaaggtttgtctgctgggaccgcaggttgcagaaagacgctatcccttccgagagagtcttcaaatgacgagctctctggccgcatcagcccttctgtaagtcacccccaccaaccgcgaacaccccacccactcatcaggtgcgcgataagccaatcaaatatcagcactcaattcaggaaggagtcacagggtgtgtcccctggcatcgctgggaattcaacagacacagcccacagcatgacttccagaacacctgaatcaaattactcctcaggatgataggcacatataataggagtgtatccgggttgggacagtggcctcacagttgccttattttaggtaaagcaatggcagggaagaaatctttacctaggaaaccgtgtgcgtgtgtgtgtgtgagtgtgtttgtgtgtgtggggggggggcgtgtgtgtgtgtgtgtttgtgctgggatgaacctccaagtaggtacttttggcagctgccatcatcctctcagcgaaggaaggacaagaagtcgaaagtgcgctttctgacctgagaatagtcaatgaagtatagtatttagcacagcgtattttcttccctagtgagaaaggagagatccgtggaatcaaacagaccttccagcgataacctttccacgttgagcctattgattctctgtccgagtgaaattacctgccagtggagaacaagacaagtctttgcatgaaatgctcttgtggaagctagattgccaaataataaagcatcaaatggtagaaacatgcactgaagtttgaagagatactcagtgcacaaagtagactgtgaaagcctttggggaaatcatgcaatccccgagagactaattgatgacaatccccaaatttatgtttgccagaaaagagagacggtcatgacaccgcatagtgagcggtttcggacgtgcgacggcagtttaagaaaacacgaaacaaaaaacttgagaactcagaaggtatcccagctataaccttttgtttattaaggaattgatgaaaataaaaacaacgtatctcacagcatgtgtgataatatttccatacgtatgtgataatggatcaacgtttcctagagatgaaataaaaagttctaatttggacaaaagcaaacaaggaaaattataccgtagaaaagcccggctgacggaagtgaggccctgtctcagggagaaacatcggagacgtttaaaagcagggagtgaaacagaggatagcgtgccatttttaatactggcccttgtttcagtgggaaaaggccaaaataagccgtgcatatcctggattctcgcatcgatcgttcaggatcggagatgttgcctccatttccagttacgcattgtatggtggaattgcagttagcacatttggtgccaaaattgtaacgctgccgaaagtggacatgttccctgaagtaagagggacagaatttgggtgtgtcttccggctgtctggcttagcaggaatgaagatcctggctctagggattttcccaacatgtcttagacggtaaggaacagggcggaattgaggcccggcgccaaggcctctaggtgtaaagaaacagccctggcttcagggcccatgaaattaggatgattttaaggaggatgatgggatgagaggactgtgacctttggccccgtttctttcccttgtcttttcatgggccaggtgtgctccatcagaaggcttcctgtgccggatgtaaagtgtcctgggggaagaaaagagcgctgcttagaaagatgctccacagggagaaaggagccaccattttcaggagaatgatccccagaagcatgagcaatgcagatgccgaggcttcacacaagaccctggagggtcttattcctgcagccgggacctgggcatcggtgtgcttgaatgctcataaccgattttgaggggagcccaatcgataagctgtctgccagtcatgctcatcacac

SEQ ID NO: 1881743 - DNA, 4001 bp, Homo sapiens
cactgcctgagtttcaatctggatgtctatattgaacacttcagttttaggatatataccattaaaaggtatgcaaaagatccttttaacttgctgatatagcactcagtaatcagatgctgttcaatttccattatgtcgatggtgttttcaatcctgtgaactttgcaatccatgcgccaatgttggcagaaatactgaactcttattacaaaattttcatatcatttaaagctttagattattgcctttatagtggaacttctgtgaaattgagtcctgagatctgagttttagccttgaggttgctcctgaccttgagacattaatactcaaatcttaaagttttctgggcctccgtgctgggattggtcatagttcagttgtttcctgtcttctctcttctcttcctctcccagagtgctcagcccaggttaccacaccaacttaatctgtaacatttcggtaagtcatctgggcaggatccttgatcctctaagccttatgtgactgatctgcaaaaaaggagataatagcatgtaccagctgatagttatggtggcgattaaaggagatcaggaatgtaaacattgggtgcagtggttcacgcctgttgtcccagcgctttgggaggccaaggtgggatgattgctggagcccaggagtttgggatgactcggggctgcccagcctcaggctgggcaacatagcgagaacctgtctcttaaaaaacagagagagagagaagaaaatcagtcatgacttacaatggaagaaattatcatcaggatgtatttggaaataatatttaggttgaaagacttaagcaggaatattatttctcatgtccactggaaaacacagtgacatgactcccaaaaccttcagtcaacaagtctgtcttactgtttcctccccagattctagggatattagcaatcaacggctctcaaatctttactcttggttagataaaagctatcttcaactaatttttcttctgattcaatttgtcattaaatacactgatctaagaatttatcacgcatctcacttgtacaatttctcctttgaaagcatcgaattgcaaccttgtatgtgtaactgttccacacattcagaaacgggccccttcaattcgcgtggacctatctgctaagtggtgcacagactcgcgctctgagcccgcagccacgacctttaatgcgggaaatgtgcatgatcccatacagcgcccatctcaacaactagaggctgggtgcacccgagaggggtatgcctgccttgaagatatggaaaagttttgttttcgttctttccactccttggacagtccctagtgcttgcgcggaaccgggacgtctcctttggacccgctaatgtcacaagccgcccgagcgcgccgctgctggcctccgcccagacccggattcctcccccttcccggcgccctttctcgggcgcccggcccgcagctggcgagggctctctgaccgctccggtgtcctcgccccattttacttcttgggtccccgccggtgccatctggttggaaccctcgggaggaactaaaagttggacgtcgccacccctacccctcgccaaaaaataaacaccgggggctgccgaggcccgccaggaggaaggcgacgaggaaaaagcgaggacggaaggcggccccgggttcgccccggcctgggccgcccgcttccccaccccgcgcaccgtaccgtccccggctccctggctccccgacggcgaggagggccgccgcttccgcgtcggggtcggccgggggacctgcgaggtgcggctgccgcagcggcgcgccccggagcctggcccggcattccagtccgaatagaaagaggcagggaatcaaatggaaaagcaggaggccaggcctgggcgggcgagctgggaaggaggcggcgcggcggggcccgggaacccagcctggagcgctctgagcggccggctcggactcacgcggcgcgcccgggccgcccctcctccccgcgccgccggccgcggcccaggctccctcgctccgccactccccgcccctccgcgctccctccccgccctccccgcgccgccgcctcctcctcccggcctccctctcccagccaaactgaaagccggaccccaggccgccgcgctgccgcccggcctccccgccagcgcgccaccatgggcagtcccggtttccccttgtaaagatggcggtgagggatcgctgcaacctttagactaatgactgtccgaaacatcgcctccatctgtaatatggtgagtggccgagccgcctcggggtcgcgcccgactcgcggcgaggcaaagaaagggaagcccgagctgcacacacgcccggtggctggggcggcgggggcggcggggtccgcgccgccagaagttcccggcccccgagctgggcgcgcggccgcagccacctcagcggccggggagggtccccgagcccccggcgcccgtctcagccccgggacctcggaacccgcccggcgatcccggggccgcgctgctgcgccccccgccctcgggttgcggtggaagcggcttgagggaagggaagcgaccgaacctgaacgtccccggggagggggtgggggataagctggaggtggggggcacccatcctcttcttgcggtcaagacagccttattggacgtccagactgccctcatctcattttgagttcagtccttccgaggtgtttaaaattcactttgcaatagcaattgtgtatctggagaaatcggaaatgtaataaagctgtaaaaaaagtgcaaaattgtggctggagaagtgaacttcaacctggtttgaaaaagcaccgtaatttgctccgcatgcctcagtttccccatctgtgaaaaagggacaaggctctgtggcggtaatatttgcaggccctaagggtggggcgggctgtgggcttggaggaggtctccagggttatcctgcctgatccgctgtagacctaggggaggctggcgggcatggatacagccagggacatcactgggttctgatgcagtccgagcccatgatgcggtggtcactttaatttgggtttcccccattgctttccctttttctgtaggaagaacctccagcccttgggtccccaggctggaccctgctggcgcctccacttgtcagagcctttggggagctcagattggagtaaggcattgctgtcccttgcagggtgagatgatgtgtgttttgcctacattctttagactgcaccccgcctcccctctagccccctcccaagcgggtccccggaggcaacacgtgctcttacagtgccagtttgaggaaaacctcccttgaagctagtaatactggcccctaaagggaatccaaggaagcttgatggagaagccctggtgtaaggtgatctggctgcccttcccccatcacatagctttttaaatcttctgtcccacattctgttgcaagatcaacacatggcaaaggagcattaagaagccttgtgttagctcaggggtggaattgagacccgctggcttcagctttcagcacaatgggacgtgccactgtcacggccagcaaagcaaatgctggggcctcccagagtgatagctgcacaggtactggttggtgccgggcgagttccatacggggagtggatcctagagcctttctgttttctctttttttcctttctctgcgaggagtcagatttcctcttattcctgtggaggggctgcttgtgaagaggtgatgccttctcagtttctctcctacgaccagttcctgagggaactgtgaatcgggagcagcttgaatactcttttatgtctgttggtgtggccgcaggcctaaggatactacagggtagtgaggctccgacccagcccttggtggtgttcttgtcctgcttgtgtgtggttacacctctctgtgtagaagcaggctggaaacttgagagctagcatgcccctagagg

SEQ ID NO: 1881744 - DNA, 4001 bp, Homo sapiens
cagtaaaaaagaaaaaaaaaacttggtacatttatttttatgtctatcactgaaaaacctttgtgagtttgtaagacattaatatgaaaacggctgcttttgcatactgatagatttgtgaactttattgcaatatatgttttaacagaaaaatataattatagtattttaaaatgtaactcttcctccctcagtgtaaataaaatcacaatgacaagagtcctgaaacctctaactgaaaatcttcctttaaaaatgcatggtggtcttaatgtttaaaagaagtcagcctattttcgcagtgtatattcatgttatctaacgttcttttttctccaattattatacatacagttttataagtgaatatttaagagtcaagaattttgtggtattttgcctagaaatagactggaagaacacaaaatctaaataaagaataaacaccaaaaggccaaagggaaagaacaaaaaaagtacatgtacatgcatatgcacacacacacccccacataggtgctttgtttttaataatttatttcaaaacgtattgtacaatgctgtctcaaatactttatttgggtttaaaagagttgtagatgttagtataggttgttgatttcaaatggaaaaattattggcattgaaagatggcaactgaaatcttgaacctaacagttaattaaggttacttcgtgaggattaaatattagaattctgctccgccccccaccaaaggataccggtatttttactaaaatatatttttaggtttgttttggcatattcttttcaaagagatttgaaactcttaaattgttataattacaaaatcttatatttgaactttcaaaacattactcattttgaagtagaatctaaaactacatttaaaaacatttctgcccacatttggtctgtttaagggactaacctttgaacacactagtcttattttgaaagggcaaggtgttttttttttttaatagccagtgccccacagaagaaaaactgtgacaccccccccccacaaagtgctcatatatatcacctgtgtttgttagcaatgttacctccaactttgttatcttggagtaattgacgagtaaatcattacaaatgggtccaactctaaaggcaaaatcgtcaaaaagaagaaaacagcaaatccaacttgccttatgtttattagaggaaatcctgaaacttctgtagattgcagtgttaggaaaaacaagtttgtgattacagcgatgttatgaccacttccccactctaactctgttgtttaagggagtccactcctaactgctgactcagtttgtctttactgccagaactgaagcgtgacccaaattgtctgctgggttgagtaggaacaaacgggcaaaatgatgatcacttggcagttctaggtttactaaaggatacttatttggtctaaacactgtttgtgggactgcaaaggtataaataatgcccctcccaggaaggaaaaggaaaatctaaaatcttaggcaaccgactcaaggtcactgacggaaggcaccatttgagaccgagctcctcaactacagtcccatcacggacgggagccacacaggagagcgtgcaggagtttcgaagctgcgtagtacaatagctggcgtgggcagttcttttatactctggctagagtaaaattaacgcacctttgcgtttctccatcgcctctgacagcatccagctaaagggtgtagggttaaggaaagcggaacccagttgtcctttctcagctgagtcctttcagaaactgggactgaggagggtgagcgccgcggagaggggcaggggtgggagaggagagaggggcgcggggcggggaagaggcgcgtctggaaggcagtggggagagggactgagaggagtggggttgaagtccagctgggagcatccagcggcgctgtctgcagacaggggcgaaggcagccgctgagagtgaggcaagagcgggaagccgagggaagggaaggaagtaaggaaagaggaaggaaaggcaggagggggtagaagctgagcggctgcaatttctgcggccggctcagtaggaggagcaggaggggaaagaggaggatccagtcagtcagtcagacagccagcgggaggtggagaaagcaggaggaggaggaggattaaagatggccaccaacagctgcgggaaacggcaacaacccctcactttccgggatggtccctgcgggtcggcccggccttgatggagagaagaaacccgaggagcgccgaggctgaggcggcggcggcggggacccagcgaggacgaggacgcggcggagcagggacgggggcaggagaagggaaaggcggcggcgtcgctgcccctgctgcctagcaccgctgcctggcccggcggaccggttcccatacctcgcggccgcagaatcgagctcgggccccggcccccggcccgcggcgcggggctcccgggccccgccgcggacgtcgcgccggtcgccccttccccgtagcccgtgcgccctcggcgcggagccccggcccgccgcggtcccgtctcctgggcctgtcccgcccgcgccctccgccggccctcaggtgagtacccccgccatcctccccgccccccgcgctcccggagaggcggtgctgcctcggcccggcgcgcctggccgctttgttcgtgcggggcggaggcgctgcccactcgcggccctgcgcccgctccccctagggacaggccgcggcccagctgctgtcctccccagggtccgccttggccgggagccgccgccgccgccagggtgggcggcctggccctagtcctccgctgcctcctggggagggcgccgtcgcggacgggtcggggtcggggtcacgggcggcgagcggagcggagcggaaccgggatatttcgggggataggggaggagagggctggacgttacctgtgggaagcagtgggggcgtaggcggccctggctcgcaggggtaggggatcaggccctggcccccccccgctgcatcctgcggggtctcagctcccggagccacccggacctgagcgcagccgagcgcggcctccatccctcgggcgctgtctccagggcttcgggcctctccccctacgccctacgctggaagcccttcgattatggaaggagccagagatgctccagttctcttgtactggggatgtggtggcatcgcaaacattcacagttacggcgggatttaagaagcagatgagacctttccaaccaaaggccatctggctagtgtttgagcctcaggtgcagtttttcattgatttttaccatttaattgtgagatctgcaatatcaggtcttcctttcacagaaacaatgtgatacaaccagattgaaaggatatttactgcatatgtgaacccttgcatggacttccagtaccttaaaaatggttaagtgttttctgttggaaaatggtgctcatgcatacgaaaaactatttttgttcagtaatggttgccaactggtttactatgtagtttgaacaccaaacaattaaaaaggaaaaacaaaaccctattcttcgggctttttaaatagtggcatatttccaggttggtatttggtagcaggttgagaacaactggtttcgactatcaggcgacgtaacaaacataacataaaacagaactaaaaatgtgctaatttatagaaaaacatgttgtattagtgcataagtctagtaaaaaaatccgactttaaaaaaaataaaactttatcatgagactcttaagtataggaattaggttggtatgtttttatgtttaaaaatatatattgcattagaattgagaactcttcctatgatatttgagcaatagtaaagtatgttaatactttgaaccattctatctcaagctgctagaaagaggtttctactgctagtttctttccatgagttaaaatggattcatctgaaatatatgtatgcttttggtg

SEQ ID NO: 1881745 - DNA, 4001 bp, Homo sapiens
tgcacaagctcttcctgttgaggaccccttctaccaagtgagccccactaaccctctcaattgaaacactgtttcctcagacaggctccacccaagccctcagactaaattaggatctgttctcttggcatatctaggtatcctgaacttagagcacctttggtaattactaagatttcttttgttggctgattatttgctcaatatctggctgctccatggtctgtaagatccctgagggcagggatcatgtctgttttgttcacactcaggcctagcaccagacacatagtagagagtcaatacctatttgtggaatgagtaaaataaatcaacataaaagttcaaaagcactctaaaatattgcgcaacagaatgtgtttaaaacttaaggctctggctgggcatggtggctcacgcctgtaatcccagcactttgggaggccgaagcgggtggatcgcttgagccctggagttcgagaccagcctgggcaacatggtcaaaccccatctctactaaaaacacaaaaactagccaggcgtggtggcgggcgcctgtaatcccagctactctggatgctgaggcatgagaatcgcttgaacccgggaggcggagttgcagtgagccgagattgcaccaccgcactccagcctggtcgacagagcaagactctgtctcaaaaaaaaaacaaacaaacaacagaaaaaaacttaaggctctaacttaatatatggaagtaagtttctaacccttgtgagaagacctttattagtttgtgactaaaccaggcgtgtgctgcttttctgatctgtccaattttagaattgttattaccaaagtatatatttgacaacaggaaaaatatattttatcagtttgacaacaaatatttattgatcatctgctgtttgcttggcatggttgtagatgcttgggatacagctggtgggttgcagcttactttcccacggaggacagacagtgtacacggagaatttcagctcctgaaaaatactctggtctaaataaaacagagccgtggcaggggcaggggggctagagaagtcctatttgaaaagataacatttcagctagcattggagggacagggagtcaactgcgggagatctggggagagctttccaggcagaaggaactgccaggacatctgaggaacggaggggtgggcagtggcccttggcacagtgaatgaaggaaaaacacacacttttatagagatgccatgacttggagttcttattctgcccattttggttggagacaatgatgatgtccagctcataagaatgttgctaagtaaggtaatgaaggtaaatagtagtaataatacacatcactgatagttttaaacatcattaatatgccttccacagaatttatgtgaaggagaaactgataaagtaaatgttactttaactcatggctttgtttatgtgtttgtttactaatttattatcttttaaaactgtagactgtgttgctaattatctgcaaacattaatgtttatgttgatttctctttaaaggttaaaaagctaaagagagagctctcacagatgaagcaggaactgctctataaagaacaaggctttgaaacattgcagcagtgagtatgaaaagactgaatcaactttagaataagctccctaactagtatgaatacaaagaaaatagaagtacagattacataagcgatttcttaaagaaacgtaaagtaaaaaagttcagagctctacaccaaaagaaaataaagcaatcaaccaacagataaaaaaacttgggaaagatctatgcacttgaaaagatccaaagtttttattaatcattggagatccaaagaaaccaaagtgaaaagcctttgtcttacctttatctcctggacccttgctggcctcctctgagattgtggtacagagctaagagactaggcacaagaaattcctctccacattcggctgggctggctgtacttgacccctgtgtgagcctgcagctgccctgggcccttgggtggaggcgtgtctgtctctctctctctctctgccagccccagggatgacctagagtctaaccctgacagatggcaggggagcaagagcaagttaggattattagcaaaggagcgggagtgcgctcctcacttcctggttcctctacctttcccgtttgctactgaagttggctgggccgttagcagagccctaagctgggccaggtaaagtggaaatggaggtgacagagggtcacaggatgaggatatcccttccgcattcccggcccctgaaagccactgttctccctgctgctgaggcccagcctatccaaaccgtgacaggcacacctgagactttctaatcctgcagtctccactccacagggcctctcatgggagagaagcagtccatggttttcacagccacatgaccacggagaggagttaaaacttccctcctgcttggtgcctccaagtgcggtgcagtatttttagggatgtccctggtcagttttgtgttcaggcaggtttcgtgttcttcccggcatctcccgtggtagcacctcaggaatgccaagctggtctcaggcgccacctctgtggaaagtacccagctgtgttccttttccctgtggaatcttactttaccttctgctcttatttgggatgctccaagcagcaagcccctttaaagatcctgtgtgtcactggccagataaacaaactggttgttcttgtttgggtgattagtcatatcttgggatacgcaggcactgctcttgaccaccagtcagacgcatgactttaatttcacacgtgctgttatcatccagactccttttttcctgcttaccgcatagaatcatgaccctgatactccttcagatgctcccatcctagtggttctcaaacctgactgcatattagaataatctggagagtgcttagaaaaataatgtttctagtctctatgccaggtatattttatgagatcccaagtgcttctcaagtccagccctgttgtaagaacctcagctggttgcagagctccccgataaaccaggcagaactagaatgacataaatgcattatttagtaattgtttatcagcataaagcagggcttcgtggtgggggtggggagagaaaacagagtttgaagagtgccgtaacgtgtttagccatatgttccacatttttaaggcacatgaaattataactcgcgtcaccatttgggattaaaggttagccaaacttgctgtctttgttatattgatgtaacaatgctgtattgtttcaaagcagtttgcttgcaagcaatttttataggaatctaaggcatgtttaagaatctgtcaataacattccacaagaaaacaatagacatttgttgtagaaattcaggcattctcttggaatgattctaatcccttgaaccgagagcagaaagatatgatatctaacatcagagacctctcctgtttatcttaactatagacaaaataaagctgttcttattcaaatgttaaccaccatactactaaaacactgaatgatcaacaatcaaacccagcagccagactttttaagaaaccacattcttgatactataaagggacttatatttgtggcatgacagaaaatatatttcaggaaaagatttaaatagaatctgattgtaggctttgtaacttttatttacaatagaatggaatatatttgttgaatctggaattataatgtaatttaaacttgagctttcattttacttggtacaatagttttatactgggtagacaaatgtggcattgttctctacgttattcatttcagtttgtggtcccaaatttgacttcggcctaagcagcagtgtagtatatgtgtaaatggataccaggaagatgcctgtttccatttgctgcctccagtgtgcattcagaattggaaaacaggctagtgatgaaacagcaagtcacaggcatataca

SEQ ID NO: 1881746 - DNA, 4001 bp, Homo sapiens
gaagtccaaaacaacgcacattcgctcagtagtgtgagagattaattgtaggcaggtcccatcttttttacagtattcaaacgttcaaccttaagaccccaccagggcgtctcattccaccgggaactagagaagcttgacttgtgtgatcacctcctgatgaatggactggggcggaacacagatccggaggtgggggcttctcttcaccaagcgcaaagcctaccttccagaaggctggctgcacaagcggccgccctaaatgcggtcaaagcgggcaaattcgccgtgggtgccttccttccctacctccggcccactctggttgctccttcccaggtgctccaagctctccagagtttctggtggtttaaagtttccgcttcacgcccagactgctctaagggcaaacacgacccctttcctcttctaggaccccttccgtgaagtctgttccaaccctgagcctctccaccttcgagattggccgcagatgccccgacgggatggcctggggagccgaaagctgtccccagccccggacagctactgcccacgccgcgcaggccagcctcacacagtagcgaatctccttcacgcgacttcctcgcaggcctgtgaacccgcaggggaggcggaggtcggttcaaaccctgcgagagcccctgcccagcgcggagtcctgcacacggtggaaagtccttacgcattagcgggcaggattaaacgacttcacaccacgaggtgcaagactgggcttcggggccttcctcggtgttgctattttaaaagaagctgctcagtaacccagaagaagatgacgggggacggtggtgtagacccggctggagaggagtccagggcctgggaggcgccccctctgactgaggggctggggaccctgaagcttggcgtccaggccccgccagcgctgcacccggcattgtcccgcctggggcaggcgtccggtccctcggcagtgcgggccagcacgtacgtagtagctgctgaataaataaatgcctatgcaacagggaacgtcccggcccaccccggccgggccagggcctaggaagggcgggcgtccggcgccgccgtgggtccctccggcgtggccgcccacacctcctggccacggcggggctgcggtggggggacatcctggggcgggcggctggacggaagggactagagtcggggcgcgtccacggccaaccgccccgaaccaagcaggggaggccagggaccaggagcttccggggccccgcggctggagcgcccggacgcgaaggggcggcgggtgacggggcgcggtgcgggcggctacagggccggacgggagttcctccgctttccgccgcgcggctcgcggtctcagccgaggtcatcgagggccaggagccctggcggaggccccgccgtcccggacccaccgacgcactcccagggcttggcgctttcccaccaccccggaccgcccttggggtgccggaggggctcggggcgcggcgtggggagcctttgtgccctctccgcttgttgaggttttttctccggaggagagctccccgcccgccacccctttcctctcgaaagttttgtggtttccctagaagacgaaagaggttgagaaggttgcggagacttttgcaatcttccccgtccagaaactctaaaacctctcggcgtttggcccaggggagctatctggggtcaaggggagggagctggccgcacattccttcgcccgccttcctcccacctggagccgcggccccgcggggcagtgcgtccgagctggtgcggcgacgccggcagcggcggggttaagctcaggaatgcggcgcgaggaatgcgcatgcagatgaggcgggcgggcgcatgctaatcgcatgcaaatgaggggcccgccgctgccgcggcagcgccgcagcttcccggatccgagcccagacggcggcggctccggcagcctgggcgccgcgaccctcggcggccagagggggacggggcggaggaggaggaagaggcggaggcagcggcggcgagggggaggagggttcgctcgccggctccgacgcagacatggtggactgatccgcagcggggccgcgaacagcgtttcctgaggcacctcccgcgcgtggttccgccgcgccccgcgccctgcgcccctcagcccctcgccggcgcccgcgtcgcgggttggcagcctagcccggcagccgcgttcccgccgcgtcccgcgcccggtacctatggaggcgccgctcgccggcgaggccgccgaccatgcctaggagggccgggagcggtcagctgccgctgccccggggctgggaggaggccagggactacgacggcaaggtcttctacattgaccacaacaccaggaggaccagctggatcgacccccgggacaggtgggcgccggccgcgggggcgcgggcccgttcggacacggcggctgttgtcccggagacccggccgcgcggggggctggggcggcgccggcccgcggtgccccgaggggtcccgggagggatgtggggctggctgctccggcggggccgaggagccgcccgtacccgggctcctccgcccaccggcttcccgacgcccctccggggacccggccccgaggcaaggctggagtcgctgccccgggccgacgccgcgcgccaggctaacggacccgaggggccacctgagccctgttaggaacttccctaggcttcgaggtgcccacgtggaggctgcaggacaccttcggcctctgggcggcgggggtgggctagggcctcactgccagttggggaacgagccctccgggccacctgtggcatccctcaggccgtccttggcgcgggagcctgggctgcgagctcttggcgggggcgcccagactggccggaggtcccgagctgggaaggggctcccgccccccgccgggccctgctagtgggtgtgactgactttgcccctcagagtttaaaaacgcgcgtttgggggtttcgctgtctgtcgttagtcttcacctgaaaacttgaaccgactcccagatcgggaacaggcatattgtgtttggaagggagatgtagtgaaattaacgttgggtattgaggcactctgatttgagcttagcctggtttctttgttttttgttttttaaattggttcaggaactgaaggttcacaaatgtttctgtgtcccatattttttttacccttaaaatttcttagaattattgtaagaataataggaggtattcctaattataaatttgtaaattatccattaaggagatattcctaattgtaaatttaaataacgtgccaccagggataacttcgacatttggacttttgtcatttctgaaaattataactttattgaatgtggccctttgggctttatatactttttaggtgcttctcctatttaacattttcccttttctcaatttgaagctgaaatacctaactactttataatctcagttacttttgccctaaaaatgttgtttttgaaagctactaaaaggcaattacaagaaagttataaataacattataaatttatggaacaatccttgttcaattatccgtgaagctacgggcctaggtttccctcctgaaatgagaaaaggcacctgtgctgaggttcggtcttgccgcagcctggctgcctgttgctggcctgatgaaaattgtgacaggcatcacaccttcccagtgtctccagacgtgctagttgttgtcataaacttcacgctccaagccagttatttgacttatgctattgcactttgaaactacttaacagatagtaaatgtcagtgctgatggtgtgcacccaactgcggcttttaaggcacctgtataaatatttgacttttacagttgtgtggtaattctttctgctttctgatacttggagtttcaggtaattgaaataacaataaattcttgaaatatttaggcattctaggttctcttct

SEQ ID NO: 1881747 - DNA, 4001 bp, Homo sapiens; identical to SEQ ID NO: 317636

SEQ ID NO: 1881748 - DNA, 4001 bp, Homo sapiens
gcatttcctagcaatagttcccaggtcctaaagacagttttgagtcaaaaaagacaaatgacctagttaactgacaaaaatgatttacatatttttcaaagaagcagagaaaatgtttaaatataaaagttttcaaactaaatgctttaagaaaagggagaagagcaaaaattcttccctcattctaaagagaaagcattaagcctcttctaatttgtatttggtcctacaacaggcaagtctaaaggcatggtcttgaactcactaacatctgaattcttgtagcacatgagggatgcacttgagcaaactgtgtgcacaggaaagaggatttgtgggtaagaaaagagcataagagagaaaggagctatcaagagccttgggtgggggcagggcaggattgatgaaaggactggtttgtgctacaggtacaggcccaggcaagactacgctctgactgattcctgagtccataaaggcagaggagattaggatcaggtggtccagaagcctgggtaggtgaagaaaacagattcctgctgcagatctggggttgagatgagcgtggagtcttctgggcactgtgtgtattcttaggagaaaactgtaggagcaaagctgccatggccacaattcctgagggtagaaccctgtcctaggacgcgtgtggccatgcgaatgcccagtgggcgtgctcaggagcgggttagcattgggtggcagccggcagcagggtgcggggaagggatgtttctcagaactcctttcctccaagttctcagtgccctctctacccgggaggagacctggaggaacaggacagtgcgcagcaggacagtgcatgtgcagaacccggtcaggtctcccgcggacacctgcgactccccccagcccaggctcagccatgtctttcttctgacaaaaaaacttgcggagtttcctcaacaccagtcaatgctccaaccccaacggggtgtccagcaactcactaatgacactacccagagtcagtgctgaccccacaagctcagcgctcttcctacagctgccctcctgcagacgccagtccctgcctctggacacccgtcttcatttctgaacacctgtctacaaaccaggggcgcccacaccctcctcaagttcaataatgtggcagaactactcacagaactcagcgaagcgctgtgcgcgcacacactagcgtattctaaaagatgctactcaggaacagccacgaggaggaggcgcacagggcaaggggactggtgggcaagttagagagggcgggtgatttgctttgcttcctcacacacctcacaaaagcctttccttcaagacccgctggcagtcctcaaaccatgagccaaggcctgcgctgtcccgttaatgagtccccatttgctcacatgaactcttatgttttgatggggcctcgatctcattccgaacagggtcaagtagggataggacccccccggaccacagctgctcccactccggcatcgcgcacgcgacgcaggcgtcttccagatgagctactcctcaccccacagcccggggaaggtgcggggctgcgggcgcaaaactgcacaaggagggctgcaggctgggccagagcagccttgcggggaccccgacaggagcgcgggtcccccgacaggagcgcgggtccctcaccggaggggactgaggaccgagggctgagcggcggcagcggggactccgttcgcagactgggtaccgctgccgccatttcccgctggttccgataaggcctccccgccacgtcgcctccggacgccctgcccggcacactcaccatttcccggcttcagggatgtcgtagagtcttagctacgaatcatccaatacccgcaggtcacagagcgacggaggctgaggctgtggccgaatcactgaggcctccctgaggggtggaagcaggtcggtgaggccctaaccgagctcaggcagaagcctgacgcaaaagcggcgccagatcccggatgccgccccctcctttgcctgattgggcagttctcagtccagcgccctcattggatacaactactagctctacgccctcaagctttgagtgacagaattcgagtgacagaaattcgaccatacacttaatgaggcaagactgacagactcgtgtctccaggtactttcaggcagggctttctgtgctaggcctggctctgttgggggttcatttttaaacttctgttgtgtgaggttacgtccgtttataaattgtgcacgcacgcgcacgcacacacagacacacttgttcacaaacggaaacaatataatcacaattattttaaaattttagatctcataacctttctggcctctggtcttttgagtaggacacctgagatttgaagagagaagcaagtctctaaaaaataaaatgttggctatttgtgaatttacaatttttcattggccacatccaaactaataaaaataaacaagtgaaattgtttatgataattgtaacctattgtatccaaaatattattgttttaatacatgatcaatatataattagaaataaagtatatttctggtctaattcttctaaactcactgtgcattttttgtttgcagcacatattacttcaaaccagccacattccaggtactcagtagctacatatggcaggtggccaccacattgagtgcagccatgagggctctaacctcagggaattgagggcctggacacctcttttctgttggaagtgagggaacaacctctctaccaacttttcttctcaggctcaagggtgggtgggacagtgcccctagagagagcagaggctgcaagctgagagtgtccacgtgaatatcacggtctcctagttgctctttggtgctggtgtggtggtctcctcagttcagccaggttcaggctctcgtcccatgacctggaaaaatgaggcacatggacaccagagagtgagaaagcagagtaggatttattaagcaaaaggaaagctctcagcagcaagaggggacctgaaagcaggttgccagaaatggggctgagttctgggtcttttatgtggcaagaacgaggaagtcttctgtgggttctacccaaatgggacgggtcaagttccccaccaagggtgttgcatctgcgcatgcctggggttgaccacagtgactccattttggttattacccatgagtgcctaagggaaacttacaggggagaagctaaaaccacaatgctaataccatgttaatgactttacaatgagctgggtgaagacaaggaaatttaggttgatttattttgcctatgtctaagctgggatagtcccatctgagcaacatcctggcataagaggaagttcttaaccacatttcttcccactagctacaggggcggggcaggtgcagtcccacaggtgcttttcctctcccgagaccctccgtccctattttcctaaccagcctcgactgccttctctctcgggggttgagctggttagaaatttaggctgggcttagctgggccattcttctgggctcagtttggctccttcaggtgtgagtggtcagctgctggtgaattaggtggctctgcttctgggagtgagctgtctgtaaactggcgcactttggcttttctcagcatgctattttatcctacagaaagctaaaatgggcttgttttcatggacatggaaaaattctgaaaaagataacagaagcatttaagaccttttgagcctgggccccaaactggcacactgtcatatgcacagcttcggcctgtgcaaataaggaagattcaaggtttgggaaacagaatctgtctgttgatgggaaccactataaaagccatttccaagaatatgaatacaataagaaaaatttttttaatttctgtttttgcaatcaattttgttttgtcttttcttgcaggtaagtataaaactctcccacatctactaagcagctggcttggactcagg

SEQ ID NO: 1881749 - DNA, 4001 bp, Homo sapiens
caagggaccttaaagaccccatgtgaggttttatgaggacggcagtgtgggccaggtatcatctgaaaaggaggtcaggctctcaaacgtccactgtcacacaagagaccaaggggccagagtcgtgccaaaggtagggcctgtggaaattcgccctggggctcccaccaggaccctcctccttcctggatactcaagaacgctcagggagaagaacatacctatgttacaggtttccaggctgccgaaccgcggggttgagcgtgccgtcactggaaagcgagaaaaagtcagggctacaccgcagctctgaagtgaggcaactcccaggggtcccaggggaggtcaccccccttccacatggcctcccccaggaccagtcacggatgctcccctccccagctccttgccccgccacatggctctttctccctctcaggttaaagcgcgacatccagggaggcccctctgtgcaggaacatctgtcacctcactcccttcccacctgcacacgcgtcccctgtcttgggtgtggacactgctgtgtctttgctgtgggacccctgccctgacaccccctacccgagaaccccatcacagggcagggaaacttggatcacgcccagacccagccctcgggaaggaagctggcacaaggatgccccaccccagaaacgacacagaaagggtccaagatgggggacagttagccatgtcgcagactgagcagacaatgctttctcaaaggggatcttcaggctcggggcagcatgtgcacaggcacagggacgcatggcacaccagccggggggcggtggggggtcccagacatcagcagaggcgtgggtggtgtggacaccctggtgctggagtggagtggggtgcccaggaaggggatcactgactctcacagaaagtgcctcctcccccacccccaggcctccggaaggtggggctccagggaagagaagccgactctgcagcccttacctccagccgagcatgatgacgcccccggtcttcgggttgatgctgcagcagtcgccatgagccctgatacctgcaagggcggcagaggtgcccggtcaccccgaggagaaggggccgtgatgggctgcctggacagacactaggtgcggatccgcagacatcattggggcccagaggcaggcctggcatggggctggggcaggagggagctagactgttcctgccccaaggaacatgccctctagtgagggctgctgccagggcagctctgacacagccggcgaggagacacagctcctgaggcaccagcaaggacccaggaattcacagagggcgggaccaagtgcggccagggcactgggggtcaacaggagcatctggagacacctctgagtggagcgcaggaaagaacgagccacgtcttgggaagcaagagtggccaggggcagctgagggcacaaggtgtgcagaggttggggtcagatattagaatggaatacacaagctcatggccaggaaggaggctactgcaccagtcccagccatgcaggcttgaaccaaagcattagccacatggacagagaaccgattagcaggtaaaacccaggaaacgaggtgggtgggggaagaggaaagagccagaggtgacggcaacacggtatcagcaggctacatgagtggccacgtgtgcagctgttcagagaaagcctgtgcgctggggtggtgctgtgaagctgatcgaccaaagggatcaaaacccagcgttggacgcagcatctaaggagagaggttccttggccacatcctccacccaggcgccaaacagtgaagagaagccacgcatctgagagtcaccaaaggagcagttaactcacgctcagcccttgatcatccacactgaggggaactggctggccatcatcaaaagcgcatctctgccgctttgcaacacgagaagtcatctgccttagcagcaggctctcctcctgaagtaaggccccaaagatttcctgtgatccaggaaaggaaaacagtaaataagccagcttccgtgtcctcactgacggggggcagcctcagaaagcatctcttttctccaaatctccagacacttctccactctgagccaagtgctaacccaaacagttcatgactcaacagctacgtagtctatccacccattcatgtgacattgtgaaggcgacactgccacaagccacaaccaagccttctacagggatgaaggccaaggggactctatgcagggagcgcatggtccctgggaggcagctgaagagaatgaaatgagccctaagcgacttaatctgatgcgaaaaagagaattgcaggccttcaggtcttcctcccgcctccccaggctggagagtgaaaccaattcttttgtcattggaccttttttttttttttcaaatggagttttgctcttgttgtccaggctggagtgcaatggcgcgatctcggctcactgcaatctccacctccagggttcaagcgattctcctgcctcagcctcccaaatatctggaattacaggcacgtgccaccacatccagcttatttttatattttcagtagagatggggtttcaccatgttggtcaggctggtttcgaactcctgacctcaggtgatccacctgcctcggcctcccaaagtgctgggattacaggcctgagtgaccatgcctggcgtctcattggacatttttttttttttttgagacggagtcttgctctgttgcccaggctggagtgcagtggcacgatctcggctcactgctgcaagctccgcctcccgggttcacgccattctcctgcctcagcctcccgagtagctgggactacaggtgcccaccaccacgcccggctaattttttgtattttttagtagagatggggtttcaccgtgttagccaggatggtctcgatcgcctgacctcgtgatccacccgtctcggcctcccaaagtgctgggattacaggcgtgagccacggcgcccaacctctcattggacttttaaagattcacacacaaaaataaggaaaaaaaaaattcactcctaggcttgcgattgatgtgtccggtttctgcaggagcacatgtgtatgtctactcaacaaactgagtttatgaatggcagccccaggagatcagagctgcaagcctatgccgctctcctgggaatcctgcctcattctggaactttcgtgccagcaacaacatacagtctcgtttgcctgggtcagatctcccttgaattggatgggaaatttctgggttttctgggccatttgtagtactgtgccctaattaactgagagcccggaaatgcagagaaaaaggaagacgtaaatccactctgaagaaattttcttttgtggaaacttccccctgacacactttgatcctttgcaaagccaagctgagaggaggaatccacaagtagcagctggctgcagggtaccacagaggaagcggcgtgatggcgaaacaaagccacagaagcagcgtcttcctttctagagcagactgaacagagtcagatcattctccttcttccaggcactgacttcagccctgagtctcctgagagctgaggccaaagtggagccacggtgggaacagggggaacaggtgactgccggtaacagaccaggcctgtttggaatgtgtcatctacactgacttaaatcttaagcttgctttactttcttttaaaatattaggtttttaaaaataataaaaagcggccgggcgcggtggctcatgcctgtaatcccagcactttgggaggccgaggtaggcggatcacgaggtcaggagttcaagaccagcctcgcgaacacagtgaaaccccgtctctactaaaaatacaaaaactagactggtgtggtggcgcgtgcctgtaatcccagctactcatgaggctgaggcacgagaagccgagatggtgccagtgcaccccagcctgggcgacagagcgagactccg

SEQ ID NO: 1881750 - DNA, 4001 bp, Homo sapiens
aaagaaagtattataggactcagctaattcaaacaatggctttcctttgaaataagatcgtctgcttcccttaaaggcatagtagtcacctttgacacaaggaacagaaggtaaaataacaaaggaagtggtgaaccaacctcagttctggaattaaaaaaaaaaaaaactgatttgcattaattatcatttctaggtgtctggcctagtccagaggatgcaaatggcagttcagatcaatcatccttaaatcggatgtgaacgctttgatgtggctgagggagagttgtggaaaggggagtaggtaccatgaagagaattgcaacaaaggaaaaaaaaatatatggggttgaattgccccaaagaggacagaaacagcaaaaacatatttttttatgtacaagtaaaaagtacagaagacaaaataatctcacctggtctgagatctttagaatataatgtttaatgttgattcccttactcttactccttttaggactcgtgtgtgtgtgtgtgtgtgtgtgtgtgtgtgtgtgtgtgtaatggggtggggtaggggaaggagagaaactgatagtactgatgaatggggagctagaaagacaaggaaggaaaagaggctctgaaacctaagggtgcctactgtcctgggaaactttaaagcatattccatgacgaattacattatctccgggcttagaaaattccgaaaaagatgggaagacaaatcaaaggcctttgataaatgaggcctcagttttgtggtcaagtctgcactaatttttgccttgtgtgatgtgcgaatttgacaaaaagaggcgctggattgaggagtgggatgggaagggggaggcacctctacctgcacacgggggcaggggatggatgcaaatcaggccttcccgagtggccaatcaatagtcaggtgagggattttgggtccccaccccatcccaaccggcgtttgagcacgtgcacggtgttctgggacctttgtcccgcaaagtcacgcttggcgggcaccccttggtccctttttctggtcagatgtgcttgattcttttctgctctacaacccacctctctagtcgtgtcttcccatctccctactcattccctcccgcgccgctgcgggtgagagccttcagcggtgcgtcctaaggagcgtgaggagtgtgcggagcttggcacaccaagttgctgagactgtgacaccagcctccgcccgttccgcgcgggtgcaggcggcgagcctcggctcggacaccacagctctcctgcccgcgccgggcagtcctctgcctgtccagaggcagcactcccggctctcggctggctgtgggtctgtcttgtggggctccagcactagcctgctcggcctcggaaactcctgcagcgtccagaacacagaaaatagactcatctcctaattcgccagggagctcgagggctgcggggccgcggggctgcctcccccgctcctcccccaacccgaccccaccccacccccgccagggcttcggcggcctcccggagtcacacagcctacccccccaccccaacaccccctcccccggcagacaaagggcctgggcaaattcgccgcccggcctcctagcgctccggggaggccgctgcgccccggagtggatcgcgctggaggcgtgcgccgggcgagaagccgcggccgcgggagcgcagtatggggaagaaccgcgagatgcgcctgactcacatctgctgctgctgcctcctttaccagctggggttcctgtcgaatgggatcgtttcaggtaagttcttccgtgactttctcgcttcctttccagccatcccagcggagaccgcgaacgtacgggtcggcagggctggtgcaaccggtgcgtggagagcagggctcagtgggtagcaataaaaatgagcttgaggtgcaggttaaggggtcaagttcggaaatgaagcacacttctgccggcctcgttttaaccgtatgtggaatagtttccttctaattagagcaataatatttgcaaaggtacgtttacagcacctggaggaaaattagaacgtacctaagttgatagcaacgctctgctctagcatacacttcagaaatcgtttactcgtgctggagtctttgcatcggttttcttttcaacaatgaagtgcggtcaccaaactttgattccccctcccccgcccctaatataatcgtacttttactctgaaaatgctggggtctgtaatctgatcgcaaggcttctggggttgcagagtttcagggtctagacgggtggtctccattgcattcaacgcgagcgccctgtatctatggactgtgagcttggaaatgtttgtgctactggaaccgcggcactttaagccccgcacttctgtctgccccgcccgcagagctgcagttcgcccccgaccgcgaggagtgggaagtcgtgtttcctgcgctctggcgccgggagccggtggacccggctggcggcagcgggggcagcgcggacccgggctgggtgcgcggcgttgggggcggcggaagcgcccgggcgcaggctgccggcagctcacgcgaggtgcgctctgtggctccggtgcctttggaggagcccgtggagggccgatcagagtcccggctccggcccccgccgccgtcggagggtgaggaggacgaggagctcgagtcgcaggagctgccgcggggatccagcggggctgccgccttgtccccgggcgccccggcctcgtggcagccgccgcctcccccgcagccgcccccgtccccgcccccggcccagcatgccgagccggatggcgacgaagtgttgctgcggatcccggccttctctcgggacctgtacctgctgctccggagagacggccgcttcctggcgccgcgcttcgcagtggaacagcggccaaatcccggccccggccccacgggggcagcatccgccccgcaacctcccgcgccaccagacgcaggctgcttctacaccggagctgtgctgcggcaccctggctcgctggcttctttcagcacctgtggaggtggcctggtaagcgccttctttccctagctctccattttcccctgctgctcctctccttgcccataggtcaggatgatttgcatgcaccttctcccctttcagtgtgctccttttgagcttggccctagactgcacccccaggtgtctacatcgtttgcctcccatggaacatctccagggcagttgtgtaaatcggaagtttaattgggtggataaatggccttctccttccagatggttatgtgtctttcaaaactgcgtgaaactctgccttttcgtaacttcttcccaatggctcaacttctttctgttctccagagttttccaaactaagcgctccacgtgatgtcttttaggaactcgaaagacaaccagtcggctcactgatgaatctccttcgtgtttgcgccgcactctcagttcctcatctgttatcttagagctttttcataacctacttcaaagttgaaagaacagttctataggggattactctgacagttgtctagaatttaaacacatccagagtcatactggacacctgttcactgttcttgtgaaaggagttgggagggactcaactgagagactggaggttgagtaacgggtgacattagaatccgatctgtgttcaaagggttatggttctgtgatttacatttcatttgacagtagttccttttcttctttccactttttggaggaaaggagcaaggtggagagccttgttaaaaggcctgttgggatggaaagtaaaagccatttgctctgtcaatgtagaacatcatttgatttttctccctctgtcacgattcaggggttgggacaagcttctataagttgacctttgtgtgtgtgtgtgtgtgggggggtcaaatatgcataacataaaatttactattttaactgtttctagatgtacaggtacgtggcattaag

SEQ ID NO: 1881751 - DNA, 4001 bp, Homo sapiens
gtggtgacttcatccctatacccctcccactccatgtctcaggcttgacttgctgtatgagagcacaggccctccgaatgtgttagagcacttcttccaatgtggaagccagggcccctctctcagttgctgagtgtccactggacatttctaggtggttatttgttcctcagtgggacaggatctgttctcagcactgcctttaaggctggccctgtcatttctccttgagtcttagctgttgtttaaattagctgcttggtcaaggtgttctctgatatagttgattgccacctagtggccacaggtaagaccgtgtgtcacggaaacgagaaaaatgctatggagaattttgtttcattctaagatttgcacagggtgtgtgtgtgtgtgtgtgtgtgtgtgtgtgtgtgtgtgttttgtttgtttttgctagtacaatgccaggagtctgggctgcagaatggtatttacaagggactgtaacttgcttttcttataatgaagcacatcgaactaggtttaaactgctacatacagacttggggaaatggggagtcgttggaaatgcctctctccaagcacagtttctgattggatatgttctcagttttcccagatacggggagaaagaaaagagcgatctctggggactcttccttaaaccattttaactgcaacctggggcttgtgctggggctaagagaggacagttggttgtggccagcagttgggttgtatgtagctcatttctccagcttccttggtataggtgaggttttattttatgctcctgctggtggtagctctccctccagctctgtgggactcttcctcaatggacaacatgaagggaggtggtcacatgctaataggaagcacattcccacatatatatcaggctctagccagacttacataagttggagagtttgtcctaacttacctgctttttttttcacatgtcaaacattgagttgggaggttcacctctgatgaaggctaatggacttatggagtgcccaacttcctctctctttgttctttctgcaatacctgctctcagtcaagcagtagagtgttgggctttggggatagagtggtgagcatgaagggatatgatcctcatccttatagaatgtactagttggggaggcattacttgaagagaagaattacctgaacaaatataaaattgctctgaagaaaagatctatagtatagtactcagagagtgagaaatagggttgggtttggcctgattagagaagtcagggaaggcttcctggaggaaagaacttttgggccaagggctgcaggcagaggtggcatgtggtggcaggtaggagttgggcatgccccgggaactggcagaggctggagcagctggagcccagagaggggtgtggggaggccagaccctgcagggcctctcaggccttgggagggactttcgtcttcacctccagagctctgggaagccatcacagggctcactgctggtattgacacaactgggtggagaactgatttgacggacaaaagtggatgtggggaggccagagaggagcagttgcagttatctgggcaaatggaggtgttttgtttaggggttgctgatagtgatgggaaggagtgggcagaattgagatgtgcttaggagacttgggaatggacatggcacatgagggagcctgctgtgtgagaggatgacatgtactggtgacttgtgcggcagggtgaatggtggtgcccttcgttacactggggatgcaggaagaggccctcggctggctctctggggagagggtggcagagggtgtttgagtagagagagttttgttttgagtgtgttgagtttgacctaggaatgggggtgtgggctaaacctgaagtctctctggggctcgtgtccatccatgtctcagctgtctgtcatgggtcctctctggagactctcaggtattccacctgtaagccagcttgtgtttccttgcccgctcacatcgtacaacaggtttggagggacactgtgtccagccctgtccgaggcactctttgtgcattgtgacatgaagccattcatgactagttccagaattattccaaatacaaggtgatgaggcacagagagtaactggcgtccaggaaaggaagagattaacaaggcccggggactttggtattcttgaactttaggcagccatgaggccaatcctgttgcaagttctaacctcaatgatggcctttctgagctgtaatcactttcttttcttttctttttctttttcttttttcttttttttttttttttgagacagcgtctcacactgtcgcctaggctggagtgcaatggtgcaacctcggctcactgcagcctcagcctcccgggttcacgcgattctcctgcctcagcctccctgagtagctgggattacaggtgcacaccagtacacccggctattttattttatttttttttgtatttttagtagagatgaggtttcactatgttggccagactggtctcgaactcctgacctcatgatccacccgccttggcctcccggaactgtaatcactttctaagtccaaagggaaagatgtgactgagcagcaaaacatttcaagggtagttaatacacaattttggtaactttggaggtcacaaaggcaatagatgcactgaaaatacagtagtaaggttacctgagtccatgtttgtgtgtgcacatgtatgttaagttttacccaaggagaaaaaggaaatggcttgacttgtggtattactggtacaacttgtataaaattaaggtagattctaatttttaaaaaattatggtaaaccttctgtgttagtgaaagttggatctatttgggttaaattctcttaaatccggtgcagattaatatctgctggcatctccaagaaaagaagggcacttcctctagtccctgagtgagcaggtggctctgggagcagtctctcaaggcccaaacttctagctgcttccatatttcttagccatctggtcccctcactcagagaagcacagccctacctactctggaaagcagatacttggcctccccagatgccggcagttatgacttccctccactctggccagcattctgcttttctagcaacagatgtttctgcaaagtaaatattattgactctgcttggctccttgctgtgtcttgcactgcctgcacatgaaacagcagggttatatgaggagggtgccacgacgcttggcatgcacccagcaccagtgccagcctcttctcttttctctctcctcttattggaatgtgtgtgttagattcctgtgtgcatcagagggaaagctcttgaaataaatctttgggctgctccatatccaaggtgaaaatctacataagataccaccaatcttactggattgaaattggcaagaagcaatggtttttaggtagagagttctctttttagtgttgttttcaatctctcaagtaacatagagggtttaccttaatggggtgaagtggtatggtgttcccacatactacaaggatctcagttcacaggacttaagtcacaggtcctctccttagtggccttgcactcttaggtcagtcctttaacttctccgagctccaaacagttattcatgcttacctttcctggttcctcttactggaggattcatatatgaggaaagaatagcccagctatacctagaactgagtcttgtgatgtgcagagtgcctatacagtgtttctcactggatcctccctgcctaacccacgggctgacagcctccgtcagatgagataactgagactttatgactaacccagggttggttacatatctgatctatgttggagctggaacttgaacccaggagctgtgggattggggtgggggcaaggggttggggttgatcaccctgtcaccatcaccccatagaatgcaagtggagaagggaggttctccaaaacaagcttgaga

SEQ ID NO: 1881752 - DNA, 4001 bp, Homo sapiens
caaaagactttaaataattgatgactgttctttcataaaagatttctgtggcttattttgacatatggtatcaacaccccacgtgttttttctctattctttaccattcctttaaaaatttacacccagcattccttattttaaaggaatgactatctgtcattatgataggtatcgagtcaggtttagaagccatttaggatcagtaattttcttttccgagcatcatgtctaactttggaacgtgcattcaatgaaacccatgccagtcaaatggaattgaaaagtatagggcacactggatttgatttttggttagaagagagagataaagggttgtcaaaaggagaaggagtcctgagatttccaatctattgtttaaatggttacattgtggaaatataggagactctaggcttgtttttctaagtttccaccctttgttagaagcggttcaatcctgtttcggaccagttctggggggtggtgaggaggggcgcttgttctgctctcagcagattggttacacgcgtcaggtggtggcgatgacttaattcctagcccaagaagaatataatgttaaaactggttatgtaatttttgtgcctctcctttttaatgcagtatttagttcagatgttggcgatttttcagaaaaaaaattagagacatattttaccttattttttatattaaaaacgtacatcctggagaagtgctgatgactaaggcaagtgagaaatgaaggatgctttgagggacagtattaatgcattatttttgaaactattaaggtgaactcagttctttagcaggattttcgtagttagatacaggtactttgcatcctgaaataactaattaatctctccaagtgttaacactgataggagatgcaaatgcctaatgacagccttggtatttgttgaaaagcagatagatgactttgtgtttgtacctttctgaatattgcagccttttatgaaacggatgaaagaaaacagatttttcctcaaggggttaagacttgcagtggggaaaagtagaacaacgagatgtgaggacaaatataatttcattagttgcaccatgatttcgtggtaaagaaaactaaatgccctgcacccccaacaaaatgccccccaaaccctgcaacgcgtagacgagctcagtctggaatagtttcaatgacttgaaactgggagctctcaaactagcctggtaactgagaccccgccccgggcgcccgggataggcggagccaggtttgttagcctgttgctaaggcgatggcaggcgctgattggattgggcgcgggcgggtggggagagtgagctcgcgccgcggctggggcgaggctaggaaaccggcgtgcgccggtaaaggttcctccagagcgacccccacccagcccgtactcacgtttgttcccgggcttctgggggcgcccagcccgtgtcaacatcatgttctgtcgcccctcttttgggcctcctaagggccatcgaaaggaaacgacttcaggctttaactgagtagagggcagacgctcctgccggccttacaggtgctggatggccatggacccaactttagcagaaaatccttttcagatggaagttggatgggaagggttggcaggacccccgttagctatcttccgagtgggaggtgtcaggggactcctgtgaacgcttgttttccccttagctgaaacaaagcttgttccccgacctctccagtcgccacactgtctaccttgagttgacctgaggggacagagcaaaggctggcccgaggaagaaggaaagtgattccaatatcgaaatgttgggggaggggggggcttcgacgggtatcctctgccccctcccccatcgttttccgaagccttcgggcccccgcctccccttcgccaccccaatatcccttgccgaaactaaaggtgtcagagtggcccgagccagatggaaccggtcgccggctggggcgtgtaaagcggaagcgccgcggctcgctcgccccgccccccggccagcaggctaggttgcgcgggcacgggcgcgagcgccgcgcgacgtatgccgtatgtatagcggggcgcgcgggcggcagcggcggcggcggcggcgcgcgggcaggccggctgggatctgctcgcgccggtttaggccggtcctctcctgctccggtctagttcttgattgacagcccggcacttgtttaccacggcgcggccgccgccgctcgcttcaatgagactgctgagctggcacaaaaagggagcgaagagggaagaaagggaaaggaaggcgaacttcgggcgccttcgaggggagcgaatttaaatggcccccagctcatcagctagtttttggttctgaaatccgttcaggggaatttgcacaggggacgaggaaaattgtatggagacataagcgaatcaccatgatttttaaatgaaagtatcgacgtatacatgcttttttccccctttttctcgtttaatatcagggaggcatcacgttttttgtgtatatccaatactttgctgaaggaaagttaaataatgtgccagttttttctactctgggggctaatcgtaaaggtttctacaccaagaaaactttaaaagatatttctgtaattatttaaaacgctaaataggcactttaatgatctagaaccccctcccatattttcgattatatttattttcatgccacttgaaaaaaaataatttcaccaaaaaaattggttgtaaaatgaaaggtcatcccttttttatagaaactggaaactattaatagttagacttcatttttttcaaggatgttggaaaatattgtttccttataagccgacaccacctaaatgcggttctttgtaattatctaaggtatagtttatgcaagttttagtcgttgctaggaccaactgagtgttgtgatcattttagatcaataaataattatttttagttcaataaataattatttttagttataaatctgacattaaaatcaatgtgtggctttttttttttttttttttactccgtctatttgacaaggttttctagtggttttggagtatctattctattcacatctggtattattattccctataaactgacatattttaagagggttgcatgaacagtttttctttgatacattatagtcttaatgtgataaatttaagcaaaccgttggagacaaaggatagcattgtcttaccatgatgtgagacccgagccttttgagtatatatactattttataaacagatgctttgcagtttgggtcattttccattagaaaaaataaaaagcctgtggggtgtgagtattcattatccccattttacagataaggcagctgacgacaggatttttattttgtccagaggaaatgatgaagttagaattagaactcagatctctcagactccaaagcttgttttgtggtcttaattgttatgtaagcatctttaaagttatgccaccctgcggagtatgtaaatgttgaataataaattctttgttttctttttatgtttgttttagatgatgataattccgaagaaggcttccacactattcattcaggaaggcatgaatatgcattcagcttcgagcttccacagacgtaagtattataaataataggcatttttatagatacttatgatcagagcattattttaaaattaagtattctaaatttaaacatttttagttgaaaaaaaaacccttttcattactgaaacttgctagaggaaaacaatatattaaacataagaagctattttttaatctagcgtggcaaaattatagaaagcatactcaattttcagtattctttcctaaagtttatgaggtttttaaaataggaatagggtttcctttaacatgagtgaattggaagttgctagtcgaataataaccactttatacttagtttattatcaattatcattatgagaaaagatagac

SEQ ID NO: 1881753 - DNA, 4001 bp, Homo sapiens; identical to SEQ ID NO: 317699

SEQ ID NO: 1881754 - DNA, 4001 bp, Homo sapiens; identical to SEQ ID NO: 317714

SEQ ID NO: 1881755 - DNA, 4001 bp, Homo sapiens
agtattggaagagtggcctggttcctcttgcctgctgatagtaaaatatgcaaagagaaaaatgatttaaaattgattgtaaccaaaagggaagcagaacttcaaaatcttgaagcagattcagcctatctacattggaaagcatgaggaaacctgtttgggagagaacaagtgtgggccaaccaactgttggataagtagattagtatggataggccacctcaatggaaggtaggtgctattcatcaaaaataatgaaagggttatgctgccatctaaacagaagccagggcttattgtaaaaggcaatggaagaatgaccctgaaggcattttagagattgtctatgctgccattcccatcacgagcccagaattccagggtctggggggcagaagtttatcaaaagagagaccaccactgattataacagcctcctcacattgcagtctccactccccgcactctgcagttctcctcctcagtcaccccaccagtgaaatcagcagccttagcgaagtgtgtatttcacccaggaaagcagaggggatgtgactagatttcaaaggatgccctgagagagctagaaggtccaggcagagaacccacagggatgggcccacctcagagaactgccatggggacaggctatcacagagagcaccaactaaggtaatgccagcagagccatgggggcaaggctgcctccatgaacccagatttcagcactggagagctgcagcccttacaatttgatatattttgccctgttggtgttggacttgatctgggcctgtgtgtatatgaatgcacatacatacatgcatgcatccatatctacatctacataaacatatatacatataaataatatcagattttcagcaaacatgaggtgtgtgtattttagttccttgcatgtcatctcagaaattgaggtcacaggaatagattaaaacaggctcttttttgtcttcaatattttattctcagaaaaatctttcttaactactctacaccctgatctatattctcttcatgttgtcaatgattatgttgtactcccaatttccaggacagcagaacagatatgctttttttttttctttgtgctttaaatgctacaaatgaaaattactggtttaagacacagtttaatttgtaatcacatttggctttgccaaattaatgagtatattctaattgataaatgctgcaatttttttcatactaaacacttgtctccttctatccacgattttatttctaaaatgttatgttttaaagcaaagcttcaaacaataggtgtttgtgtatgagtggtatacgtatgcgagtgtatgtgtttaatttttttccaaaggaaaaattaagtgttcttaattttgtgcttgaaatacagaaatacattttttttgcacacagatgtctacttctaaaactgataagcccatgtgtcttttttctaacctaaatcagcttataatatcgttgatcataccacattgctaaaggtcaaagcactttttaacagatgtataggtactttaatgtcaagtcagaaagaaacatgctcccttattataaaatatttactaacagataaaatataacacccacacagatactgaaatgttgttctaatgattagccgtccttttattaattagtttatttttgaagccctttgtataaagatggctagatccctggaaagctggtaaactttttagatttatttttatctataatcacatccaaaaacattgccagatgtattaggctgttgttgcactgctataaagaaatacctgagactaggtaacttataagaagagatatttaattggctcacggttctgcaggctgtgtaggaagcatagtgatacctgcttctggagaggcctcagggagctcttagtcatggcagaaagtgaggcaggaccaggcccgtcacgatgagaccaggagcaagagagatgggaggaggcactactcacctgtaaacaatgagatcttgtgagaattcactcactatcacaagaacagcactaaggggatggtattcatgagggatccacccccatgatccaatcacctcccatcacactccacctccaacattggggattacagttcaacatgagatttgggtgaggtcacatatccaaattatatcaccagattaggatttttgttttgtcttaagcagtctttatattcaaggacaagtgaggaagacttcctcaaatagtttttgttttaagtaatctgacctattttggggaaagaaatgagaagttcttctacaaaagtgattgattctccactaaattgttatagtttcatgattcctaaaaatgggtttatgctatagagatttgatatctcctatacgccactctcaggttggccctctccattacaaggcaaggaaggggaggaaatggactcaaatctctcagcctcacctctatcctttctgactccaagaggtgatggagagaggaaagaaaggaaagagaaggcaagcatgacaaaacttctctacctttgagtcatttttaaagccacaaaaggtggaattcagctatcttcatcagcaaaatgagatgggtgatgagtgggttggccagatgacaaattgctaagcatcactctcactaaatgttgtatacgtaacctccacagctccagcaagctctcaggaatataacccaagggtccatgcatataagctaaggaaattttataatatttctccatttacttctcatatcttcaacaataagttatatgaggtacctgccaaaagcagaggtaacttctattttttagtattttaaaataattaacaaagtatacattttataaaactaagagatcaaacattgaattattacaatgcttatctatttcctattcaaaaaattgcatcatattgtatcttaacacactgagtttcacatttttctggggaaattttcttatgtagagttgtgaggagtttcagaacctcactgttggagggcaagtgaccactggttttgcatgtgacctactgtgttctgcaaaagtacagcacattgtctgcacatttctaaacattcatgaatcaaaacgaaggaacagtgattacatccttttatatatttttaaaaggtttcacgtctattaatgacatgaaatattcaacagaaaaatttaaaaattatttcacacgagagatatatgcatttcatatttcttatattgtaataaataaaataggttttgttgaaaatggtaaacacaatatttgttgtgactttcttgactttaatagtcaatactaaatttatttagcttttattataggctttttccacaaaaagaggaaagaattattatgtgactatttgagtgtcaaggggcttgcttcaggtgtataagagggaattgtctaagtttaatttctctttaatttttctgaaaatatttcacacaggatcaagaacatcttgataaagaaaagatagtgttcttttgcaaatgcaaataacaacataaaaatcatctcccttgtcagcgagaaatgttctactcagacagaaagtaaatgtttgcctataatatctcatacttagaaatggattggatatacatacatcaaatttacattctataaattatccacatgaagtcctaatatttacctccattatgcattgctggagtaataggaagtacacacagccaaagttatgtttattgaaacctcttttgttacttctgcaatctaccttatcaagaagagtcttgcataagaaccttggtggcaatagctctgaagtgatcatctgatccaaatatatatttactgcattaaatacattttatttaactcagaaaattaaaaatatacaaaatgcagattacaagtattagggaggatgtggagaaaagggaaagcttgtattttgtgtgtgaaactgtaaaatagtacaaccactacagaaaac

SEQ ID NO: 1881756 - DNA, 4001 bp, Homo sapiens; identical to SEQ ID NO: 317730

SEQ ID NO: 1881757 - DNA, 4001 bp, Homo sapiens
ccacattagtcgattgtggaagaggttactagtgctcaccagtctctcgttcttttcctcctgggaacaccaccaggctacatttcccagccaccttacaattaggtgagacccatgagactagtccatgccaatggaatgtgaatggaagtgcatctaattttctggctcatgaaaacagcagcattttctctattttctttttttctttctttgttttttttagacggagtttagctcttgttgccgaggctggagtgcagtggcgcgatcttggctcactgcaacctccgcctcccgggttcaagcaattctcctacctcagcctcccaagtagctgggattacaggcatgtgccacaatgcctggctaattttgtatttttagtagagacggggtttctccatgtttgtcaggctggtctcaaactcccgacctcaggtaatcagcccgcctcggcctcctgaagtgctgggattacaggcgtgagccaccgtgcccggcaagagcagcattttctaaaagcaatcagtactcaacaccatcctgctgaggtagggcagcggcggactccatgttttgaaacttaggaacttagaccatcttttgtcaaattcagatggttttctcaaagtaaagatcattcaagttttgtttcagtaatgggccgtatgatcagatctgtgtgattaggctgaattcattattattgagacaaaaattgagttaaaggggattcttggtattggcctgcaaaacctgtcataacttaaatgtaaagtttctgatgatttagtcactttactctcagctcttagctctttcactcacctgtccttgttctacacaacctgcctgatgggtaacttgaatacatattttctctcttcaggggatgggaacgccctaagggcaggggctgtttccacagccctggggtggaacccccttcctgcataccaagaatgagttggctatacttgacgaagggcaaagacaaggtggcacgcatctttcatgcttctgctggcagatgcagtggactggaaatttcctggtctgggaaggactcggtctgtgagtgcacctatccctgacatctatgctagccccgggatgggggccccagcagagtaaggccctgacttcacatggacagggccagggcaagggggccacatcctggcctagttgctctccatgcccgtgatcaagggagatgagctgccagcttgctcggtcaaggaacacttggaaggcactccaagtgcccccaggtgcaccagatctaggaaacttaagcaaactacatgaggtatggggtggggcccagtgggaaaaatgagtctgacaggtcagagggagtagattatgagctcaggttaggcattctgttcagcattttacgtacaccctcccacttttgatttttaccaacacccagggaggtcggtgctctacaaaagggaaaggcgtgctcaggtggcccgacttgccacggttccagctcgaccccgggctgctagccccttggcacgcttgtctgaggcctcccaggtcttccagcctggcctggaggctcaaagccacgaaacccaagggtgccgcttctcaggccctccccgcccccacggcagaacccctgaccctgcccgggtcaaacgcctggcgtcgggcccgccgggtccgcaaggaggagcccgcgaggcggccgcgaaggggctgtgcttacctcgcccggcgcgggttgcggccccagggcccgcgctccaggctggcggccgctgcattctgcgcccctcgcctgaaacggcagctgcgccagtcctggccacgaccgctttcattttcctcaacgacatcggcaggaaagcgaaagcgaaaccctccgggaggcgggaccggggccgagcgcgcagtgaacgcggggcgcgcggcgggcgcgggccggcagccagaggcgggggccccgggctcgggtctgcgcgtggcctggcccggtggcgttcggggtggagctgggccagccgagtgcccgagagctagtccgccacgcacacctgcctcggcgggacccgggcccgggctgggcgggaggctgggcaggcccgccgtaagtggaaaggcgcccgcggcgcttcggccgaccgggacaggttcctccatctgcccttcattcagcgtttacttgggcctgtggctggcagccggcccgggacctgaccgctggcggcgcctcgggctctggcctgaggaggcagatggcagcctgagcaactgggaccaagcctctgaggagtccccgttggaggggacttgaccatgaggtaccaggcatctcatctggggtcagcggagaacccaaaagtcaatgacgtcggtgaaatgggggtcccttcatccgataagagaaactggaacagcaagcctatggtttggactccctggtctaagcggtgcccatcaatatctaaacatttagagattccaggtttcagtgtctggccgtctcttactgtcagtgatttggggcaaaatattcaagtagttagacttaattacttcccctgtgggatgggaataataataatcatacctactgccagaattttaggaatgaacaatagaaggaagaaaatacttaaaattttctgacagcctctaagtgggttccttgagggcagcaaccaagtcatttacctggatgcttgatagacattctctaatggccagtccatcaacttggagctatctccatgataacaggttagttgtcaaagtttggacaatattatctggagtttaaagactgaggaagccctgcaattttttttggaaggtgtctgaaacttagcctgacaattagcccccacaattatgccacggaaccaggtttttgttagagtggagcatggccacaacgtttgatggacattcctacagcggtgttcagcgctggccactgaggtctgaaaatacttttgcaagcatttctattcacttgcttttagaaaacattggtaagacaccatactccaaacacagtttgccctgtctgtacgtttgttgcaaagcaaacataaaagtttttgccatagagcaaacacagagcagtctgttataactggaacaagaaaccaaaatgagctattaaatctgcccagagtcactttggtttacctgtttgtaatttgggcacattccctgcaagatggaggccctggtctgtgactgatgtaggggcttgtatgtgtccttgcaatagttccctcaagagcaggtgggaaagtggggcaggccaaatgatgaccttagaaaaacaacagcctgtttctctgtccagaagatgctacttttagtctgtagtatgaaggaaaaagaaaaaacaaaaaaggcaagccttggagcctcttcctccttataggacaattcttgactccaagatagcaaagtagagttaaatctgcttctgcataaaaactatgtttgggaagatgaagatcaggaaaagacaggaagagatgtaagcagataagccaaatcctggttaccttttatagacatcacacatgtgaacagagagcatcaggaggtcaaggccggcctgatgtttttcatcttggcaacttcccaaggtccaggtttggtccttgactttgtggggccaaaaatctcatctgacttccagtgtaccagagtcgattagcactgttgcataaagtcagaatgacaactgactgatttcattcactatttgctagagaagtgctatgctaaatgcattacatgcattattacctcattatttctccctactatcatgtggtatattataatctatttatttttcatttgggagaaaaaaagatgaaggaaatcccaaggtcacatagttactatgtatgttagtggcagggtttgaatcaaggccatctgaccccaaaacctgaagcttatccattcctgttagaagcaagactgtcgggaacactggactcgag

SEQ ID NO: 1881758 - DNA, 4001 bp, Homo sapiens; identical to SEQ ID NO: 317742

SEQ ID NO: 1881759 - DNA, 4001 bp, Homo sapiens
atggaactcaggactctgtgccgtgggccgctcagtcagcggctggtaggacccatggctctacccggcccatctctcacctaagtccatggacgctgtctggttcctgagaatggctgagctgtggggaagaagactaggaaggaggtagcagctggtcgcacaactggggagcagaggggcaacttatggatgcaccatagcctcctcctcccagcggctgctttcatgggagaagagcaccctgagcctgtctggaggcctctgcatcctagagtccagacagcctggtctccaagccccagcccacctcttttcctttccctggaagagatgcgggaggccgaaagcagccccgggaaagggcacggggacagcaagtctcctgtgctgcccctgctgcctgtagcttttgccctgactaccgtagacctgaaccctagacctgaatcctcccccagtggacagcaacctgggatttcctccctctggccctggtggctttcagaggtcacagggatgtcaagagaatttgtgtttttcagaatttagtttttcagaaaagtggactaaatatttgtagattcggggaattcctaaatcggaaaagcttgggacccggattccagcctggggttcccattactgcgatcccggctttggggccctgcctttgccgcgggagaataggctccaatttacgaagctggtcaatttcagaaatccgagacccggttcttgagaagcgactgcgtgctccgggaccctgcgtcaacaaccaaacctgggagaagccgcgggaatgtctttattggacgttacgaagggaattggggtttctctcctgggaagaaaaagcccgacctgtgccggcgagagcaggctgccttgggctgggggcacctccgagcgctgcggcgggacgtcggggtccggggcgaagagagccagggcgcggaccgacgtctgctgcttttctgcggcattgctgcccgaacgaacgaacgaacgaacgaacgaagcggtttcgtttaggaaaaataccctcttgacgcgaagccacggctgaagtcccgggccacgcagaggggccagcaattccatgggtggtggggccctccatccctggacgcagcggggagcagcgggcggccctctctcctgcccacttctcctgggggtgggggagccctgtgtcacccgacgctgcgaggggctgccacgggcttctcaggttgtgcccttcgcggggccgtggcccgtgcccccgaggctgctaccctcttgaggtgcccggagccaaagcagagggttgatcccgccggttgggtgaggtagcacccggtgacggcggctatgactgtgccctgggcgcaggaacgagctcctcgcgctgcctcgaaggctcctgaccttccgcgccttgcgctgtcccgcgccgccgggtggacccacacacgccaggagcaaactgcgcaggactcggccgccacctccctgcgcccctccaccgcggagaccctgcgcccctagcccagcgtctcttaccccacctgggcagcgctgcgtctgcggctcgtgggctccgggctcgcccgccgcggactctggctcaggtttcggctccggctggggccccggatccagctctggctctggcactgcacggttcttcggcccctgctggttcgctacatcccagcgcgcgaggccggggcttcctcggctcggcccgctcctcccgccgccgccgcccgtcgcccgcggggaaggcggggacactggccgggaggcgggaagggtggggggaggggaagctaggtgttcgccgggacctgcggggagaggggcggcgcgcagtcccgccggctaggggtcctggcctccctcggggcgtaggctggggtccgcgcggctggcggccgggcctcgaggccggggagcgcgccctgggacctccgtggaggggccctgccgcatgcggacgaagccagagcgggtcccagcctggccctggggcactttctctccctgggcccagtttcccacctgactcgtgaggggctggccctacttccgtttagacgggggctggtggtcgagtttggggttttgagattggacctttcttctttctgctcagcctgcgggagggagctggtcttgcgtgttggcagggagagtccgctgcccagagcgtggcagccagggaggtttgaggacagaccccaggttttctgtgtttgggggtagggggtgttagggtggggcaaccgcccgacctgccctggttgggggaattgccttcttccctctcctcaggggctgggctggtgaggaaagggcacaccaacccctcaggacagacacttctggggccccttgtccaacccctatgcctgcacatcccccagcgaccatcctgctgcgggcctgcgaacggtgacgcctccacccctgtggccccgcaggccgttcctggctggctgccgctgggagacgggctggacgcaagggaactgggagcctgtcctttgcccaccctcaggccacagggctccccagcgttgcctcgtggccagataaccctgtgcgcgaagcctcatggtggaaaccagttggccgaacctactcctggtaccccgaagtgcccagcctgagcctgcttgctgttgggattatgggatgggaccacagggcaggtcgggctgtggcctgcctttctcagggactggagcggctaagcctgcccgccgacggccacgggctccagagcgaccgtttccggcgcaaggtgccgggagatggcagcgcggcagccgggcctgaatctttcatgagatgcagtcagcagcggcgcctccctgcctggttctcgccgacagctgctgcgggagaggccgcgacccgcgccacctcggcgtcctgctagtccgtgcctccagggccgcttggcctgggaacgcagagacccacgaccccctccccaacctccgaagcgggaagccggcccgacccaagctcacagaggcctcggtgttcaggccctgccaggtggcctctgcaccctgtcgtgctgttccagggactccataccctcctctcaaccctcgacagcaggaacccctctccagtggtgtgtgcagggctctgtgcacccagggtcgcaagttaagataacgagtccccgatgccggcactagcggacctgcgcctggagaaagtgcagtctaccaacttggaccctgtgctgtggggagtttagccccctacgtctaccccctcccattgactgctttatgtgtaaaatggcttgttggcgggtccagccctagagctgctaagctgagaagtttctaatcttgtctctggaatcttccttccactccaagcaccaggggcatctttgggcataaatgcagccgctggaccttactatggagggctgcacaggcactcctggggtggcttttactctggcgtctgtagcaggaaatcacaccttcccccctccctgcacgctagcaattttccaaattttgttcccatctcttgtgagattttctgcatgctcttgttcccaggcagggcctgtggtgccaaaaaatgctgcctctggcacctgatggcctgagccagaatcttgtcagtggcttttactagttgtgtggctttggcaaataacataacctctcctagcctcagcttccccatctgtgaaatgtgagaataagtatttctgcttcttgggaaacggatgggatagtgaaggtgaggggtttggtcctgagtcctgtggacagaggggctgaatgctaatggtgatagctgccaggctgctctttaagagagtttgctcttgtttttgtttcttctttccccacggtggtcatgttggttgagtctaggaggaacagatcccttttctgatttagtttatctgccctcatcccctgcttaggtgctaggaagtttggtccaggaaagctgggcaggctggt

SEQ ID NO: 1881760 - DNA, 4001 bp, Homo sapiens
ctcaggccgcagggaggaagctgcttactgcagtctttagctctttggagaaagatgaggaccagaagctgaaagtgtggtcaggacctgttggccaaaagaccagaggagaaaggctgcagagaaagaaaagttgccatgggttaccaggaaggaagacctgaaactggtgctgaggctctagggagcagttgtcccaggaaggaaaccctggaccaaactgccctctcctgccacagctgcaggggtgcccagagttcaggtctgggtgcaaaggggagggtaggtggggattggcagaggattccctgaactctgtaagacatcacgggtcattctctctccagtgaaagggcaaatgcttgttgagcaggtacaatgcactagggactgtgtgagggacttgatgtatattagctcttttaatccttaggacagccctgtgaacaggcattagaatggggaaactgagactcagagatgttacatgacttgtccaagtttttcctagctaggaaggaaataaaaataggatcccaactacttcaaacacttccctctagactgtaagcaacgcgggggcagagaatggctagtcctgctctctgctggctcctctagtgtgtttgtcaaggtgcctggcatacagcagaactgcgcgagtgtgtggttgagcccaggtctgcgtgtttctgagcccatgcaaggtatttgaaagttcctctgagctcttctttttgccctgtggcagcccccttgccttccctggaaagtactgcttgttggtggggggaggtctcgggttgacaacaccctaccgccagctcgctagcccctttaggccccgaagaaactattgagtcatgcattttgcttgggttttgatgattcgtgattcatgcttgtgaggaaggcaagggagtgactcatgctgatttaataagcttaggaatagtcctgagaagtggctgataaagtgccggctggcagcccactcccccgtggctgccagcgccaagtgctcagaaatcaccaggttaaacaagtctgcagaaaattcaatcttcccggcatgattttccttatttgagctaatagcatgaggcgcctttctcctggcactgcgaagtgcaccggtggccttgccgtcttccctgggggcgtgggggagaaggagagcaaatgccttacgtttagcggatgcgctaggaacggctaggacctcccagggtttgccttgtgcccatggaaccagcagttccgccccaagggaagccagccgtgtgtcctagtgccggaatgatggggtaatgccagtgagccgccccttctccacagggtactgagaacgaggccaggcagcagctgtcctggcctcttggccctgtcaggactaacacacctgggttgggcccactggggtcaggttactcacggtaagcaagtgcaggtggagagaggtggcccagaggagcaggccaaggtggcaggagatgggtcatttcaaatggctcgccagcagcccaggggatccctgacatctagcaggtattgacattgggattaaccctgtgggtcgatggttccgtgctgattcctcatgtgcctctgcgtcagattgctcaggcaagagggctggagaaaaaaatcagagatgcacccaacttggtcagtatctgtgcagcgatcctgttatggttggcagtcccttactttgaagctctgattcctttcagaagcttctgaagttcaaaggagcaggtgggggtggataggtcattgagaaagggcagaccctgttcaaaagtaagatacttcctaaatctggtctcctttctgtaagttctttggtgtccctccccatatgtgttgagccccttgtggcatgttaagctcagtgctgggaccagccaggggaacaagggttctgccttcatgagtctgagacctgtttagagtgcagcctctcctcccactttcctctcctctcccctcctccgatgcatctatccatccaaaaaaatgctattgtgataacacacataaagcatttagcattatgatcagcttcataattgctagtttttatttcataattaatattattaggtcagatgtggtggctcacacctgtaataccagcactttgggaggccgaggtgggaggatcacctgaggtcaggagttcaagaccagcctggccaacatagcaaaaccccatctctattaaaaatagaaaaattagccaggcgtggtggtgcacgcctgtaatctcagctactctagaggctgggcacgagaatcgctggtacccgggaggcagaggttgcagtgagccgagatcatgccagtgtactctagcctgggtgacagagcagactttgtctcaaaaaataaataaatagataatgtttattgctattatttgacatctcttgcatgccaggcaaaaaaaaaggtgaatactggtgcaaattggtgagcgtgttatgtgacagctggaaatcctagagctggtctagcctcacccctcatgctgcagatggggatactgaggcctagaaagaaatgaagagattgatgggagtctcatagggagggcatggctaggccaagcctggaactcagggctccttctgccgtggcatgcagctgtcatgctgggatggggtggtccgaggaggcttcctggaggaggtgggttttgagatgagccttgggatgagagtaggaatgagatcagcaggagaggagaagcgagaaagggcagagcacagtggcccaggatggtgtggaggagggagccacaaggggagaaaggtcaggagagactgggtggggggcaccagagccatctctgtagcatcttttgaggagtgccgcaaaggcctcactgctcccacatcctgcactctgccactgccatcaggtacttcctcctggcacgtgcagatcaaatggtggccctggggcccgaggctccgtctgcttgcctgcctcagcgctcatgctcagtggggacccatgggtccaggctggaagtcacaggccaggcatccatgctgaatgcatctctcctgggagagcaaacccattcagtcataatttgccattaaccccttatattagtttcctagccctgctgcaacaaattgccacacaccaagtggcttaaaacaacagaaatttattctctcagagttctggaggccagaagttcaaaacccaggtgttggcagggttgactccttcgggaggatgtgcggggtgatctgtcctgcttctcgctcgtggcttctggaggctgctggcagtccttggcatgctgtggcttgtgactatgtaactctagtttctgcctctgtcttcatgtggcctcctgctctgtgacatctcttcttcttataaaggctcttgtcatcaggtttaggaacaacctggttgagtcagcctggtcttcatcctgagatctttaacttaattatatctgcaaagacttatttttccaaataagttcatgctcatgggtcctgggtggacgtatccttggtggtggtggggcagtggggcaccattttcgctacacccctggagcagtgtgacagtgtggccttgggagatgagtcacaagggaacttttgttgagataagaggataagtctgggtgagacattgcactggggatcctgggcaaattcccagaagtgtttgggccttggctgtagaggtttttctgagactgaagactcaggacccagctctgaagtgatgatcagggcttcttgataggcaccgccatgttggggatggacctctgtgcccatggtccactcgggggctcatccagggcagtgctatccatcagaaccttccgtggtgatggaaatgttcttcagatctgagctgtgcaacacagtggctcctagtcctgtgtgtctattgagcttttgaaatacccgctctggctcgtgcagctgaaggactagattttttacttctat

SEQ ID NO: 1881761 - DNA, 4001 bp, Homo sapiens
catattccaacccaacccacggcccccatctgcatcttagcctaagagtgtggttcttaaacaattgtaattagtaacatttaaacaggatacgcacaataatagagaaagtcagctggtcatgttttacaggaaatataaaaaacaaaacaaatgaaaacatttaaacattaaatgtaactaaacccactgattggttagttgattaattactacttattgagcacttttaatggaccaggcactgttctatgctttgggattagtttcactgttttatagagaagctctcattaaaggatgaagtcatggttttcttttaaacatttccagtcacgctctatttcggcatctggagaaatcctgtcatggagcagcactccccaggtcaaggcacagcggccttcatgaacatccagggtcacctgtattaagacggtcctccccactaatctcaggctgtggacagtgaaagttacacatgcggccagagcttttattttcctctttgatctttatagtcttgaaatgcctgctctggtttgtatacagtaggcatcgaaaaaaaagagcctactgaattgaaatggcactagactaggcagccacacctaaaaatgtgggagacttataatgggctatcattagagaataaaaaacttttattttatgttatggtagatgatgggaataccaagtaggcatgggtttcctctctggagtattgtgtggttttccacagatagctctctattctggggtatgctggggtggcagtggacactcctacaggctgacagtgaccttcctgagccttctcatcacatcagactatctaggatgtaaaggacccactaagtcgggtactaagaattcaggttaataatctagaggactgaaagatcctctttagaaacattcatactttgtatatgattaaaaaggaaaactagtgatatgctttggctgtgtccccacccaaatctcatcttgaattgtagctcccataattcccacgtgtcgtgggagggacccagtgggaggtaattgaatcatgggggcggagctctcctgtactgttctcatgatagtgaataattctcactagatctgatggttttataaaggggagttcccctgcacatgctcttttactttcctccatgtaagacgtgactttgctcctcattcactttccaccgtaattatgaggcctccctagccatgaggaactgtgagtcaattaaacttctttcctttatacattacccagtctctggtatgtctttattagcagcatgagaacagactaatacaactattatgtcataagagtggaaaagaggagttctttttgctggaattttagtttgctgcgactctgaagttttctagagggaacttaatacattcatatgcattcccaaactagttacccacatgtttaaataacttattttatgtcactttttttcttaacatctgcttatctgcttttagtcacttttaagactcctttgatcctgaggtttatgacatgtttataccctcccttcccacattaattgtctctccttaagtgtctgtaagaagcttggggcagaagtgcaatatacttgtggccctgtcgccctcaggtggtaaagccacaactcagcttggcctcctgactccccccaggattctgccaacaccccgctttcctcaagatgacactgcttctgtcggctactctaagtaatgtatatctcacattgtgttgtaatcaagtttcccttcttcccaatacattacttggtcctggaagatacgaactgcttctcttgctcctctgcgttcaccgtcacaaagcttatcgtgccacactgtggccggtgagccctccaagaaagtcgaagatagaaactggcccatcttaggccagggcagtcccagactcaaggattgttgctggaagtcagggagactccccttccctgatgactcagaacaggaagtgacagcagagatggggcattgtgacagcaatgcctgccagcacccccagcctgagctgatggaggtggggcgggctcctggggatcccaggctacctttccatctccccacaacactgccttgtcaggaaccggcaactctctcctttccttcctctttcaccccagaggactgagttgaaaaattccacaaaaattataatttaatattaaaactttcgtacaccagatgtaagcttgttttggttcagaaggcttgttaagatcttggagtgtggcgggataaacactcatcagcattattctataaatatgcaggagctctagttagggtaattgttgcttgattttaatttgagacaaaattttcaacatctttccccatagtgataaatgaaggatcttcccactccgtgtatagacatctccttctcttataaacagaagcacccagaacccttctgaaaatacaaatttccaattgccaaacttcactatttcccaccaggcattgcctccttgttaccttgtttagtcaagggtcatttaagctctagcaagggagattcgtgttcatttcaaatgttaaaattctagctgtttcacaagtcagtcatgtaactatcccccttagttgctaaccactcagcaataaataaggcacaatgaagaatgctcacttttactctccaataaaagttgtgcgagaattctaaacatgcagagtgcattcggttttgtaatgtgcagactaacaagctttgtaaatcaactctaaggtcagtacctcatcgacttccttaattgagcggaggtcgagctcaggttctgcttgccgggtgcccagtgaagccgacagagcctcgagtgcttgatcactcattgtatcctgttaaaagtaaaaaatcctgtgcatgaaaaaagacatctctggagcccgaacaatccatttacttctttgtaaaatacattttagattataaactgaatatggattggggaagtgctctagaaaggcaattttatttgaaaccttgcaaaagagagaaaggaaaaagaacttaccaatgagtggaaattggggctaagacacgtttctacagtaacagcgttctctggggcacacttcaccccttatttggtaagctagacataaagctatagtaatattactataaaatactctaaacaaacaaaaaaaaaagaagcaagtagtaaactgttaccacactatttttctttttctaaaaatgtatctctaaaaaggcttctgacaacctaagcttaggaagcagggaagcttgaagtggcccctgctgccttcttctctgaaggcacaatggctgatcgttgtaggaactcccactctcaggggtgtggtactcaccactgttccccagcctgccagataaaaataaactgtccactccaggaggggagaggcacaagctgctctgatagaaaccgttcctgagcattatcttgactgtttgcagaggagacatgtgttcccagccagcacagagctgcaggattgccttttgcgatttgtgagaattatgtcatagtgaaatatagttgagaatgctgggcagtaccagctacttggtgtccctctagtgatcctcagggctcaaagtcctttatacaatcaaacttgaaggttttatgttccaagagtgcaatttctctggtttctgcccttctgtgtatcataatggtgagatggtcttagatgatgactgagacaactgtgctaaaatcattcacaagcagttacagaaacacacaaggcttgcctggagatgatcaacataaccctcattggcttcactattccacatagacctgagagggaaaaaatcatggcttctcatcatgggttatgtgctactggcagtttcctgaatgagctagatcaggctctggaaagcaactgctgtcaggtagactgtgactataccttctccacctttcttttcttctcttggggtggagcagcac

SEQ ID NO: 1881762 - DNA, 4001 bp, Homo sapiens
ctctggaattcagtatccaggacctcacctgacctggtgtttccacagagatcccaattacagagtggacccagagggaagggaaaatcccgcaaacgttgccaaccaccattcctgagctgaattcaccttccctccccgcagacagacacttgcaggatttagacaaaccacaactgtttattggtgaaagactcagcttcctcatgtgctcgctgcaaaataaataaaataccagatgctagtatcgtacactatttacaacctgcagctgaccaagcaggtcctgaagccttctctgtggaccagtactgcactcttctgaggctacgggagaggtccagcagccgggccagggactaaaaggaaacgaaggatctgttttatttcgagctcgggggcaggctgcacttctcgcagatctgaacgggcagcatgtgagtcaaggaagtactgtttatggccaccagcagctgcaacttgcccatacagtcctccagcgccgcctccgggtggtctcccagtcgcaagtccacgggccgcgagacccgcagcatgcggtccgccagcgccaggcagcagatcgccaggagggaaggggagtagctggtgaaggcatagtcggccagactcagctctgccaccccccgcgccagggcttgcgcttccagagcttcggaggcctcagcctgccccgcctccacgcgagcgtgcgtgaaatgctccaggaagaagctaatggtgggcgcacccagggtgaagtgcagcttgtgcagcacgatgcactcgaggttgcagagctgctgccgggagaaggcgccgcagcagagggccagaagctgcttcacgcgcggcgggtgcacctccacctgcaacacagggcgcactcaaccccgctttgcggcttcccgggccccaggcccaccccagtatgacgcccggactttccccatcccttccagagagacagccggggctctgcctctccactgcttccacgtaagtgacctagagcgtacttccagcgcagttgatctaactactgtccaactaaaaaaaaaaagcttgggaaattttgaaggctttttcggaggctagactagaggtgccaaaagagctatttgggactgattacagctattagtctattaggctatttctttggaagccgagtgacaggatttttcgtttgtggagaaattgtgaagttaaggctaagggatatatgcgtatgcaaatgtctgataaaatgagttctgggaacccagcactgaatcgtgcgcgctggaaagacgggcggccagggagtggcgggggagtttggctgcgtccccagatgccgcgtgtacctgtttgataccccaggtacctgtttgcaagcgatgagcaaggaggtgaccccaagcagctggaagcagtctgcagccaccggcgtggtggtgaggaagcggtccagagtgttcaccgtcaggcacagcgactcgaaggagaggccgaattggcggtgcaccgggatcagccagctgagcagcttacagcgggattccgccgtcacctgccgggaaggaggggggaggcgggcccgctgggcttagggtggagagggactgtggaagggaaggaagggccaagaagaatcggggagcttcccaggagaggggcaagaagatttcagaaagagaaacgcaatggaaactgggaaacgcgtgggccgtgctgagccggaacaccgggattgggacctggcgctgtgcagagagcgtcgtacacgttacctcgcgtaatgggctcagcaattcaaaggaaggggaggggttccattttgcagatgaagaaagaagctcaggggtgttaaataacttgcccgagttcggtaggagtccagactcaacccggaaacgaattcctctctaccgtgccccagtagccagcttgggacggggcaagtccctcaagccgtctacgccccacttttctccatctgtaaaatgaggccggtgacgcccctccacggccccttgtgcttcgactcggggcgggacctgggctgtcgcgggcccgggcgctcggagggccgagccggcaggagaggagagagcctgggaggagaggaagagcggcggcgtggagctggctctaccagcacctcacttgtggctgccgtgccagcgcctcccgcgggtggaagtggctctcctgcgccttgcggaaggcgtagcagctctggccgtagtcgcggaaggtctgtagatctagctgcgccacgggctgggccgggccgggcagggggctaccaccccgcgccgcagaggggctctctgcgccgtctgagccggagctgggggactcgaacaggtcgcaaatgccggagtctcccgggagcgggcacgggttcaggggatgcagcggctgcttcctccggaggcgcggacgcctgctcttcttcaccggggcgcgaaggttctggtcgttgtcccgcctccccgctcgggcggcggggctcgaggggctggtgggacagggggtcaccatgatgcggccgggtggccgctttactaccttcaacgcccgggctgcggcgggcagcaaacgcgcactcgaaagtgcgaaggaggccgggctcagaggctggcgcggtcctaagtacccggccggctccttctctctaccacacccccggcctctcactggctgagcccagagcggcaccggagccgcgattttccggctggagaaccactcgcctcagggcgcaggcagcgcgtcgcctccgcggcccgccggggggagggggagctgcagcgcgcgccaggcacccgcctttcgcgcctgcgtcctgcgttacctgggcaaccggagcccgggtcgctgcgggagcccgggtcactgcggagcccgggtcactgcggagcccggtgcacggagtgggagtagggctgcggcgggcgcagccaagcggctccgctgcgccggttaaaacattctcccagggggcatctctctgtccttggccagatggtctcgacacgtgcgggcacctctaacccaggtcggtaattttgtaaaggtctgatcctgagttccaaacgaaagtcgggctagaattctgtcgacacgggaaaagttttcttcagtgacccaaacaagcaatagtgttaattcggttgcgtttgtcggttttgtttcggtgggtaccggagtagccagtgcccttccttccgccagcctcggggagcagagcctcagaagggccgtttgtgctgcggaatagattggagctccaccagccagccacgctttcgcgctcaaaacaaaacggaaaactgccggatcaacctcagtcggcaagcaagtctgcaggccgtgaagactttctcccacacttttcaccccaagccaagcaagctggggctacagcggtttaagaacattgttggaaagttgcatttcgagtttgatcgaattgctcacagcctgttccgttttaggtcattagcttctggccttctgccccgccggcagcccagtccttggtttttccctgcttcctgcgtccgctccttcagggtgataaactcagggaaattaaagctggaatggggacgcccaggccgaccgggcgtggcagtttcctcaaggcgcctcgggtttagtccacagactcccgtcctggtagaagctggagcccttctgtggcctgagtgaatcttcctgagggtctctgaccctataggagaaggggctgcaggagcacaagtagcccataatcaacctcacaggcacttagcaacggcagaaagctcaggtaccctcaaccctggtgttttccagaggcgaggctactgggtgccaaaccaagagcaggttcagccacctaacctcattccagaagaaagctgataaatgtgtctgctcaaagtacaagtttctgtctatgaaaatttagtagatggtgggatggtgtctcctagagatgcaggtgaaagaaaaggaatggattt

SEQ ID NO: 1881763 - DNA, 4001 bp, Homo sapiens; identical to SEQ ID NO: 317778

SEQ ID NO: 1881764 - DNA, 4001 bp, Homo sapiens
tcaactactaatctttattggacataccgctacaaaaagaaatcggtatgttcctttgcttccaagaatgaacgacctacagtttaaaatgcaatataccactaaaaagaaaagttttagttaaatgcgccctctagtggtatgttatgtgtaagtaccttgcatctaccaaagataaaacctcttcatgaaatgtcactaccctgaaaccagctggttgagatcattacagtatgggcagcactaccacacatcttttaggaagttccctatcttcaagagctggaagttgctgttgtttgtttgttgtcttttaaaactttctccaccatatgaactacggtatttgtgatatgtaccataccaaatctcaacattcctacaagcactgactttaaaatcccttctcttaaagaaaactgggccactttctagtttgctttaaacaaacatcgcaaagtacttattcttcatttacttaacaaatacgagggccaggcgcggtggctcacgcctgtaatcccagcactttggagggaagaggtgggcggatcgcctaactcaggagtttgagaccaacctggccaacatggcgatatcccatcactactaaaaatacaaaatctagccgggcgcggtggcgggcgcctgtaatctcagctacttgggcggctgaggcagaagaatcgcttgaacccgggacgcagaggttgcagtgagccgagatcgcgccattgcactccagcctgggcgacaagagccaaactccttctcaaaaaacaaaacaaaacaaaacaaaaaaacaaatacgcagtgagcaccaaggatgtaccaggcaatgaggatacaataaacttacacaattattgtgtaattacaaatgtgaaccgtgtcataagaaagtatagactgccgtgagcacacagtaggggattggtctagtatgggggtagggggctggaaggctttcttgagaataaaatacttaaagccttgaagggtgagtagaaagtaactggaagaagaaaaggagtaccatacaaagagactagcaaatgtaaaggcctggagatggcaaggtacacacggcatttgagaaattgaaaaaatgatcctatgcacggagctcaaaggagagactgagcaaggtgaggctagggaagtaggcagggacttcataaggagttcgaatttcatcctaaaacaatgggaagcgaagggagagtttaaagcagtacagcagtactgctttaaatgtaatgatttacattttcaaaagttccgttcctacgacacggaaaatggatttcagggagttggggcagaatgaatccccagaccagttgtagaactacaggtacaatatgggacaagggaggaggtgccaacagagataaaaagaagtggacaaatattcaaaaggttaaatggattgagcaaactgttgagagtagtggtcctggtaaattgcattttttcactaggcacagctggtggtggtatccatttgcaagaagctacagaaaatgagccgtttggaaatccagggttttcctcttaaaaagagaacttgtttggctacaaagtgttaacattttaattgaatgctcaacgagcactgaaggggggacatgaggcactgcctctcacccaagagagcccccaaatgtccttttcagacttttatcacagtgacccactcccaccgcgcctttaccttgcctctgcctggaatgtccttaactccctcttgccggcaatttcaccagatttttgatttcttatccagtctcacgggaagcctttccggcatctcccaccctaccgatcttcccgtctatctcgcctgctacactgtgagttcagacagcacggattgaactcttcatcttttcgtgtcggcgtcctgcacagggccatcccatcactaagcgcgccacaaactcagcccagtattgacgcccacgagtcgcttgtaaagaccgtctgtgacgccggaagtgacgcgctctcgggcactatgtgcttccggtctccaataccgcaggagggcggtcttccccggctcgccaactcggctgctctgggggattcgtgcgcggtaagaagctgcgcggtagcgcggtgaggtgaggttctcagccaccaaagctgcagggtctcgtcgttcgttccctctggcctggcggaacttgcgtgggaagctgggaggacagaaggcttagccgctgggtccctgagctggctggagcgcgggctgtctaggggcggcgacctcagctgttgggctccggctgctgggggctgtgcgtccagccgccctggaatccgcctgtgggtgggccgcttggctctcccacttcaccctcttgataacccagagcctcccccttcccacgtacgtaggggaaggataatctacttccttttgaacagcttcggtccccactatgacagtcgcataaacttcagcgaagagtgcgctggtaaagtggcatggagtttctcacaccaattcattgggtccacccttcagcttctgtggaaggggtctttctgttactaggagctgagacttggggggttgccagggatgctggtcttaaaaggtgataatttaggccgggcgcggtggctcacgcctgtaatcccagcactttgggaggtcgaggcgggcagatctcctgagctcaggagttcgagaccaccctgggcaacatggtgaaaccccttctctactaaaatacaaaaaattagctgggcgtggtggcacgcgcctgtaatcccagctattcgggaggctgaggcccgagaatcgcttgagccctggcggcagaggttgcagtgagccaagatcgcccactgcactccaggttgggctacagagtgagactccgtctcaacaacgaccacaacaacaacaaaaaaggtggtggcttaatacagccatgctccccttaagaactggtatagttatgagaaatggttgggccgtttcgtggttgtgtgaacatcatagtgtacttgcacaaacctacacagctgggccgtatgggatagcctgttactcctagtctacagacctgtacagtataactactaaatactgtaggcagttgtaaaaggatggtgtgtatctaaacacagaaaagatactgtaaaaatatagtgtaaaagaaaacatggtacagctgaatagggcacttacgcatggagcttgcagggctgtcggtagctattaagtgagtcagtgagtggtatgtgagtgtgaaggcctacgatattatttagggtattactgtacactactgtagactttataaatgcggtatgcttagtctaagtttattaaaaataaggtaataaccttagcttactgtgcttttttaactttataaacttttaaattaattttaactccttgaccttttttttttttttttgagacggagtttattctctctgtctctcatttttgagacagagttttgctcttgtcacccaggctggagtgcagtggcgcaatctcagctcactgcaacgtccacctcttgagttcaagcgattctcctgcctcagcttcccaggtggtgcgcgcctgtagctgggactacaagagtgcgccaccacgcccagctaatttttgtatttttagtagagatggggtttgaccatgttggccaggatggtctcgatatcctgaccttgtgatccacctggccttggcctcccaaagtgctgggattacaggcgtgagccaccatacccggcccactcttttgtaataacacttagcttaaaatgctaatgtgttgtatagctatataaaaatattttctttattcccttacattattctatagctttttcctgtaaaaattttttttgttgttataaactaagacacacacattgtgcctacaccgggtcaggagcatcaatatcactcttttcttcctccacatcttgtcctactggaaggttttcaggggcagtaacat

SEQ ID NO: 1881765 - DNA, 4001 bp, Homo sapiens; identical to SEQ ID NO: 317815

SEQ ID NO: 1881766 - DNA, 4001 bp, Homo sapiens
ggctggtctcaaattcctcacctcaggcgatctgcctgcctcagcctcccaaagttctgggattacaggcgtgagccaccctgctcgactttataataaacatttttaaacaaggaaataaataccctgaagaatagcacatgatctagaattcctagatttgtagttaaccattgggtttgacagtatttttaaaaaataagtagcatgtgtttcttttaaaacaactatatttcaagaaaacaactaattattttctgaaaagaaagcatacttgttaaaaattcttttctggtccaggaccagttttgttggccagaacaggaataagacagaaaaatagccgtggttctgatgacctgcagaatgagttattcagttctgtggcaacagaccataacttgtaactctaactacatcttctgaaataagtatgtttcaaagtaatatgagtgaaaatccacaatttttgtttgtttattattaactaacattcatactttcttcagatttcctttgtttttaacttaatatcctttttctgttccagagtcccccattacctttagttgttatgtctccttaggcttctcctgtgtataagtccattttcttttcttttctttttttttccggggtacaaaaggtttattgcttataaaaataagttaccaaaccccaagccccacaaaacacaagaaccccgcatgacgatacccatgaacacaagggctcattctagtaatagctcgcggaaacgacaagacaccagcactgccgacacacacggacgaggagcatgctgcacagcttccttctatcaggttctagaaaagtcttctttgccttcagtccactggctagtgggaataattagtctcatcagccacagggggggtctgctcctcaagagtggcctcagcacacatggcgctgaaagggaggagcggctgtacacatctgggcagtgaggaaccagctgagccttctgtgggcttcctgagtgtctgggaagttgccgggtggggtctcacgctggggccagcgtgggggcttactgccggcaggtgtcatggaaggcttcgagggttcggaaatccctccatgtcgggggaaggccgtcctgcagaaacttcccgcagtgctggcatggggcctggaacagctttatgtaacttcttaaccaggtcatgaaggatcggactacgacatccggcatctggggcagctgatagtggagcagggccgtggtggcgtggtctgtcaccttctggaatacttgatagttggatttggaccatatatcaagcttgccatcttctgtgtagacattctcgttatatccctttactattgttcgatcaatgaacaggctccgcatgatgacgatcactttcaacacctttcccaaggtcaccagaagcattgctgatgttccattgggtctggataagtggatggacatttcaggaaacatcctgtcaatgcggctgatcacatcatcaacatattgaggtggtaggacaagagttgtgggctgagcctttggtctacttttggcagatactcccatctgattagcggaacgcttcaacgactactgatttaaaaggccagatgctagtcctgcatggtactgcaacttgtttgaccacttatatgcttgaaggagttgactatagagaggagttttgtcctgcacaggatccaggcttaacagcccactgttatgaagaggatggttctcagatggcttgcctaccagattgctcagacgttccagctcattgaggtcccggttgaccgaatgtaagttgtcctggaagtgcgcaatgaaggccttctcccggccctccagcgtctccttgttccgcatcccatccttcaggcagtcgaacaacctgctcacgctggagcgcagcgcctggatggcactaatggcctgggaaaaggcctccaggttcacactgacatttatcacgtccgccatgttgccgccgccacagccaagtccattttcgtactgctgtaaaggcctgccagagactggataatttacaaaggaaggaggtgtaactgacttacagttcagcacggctggggaggcctcaggaaacttacaatcatggtggaaggtgaaggggaaacatggcaccttcttcacaaggcagcaggaagaaatgcaagtaggggaaatgccagatgcttataaaaccatcagatctcgtgagactcaccctctatcacgagaatagcatggggaaacccccctcatgagccagttacctctacctgatcctgcccttgacaaatggggatgatgggaattataatttaagatgagattttgggcggggacacagccaaactatatcatcctgactatgactgtttttagattttccatgtttttgataaacttgaaagttttgagaagtactggccagttatgttgtgggatgtcccactatgggacgtcatctgctggttttctcattaggttaaattgggttatgagatatgaaaggagactagagaggttaaaaaatgccatttttcagaagggcatggtggctcgtgcctgtaatcccagcactttgggtggccaaggtgggtggattgattgagtccaggagttcaagaccagcttgggcaacatagtgagaccccatctttacaaaaaatacaaaaattagctggatgtggtggtgcacctgtagtctcagctacttgggaggctgaagcaagaggatcacttgggctggggaagtgaaggctgcagcgagctgtgattgtgccactgcactccagcctgggcaacagggcaagaccctgtcttttaaaaaaaaaaaaaaaaaaaggagattacaactgaatgtcagagtggatttagaggaagttttcattatctagaatatctagaatatgaatgactgacaatacataatatatatgcattattaattttcaaaagagtaaaacatttttaaaaacttgcctctactgttatacacactatctttatatatatgtatgtatatatatatataatttacaaggcatttcaggactttgcagtgactgcatcaggatcatcaacaagagtgacaatgtaattaaatcagtaagcaatagatgttgttgacttgagcaacagatagtcccacattttactaaagacctagaaagtataaaaattttacataaatttatgctaactatattactactagaaattcaataaaataattagctaattttatgttatcttgtttactgaccccaacccctgtcactctcgaaaacgtggttatttggatgttttcatctttggaatgttggatgtataaggaattattctgtcactcttcccaaggatcttcagtgagtatcgctatagacattgcaaatatgagtgtccttagagcactgaaaaagcagctctaacaagaagaattgctaaaaaatagtattgggtacaaaaggacaatgggctctcagctgatggtctgttcttgagggactgttttcctgcttaacaaacaactgtcttaacaccaagaactagtgatgtgtaggtttggatcacagctaaagaccaaaattgttaacaattaggagtttgtaaaaagacaatgagtaggctcttggtatgagcaattttgcatatgaaactcacggctataatcaatgggtaggaggtgctctcagtctgtcatagtacgtttagactggcataaaaaaataccatcaactgggcagcttacaaacaacagaaatgtatttctcacagatctggaggctgggaagtccaagatcaaggcactggcagattctggtgaggagagctttctaatttatagacagtgccttcttcctgtgccttcatgtggtggaaaggaggagcaagctcccgtgggccgattttataagagcactaatcggtaatcccagcactttgggaggccgaggcgggcggatcatgagttcaggagatcgag

SEQ ID NO: 1881767 - DNA, 4001 bp, Homo sapiens; identical to SEQ ID NO: 317832

SEQ ID NO: 1881768 - DNA, 4001 bp, Homo sapiens
tatctcgtggggaggcagggagatggctgtgcatctggaatagttcagccgcttcccttccctcccatctcatcatctgggggaaaagtgctcttggactggtggtgtagcaccgggtgctgggcaggacccagattttgtgtttgtgtttacagttttcttccaaaacttttaaggtgtattccaagattttgcgttctgttcttaacagtctctctgcatttctcccccactcccacttgtctgagcgtaattcctattaggctcaccccaactccatgagtgagaacgcttgcctatttggagagggcctgaattgttgcatgactttggacaagtgcttcctccctctcaacctcagattccccattaggacagtgggactaagaacccttccatgcctgtctgcctacttcccagcattgtcagaaggctctaggagacagtgttatgtgacagtgctttagaaactatgaagcagcactataagacttagagttatttttctcttctggctgcaacagcagggatgggggtggcagggagggtgagtgtgcagctggaaaaggaattcaggaagatgaggaggcaggacagacagaagagccgcccagcgaaaccttcccctggtcacagaggggagcgcggttactctgctcatatgaaggacgcagactcagggaaatgtctgtcttcctgtctttctaatctgaagcttactacatttccagtcctagctgggctatttcttcaataacatgacttccctgtcattatagctcagacagggtaactttttgttttgttttgttttagctgctatttcactttgatccttcaacctcaaactatctcagacaagtccttccttgatgttttcttttctgttccatttgtcccaagccacatgcaggagttatttatcttgcgtcttccaaaaggggaagcaagaagggagatttttccacttaagcctggggaacaagtgaacaactgtgtgaggggaggaacattccacaagctgcctcaaaagggaagactagactcctctggaagttggggttattgtgaagcaataccaaacccccaggtcctttacatttctgttagttttacttcattcactctgtgcaatagggggtgaggttttgtgtctctttaagcccaagaaaggaccattatgaagtgggctcttcctctgcctgtttctgcttcccaaatgctatagtacaagtgaagacatatgatcccagaggagaccatatgtgtcaagaccagaatgtgcttggggtgtcttaagagcattttaaggaccgaggctgccacttcaaagttcacctagtctacccatttcaattgatagatgggggaaccaaggtctagagagaccaaaagacttgatactactgtggtagaacaagaccccctggcatttaatttcaagctgagtatttttctccatgatgccgggttacctcccaccaccatttggtcagttgagaagtcttggaagaaataagggatgatgagcctgacagggaggttttgggagaagaaagagggaagacatggccactgttgctcctgatggaaggttatttgtgggtagagagagcaggtttgttctttgtggctgcaggggagatggggtagacagatcagaaagtttgagggaggcacatttagatcagtaaaagaaagaactttctaaagtcacttgagaatgaaaagccatttagttagtgcaagaaatgaaatgtctccaccacagagcctctgttaggaatagcattttagttttgaatcctcagaggagatactgctccaaaatcccttatagtcatgagagtattagagtctagagcttggcatttagagaatgaggccttaacagttaccagaacagaggtattttctagatctcagctaacatcccctctgcaacacatggaagcatctggatggtttccgtacaggacctaaagaagtgctgtctcttctgggtagaatggagaaaaatgtggccaccctcaagtttccatgggttacattccaagactattgttctttgttttagaatgtggatctcattgtcccaaactggcaagaagttcctgcctattaacttctcccattgcagagggagtaggaaggagggggaggaggcgacagaggaggaagaggagagattgggtttagggaaaaaaataattttagaatatcagggattgaagggaccttgaagatgatctggtttggcattgcccaaacttaactagttagcccatcaccttagttgaatcactttgcaaaaactttaataaatgtattacaaaagcagattttatatcactaccataaatggaaaaaactctgtgtacctttgtcataaatagaaggaaactgtaaaaacaaacacataaaaaaaacaaaacaacttgattcagttccagctggatataacttcctgtggaagctctgagctggaggcttattctctttttgttaaaaaaggagatagatgagtataaaggaggtgtttaagacatcttggcaccaaactgagactttcttctcatataagcagaattgaaagaatattaaatggaaccaacctcctcatgtttttcactatcatttaacttgtaccatctaacattatcttgcacatatcaggaattcagaaggaaatctccataaggaagtctcaccctcactgaactctcaatctctcctccccatagggttcccagcaccatgagggcctggatcttctttctcctttgcctggccgggagggccttggcagcccctgtaagtacctaaatatcatgtcttcttgttttcattcctaccgctagcaccaggggttctgagcctgccagccctggatgctgaaagggaacagggacttccccatttcaagttagtggtcttttttttttcttaagttaggaagctcgggataaaaactgggatgaggaccattgggtggaggtatcagagaagagagagttccatgtaatgttagataaacttcttagtagtcagagcctcccagcaatgaactaggattgctttagaaggaaatgacctctttgtcatatgaggaattcaagcaggcaggagacaggatgtgggggatttctggtaggggtggtattagaagagattcaagctatagagagaggaatgtgttggcttctgaaacagtgagggttgtttggttgtaagcaacagttcaatctgactaaattggggaaggaggggaagatacagaggtagattataatattaaaggccttggggaggactggaaaagggcagctctaggctttgggagttaagaactaatggacagtctctgagatattgctgtctgaatgaatcaactccagcaattttcacatcttgagagaatgtgccaagaaggtttttataaattcaaaaaatgagagccaatctggctgagcttgggtcctgagccagcttcttggccaggtgagagtggggccccttgattgacagacagttcctcgaagcattgcatgcagggacaggagtagttatccacagctcatctggaagccttcacaaggagaggaggaagaaacagggcaggcaaaaagtgcaatttctttcaacctgtgatcccctcatcctctgtttactaagaagtgggagtgatggcagaccctggcaatcttgatcaggctggtagatggaggcaaaagtttctcaaagttggcattaagttttgaagcagctccagccagctaagggcctcaaagttgtgtgttttcttgcttcctcctactccaagttgaaatggcaagaaaaattgcctaataatactactaataatatcacactgtgaggaagatgatgacatctgttaaaattcacagtgtcatcccctctggatgtcaattttcctatctgtaaagtgaaagaattggtctggatcagtgattttcagactttataagaattcaaagcag

SEQ ID NO: 1881769 - DNA, 4001 bp, Homo sapiens
ggatgattatgatgacaaggggatgtcccagagccactcttgttttgtcctttcctaatacacagaaaaaccaggctgagccaaatatatcaactcatagatggtgttgctttgttttttttttgtccagttagttggtttgtaattcattttatatggatggatagcccttatcaatgacaaggttttgctttttgccctcctgcaagtttggttctgtaatctacaaggtcattattgccaccttctgaggttgcatttttatttttatttttttgagatggagtctcgctctgtcacccaggctggaatgcagtggcatgatatcagctcactgcaacctctgcctcccgagttcaagtaattctcctgtctcagcctcctgagtagctgagactacaggcatgtgccaccacgcctaactaatttttgtatttttagtagagacagggtttcaccatattggtcaggctggtctcaaactcctgacctcagatgatccacctgccttggcctcccaaagtgctgggattaaaagaatgaaccactgcaccagcatgaggttgcttcttaatgctcctacactcagggctagctcaccttctctgccctattttccttccttctcttcattcctgtgtgcaaaaggcactgttttccagctcagaggagcgaaggaaagtgtgtgtgtctgtgtggaggaagccggcttgacgttggtcttgacctgtctaagtctatcctaggcttcagccaaagaaaagccctggctgtggctattctttctcttctccacctcaccatcctctcccccaccagtacttcaggtttcctggctctcatcaaatttgtactgactttccactccatggacttaggtattcaggacctggccaattttggttcagaaaattttctggatatatatagctggagagagagaataagaatacatgtataatgtataaaggcaggtgatactaccagataaaattatcttcttgagtgattcagtccctttgtatcatgccacaaagattatgttcactccatgagtgtgtcataaagctttgagatatcaagagtgaaaacataaccaacctgcctgcctgcctgcctgcctgcctgccttccttcccacaaaacattctgtattgtgcaagcttctctgtaataccaggcaggcagacctcaaagtttttgcgaggcattttatgacttttatccttctccctcatccactcagtgcaataactatcacacacaggaactatagcatgaacaagacaggcagtctctcttctcagggaaccaacagcctagaggcctgcaagccagagcaagtatgcagatctataaaccaggcactttagagtaagtggcatgagaaaatacgacaatgtgaggaagaaggaagaggtaagtaactgtaggtttggagggcaggtgaatgaatatttgagcagagacctgaaggagtaggagccaggcctgctcaaaatacatttgtctttcgaggagctgcatggggccccggctgccctgggccacctatttagcccgggtttaattccacatgagccttcatctcagaacgggcgtaagaggcagaggtcaagcagctgctgaaagtggagtaacccaatcttgggcacaagttggcctttaataagcatccaggtagccctttgaaaaacgaaacctgtggtcaggtctctgagagcagaaggatcgggtttcagttttaattacaaaaccaaagagctgtcccattttgctccatttcggcttcccccagaagaggttttcctgtctcccatcctgggggccctgacgtgcttacctgacacagagatgggctgctctaggtgcagcacacggagcttgagttggccaggcttgcgaaatggtaggatggaagcagaggccccagatgggatgtgagagcgggtgatgaaaagcatgtgggaggtgaggactgggtttgggggttgttggagttcacatttgtgggctatggctcagattatgacatcacagaaggatgggacaactttgaagcccaggagaatgtgcgtgtcttttcttctcccttgtcccctgcacctggcagaacctctgctcaatggaagataaagcgataagatggggatgtggccagtgctagtaaaagaccccttttaatcgctcacatttttggcacttgctatgtgctagacactggattaagcagctaacctgcattattttgcttaactcggtcagtgtttcatacagcagatagtagcgctattctcatttgatagacgcagaaagtgagcctcagagaggttagataagtggcccaggctcctccgtgagtaggtaatggccggggttcatcccaggtctgactgaagagtccatattctttacatctttgcctcactgcctcttcatgtaagctctggacctgccatcataagacaaatgggaagaggtgtcctaccttcctaaaggcattttccaaagtgatttctgaagatatctgatatgggcaactttccagaattagttcagttgttaaaggtttcacggatgaataaatggtgtgggggatgggggttgagaagaggtcagaaggagagacagcgtggagaatgatttccaaggctggatcttttctttatttgattctagtaaattttaacgaggcccttaataaaatcccagtgcttagcagagcctccacatttacaagttgccagacctggggcggaagaagggaagttggaatcctggcgctcagcttagtcctgctgacctttcacagttcaggcgagccaggcttgtaagattgagcactgcactctgagcagagcactcctgcccagatcaagtggccagaatcctcaccccaacacaaggctggtcccatctccttcgaggtggcatccttcaacgggcacacctgaagtggatggctgccagttggtgagacactggaaggaaatacacacagttatcacaggtcagcagagcttcatgccattttgcttcaggattattacaaaataaagtcttctaggcaatcatcaaaatcctcatctcccaatctataagatgccctttcctgtacccccgaaaaatggctttcatcaacaatgaagagttatcatttgtatttgctatttagtagataataaataatgtttataacatatcaagttataaagaataaaaaatgacaataaaagtggttcctaccttctaacacctagttaaaccaaaaaaaaaaaaaagcaagaaagaatattactctgtttttgaagtcccctatgttgaatgaataaatgatatttttatcaaagtgggcagtgctatacagggggcttccccagaatcatactctttatttcctacaagattcatacttaacaacaacaaaagtaccagcttttgtaatagcaaaaacagctgcagcacatttgctgacaataacatcgggttacttttcaagtgtggttgagtgttttcccttccctttgacctgatgtccataagtaaagattttaggatgtgtaaaaccctgagctctgacagagcaggcccctcctctcccccagcaaatgactgtcttgagtgtgctgggcagtgcattcctcagccttcctcctcgggggtctacaagggacctctgatagtctggcctcattctttgcacggctctcttctccataaatcacctccataaatccacactgtcctcattgagccgcggaggaatgaagccatcttcctatttgtagatgggtgtcacctggcctggaagatgataaaccaaagctttagtagctagacctattacaattttgcctagaagccacaagcagtggagacttactatggtcacctctccaaattaaatcttttcatagttctggcttttttacacactggagagtggtaatgtggagtcggacacgccaaaaactccagggttcacaaaggcttctaagagc

SEQ ID NO: 1881770 - DNA, 4001 bp, Homo sapiens
catttattttaattcagttcgtaaactgtttagtgaatgaaatgaaagcaacttctggaaatggcaggagagcagttggaagaaggtataagggaaatgttgggtgtgatgtggattgagggaactggggagtggccatttcgtcagatgtttcgtgagcccatggcagggagtttgcagcccctaagccgaaggtacccattggccccataaggctagcaggctgtctcaccattggcaagatgggctcttctctccctatctatctatcttagtcttgctgtgtcttttcatccctgctccactgtcacatgagggcatgaaagttcatttattcaaaagatgtttattaggtgccaacactacagtcagtaccacggaacaaggagactctagagagataaagaaaactgggtggcaccgactagctaacggtctcatggagaagacaatattagtagtgtgatgtaagctataatacaggccaaaagcacaaagaaagggatacttaactgtatctgctggaagaggataggccacggccaggtaacaaattaaccctgaaatctcatgggcgtaacacatcgcagtccaaatgcatcgggcggctcttcttaatgaggacttgctccagttgctctgtcttgcgatcctgccatcttaagcacaggctctgtgcagttgctgcagcaagggaagagagtttgggtgattcacgagagcttaataagcaggcctggatacggcaggcctcacttccacccaccctggtgagaacactatcagggaacctcaactgaaccacagggaagcctggaaaatgttgtcttttctgagtgcctaagaagaagaagatgaacaaagacttggtaagcacgtagcagagtgatcaggtctcccgtttgacaagagatcaggaagggcttcacagaggagctggaatcatttctgtagagtagtaagaatcagccaggcagagatagggaacagaggtgacaggacaaagaatgtcgccagtggaaaggccaagaggccaaaaagggaatggcatttcagaaaactaattcagtgtggcagtggatgtgttagagagtagggtagaaaaagaagatgcagccagagactgcacatggaaaagaacatggtgccaggctaacatttatcctgagggcaatggtgagccctacctggacttcattagcagagtgatgtgctgggatgtgtggcattagaaagctctctccagcctgggcacagtggctcatgcttgttttcccaacactttgggaggccaaagtgggaggatcattttcgcctaggggttcaagacaagaccagcctaggcaatatagcaaaaccgcaatatagcaaaaccctgtctctacaacaacaaacaacaacaacaaccaaaaaaaaaaaaaaagtttaaatagccgaccatggcctggcacagtagctcatgcctataatcctagcactttgggaggccaaggcaggaggatcccttgagcccaggagttggagaccagcctgggcaacatagggagaccctgtcatggtggcacatgcctgtagtcccagctattcgggaggccaaggcaggaggactgcttgagcacaggagtttgaggctgcagtgagttctgatcatgccctgtactccagcctgggcaacagagcaagaccctgtctcaagaaaaggaaagaaaagatctctctgacttcctcaggtatggaggaagacagatgagaaggggacaagatagatgataggaggagagggacagtaaggagggtgctgcattagtccaaacaagaaactaaatcactagcagcgaggaaagaaagaaggtagggggagagatttgagagatgtctagcacacgaggacgaggattgggcaactagcagggttgctgtgtcatgctcaccttttgacaggctctccccatgatcatgtaaactgggaaggctgggtggccgtccacgctttgtgggctctgtaaaagagagtggctgggagctgaaacccaagccagagatgtaagattctggtggccccagccctgcctcttggaatggagaagaaactaaatgaactttgaaatgcagccacttaaccagctccatgtaatcactgctccccatgtggagagcagggatttggagagaatgtgtgggtatcatgcatgaagcaaatagcctgaacgtccccgggactggcaagctcctgggagcctggtcagctgaggggtgtgagggcccaaggctctgaacattcctggagtttagagaagaccaacaatctcagtgaagccatcacaatagaacagtgcccagtgaaattccaacccacctaggtaccctttcttcccacaatcctccagacggaggcatctcttagtggaggaaagtatcagtggctcttccttacagcctggggaaatgtaagatgatggcggatggatagaccgggaccacatcctttcaccaaaagctttgtaatggagtgttagtcccttcattcctgcccaaactcagtgcagggaagattttcattatgcctcccaagaactcctcaaagaatctcctttgaaagagtcctccccctccttcccgcattgtcctccattcctttcttcactcactctggccttgcaaaaacatgaagcaggccgggcgtggtgtctcacgcctgtaatcccagcactttgggaggccgaggcgggtggatcacgaggtcaggagatcaagaccctcctgaacaaaatggtgaaaccccatctctactaaaaatacaaaaatcagctgggtgtggtggcgcatgcctgtaatcccagctactcaggaggctgaggcaggagaatcgcttgaaccagggagtcggaggttgcagggagccaagatcgtgccactgcactccagtctggcagcagagtgagactcccatctcaaaaaaaaaagaagcagttacatcatggcatctgtgagctccataagtgcagggaccaggtcgcccctgtatccctggtgacaagtgccatgtggtgggtactcagacaacaggtgacaaagaaagatgtaataactgtgccttctataggcgccttcttaatgtgtaaatgctcccccaccacagtgggtataaattcacaaatacattgcccctacatctgtctggaatccttccactgcaagagacaggaagtgcattcagactaacttagaagagtaggcgctgtcttacctaacagggccaccacaagggagaagctggcctcagagactctaagatgtcattaaatggtgtactagtctgttttcacgctgctgataaagacatacccaagactgggaagaaaaagaagtttaattggacttacttacagttccacatggctggggaggcctcagaatcatggcgggaggcaaaaggcacttcttacttgacggcatcaagagaaaatgaggaagaagcaaaagcggaaactcctgataaacccatcagatctcgtgatacttattcactatcactagaatagcacgggaaagatcggcccccaggattcaattacctccccctgggtccctcccaacacatgggaattctaggagatacaattcaaatcaagatttgggtggggacacagccaaaccatatcagatggacgtctctctttctgtttctcacagcccccttccatcccatggcagggtttctctctcggcagttgacctaattttctcctacagtagactaatgtcctcttcacattgcgggggtggggggtggtcaggcagacttagccaaagttgactccaggcttacatcatcacagctaagtgaacccagaggaaaaaggaaggtatctcccccagcatttctatttttcataaaatatctcatggaagaaagattgacctggcagagggagttcacattcctgggcaaatcactggtcagggagctggggatctgtgatgagtcaggcaggcacagg

SEQ ID NO: 1881771 - DNA, 4001 bp, Homo sapiens
aggataaaatcaagaagtgcttaaagatggaaaaaattgagtgaaaattatcattaaaatctgggtgagtcatacgaaactcaaatactagatgatatagtaagtttaaatgaactaacagaggatgatggaaaccatgaagtagaaaggacacacagatagctgttaaattattagagtatactgctattattttaaaaacaagggttaggggtgaatgttatttttattcaaatttttacaattattttactcaatgttatgaagtttgtttatagtgatagcatgtagatataatttatttgcaatttttctagtattcatttgcatgaatgctctcacatttattatccactctctaatggttttcagtttttttgttctgacaaaataatgcaaatatacattttattttaaagtacgttttattatagtatgcacacatgaggaaagatctctaggacatttatgtgaaagggaaattctaggctccaggtatatatatcttcaactcgaatatgcaaactacagaatgatatatacagtaaatgacatttttgtaaatttttaaaatatgtaaactttatatattttctgtgttggtccagtttgcattgctataaagaaatgcctgagacttggcaatttgtaaaaaaaaagaggtttatttggttcatggttctgcagactgtacaagaagtactgcaccagcatctgcttctggtaaggcctcaagaagcttttaatcatggtggtaggcaaacagggaactggcataccatatggcaggaaagagaacgagagagagatggggggaatcccagactttttaacattagatctcatatgaactcagtactctcgggagggcttcaaggcattaatagggatccagccccattaccccaacgcctcccataaggcccccctccaacagtgagaatcatgttttaacatgagatttggggaggacatctaaaccatattacgtgcatatcaactaaagatacaaaatttgatcaggaagtgcaagaataaatatgaggacaatggttactctaaagaaggagacttaggccaggtgcaaaggctcactactgtaatcccagcactttgggaggctgagatgggtgaaccaccagaggtcacgagttcaagaccagcctaggcaacatggtgaaaccccatctgtactaaaaatacaaaaattagctgggcacagtggcatgtgcctgtaatcccagctactcgggaggctgaggcaggagaatcacttgaacctgggaggcagaggttgcagtgagccaagatcacaccactgcactccagcctgggcgacagaatgagactctgtctcaaaatatattaataaaaaaaaagtaggtgtttaatatttacgcatgtcataaatttgaaatatttcaaagtaagattaaaataatatcttttcaaaatgatactgttcattgtaaaacgtttagaagtcaaaatgaaagtagtagatgaaaataaaaataaccttccatttcaataccctgaataagaactactaatattgtgtccggaattggtgggttcctgatttcactaacctcaagaatgaagccgcagaccctcatggtataagtgttccagttcttaaagacggtgtgtccgaagttttctccttctgatgttcagacgcgttcagagttttttccttctagtgggttcgtggtcttgctagcttcaggagtgaagctgcagactttcgtggtgagtgttacagctcttaaggcggcgcgcgtctggaattgttcattcctcctgtcgggagttgttcattcctccctgtgggttcgtggtcgcactggcctcaggagtgaaactgcagacctttgcggtgagtgtcacagctcataaagggaatgcaaaccaaaacagtgagcagcagcaagatttaccgcaaacagcaaaagaacaaaccttccacactgcagagagaaactgagcaggttgccactgctagctctggcagcctgcttttattcccttatgtggtcccacccacatcctgctgattggtccattttacagcaagctgattggtctgttttacagaggctgattggtccgttttggcagggtgctgattggtgcgtttacaacccctgagctagactcaaaagctctccaagtccccaccagattagctagacacagggtgccgattggtgtacttacaaaccttgaggtagacacagggtgctgattggtgtgtttacaaaccttgagctagatacagagtgctgattggtatgtttacaaaccttgagctagacacagagtgctgattggtgcatctacaatcccttagctagacataaaggttctccaagtccccaccagattagctggacacagggtgctgattggcgcattcacaaaccttgagctagacacagagtgctgacgggtgcatctacaatcccttggctagacataaaggttctccaagtccccactagactcaggagcccagctggcttcacctagtggatcctgcaccacgtctgcaggtggagctgcctgccagtcccctgcggtgcgcccacactcctcagcccatgggcagtggttgggagccagcggctggcgctcatagaggaggttccagccgcgcaggagctgacggcgcagggcaggctcaggcatggcgggctgcgcgtcccgagcccttcccccgggacgcagctgaggcctggggagagttcgagtgcagctccggcaggccagcactgctgggggacccggcgcaccctccacagctgctggcccgggtgctaagcccctcactgcctggggctggcggtgccggccggccaatccgagtgcgcgcccgccgagcccacgcccacccggaactcgcgctggcccgcaagcgccgcgctcagccgctgttcccacccacgcctctccctccatacctccctgcaagctgaggtagccggctctggcctcggctagcccagaaaggggctcccacagtgcagcagcgggctgaagggctcctcaagcgtggccagagtgggcgctgaggccgaggaggcaccgagagcgagcgagggctgcaaggtctgccagcacgctgtcacttctcactattttggtatgttttccactagacacacacatgtatacgtagattatattttgtatcatgttttaagatgcacttctgttttacttaacaacaaaaatgttactaaactttgggtttcagtttcaacatgtgaaaacctcagaggttatctcccatcctttaaacagacaaaagcagaatgaactaaaaaccattgacttttcttggactcatcagagaactggtgttgcagggcaaacaccctagtgcaaaatctagagagaaaagagaatccagagagtcatagcctgatctgtatactggagcagaccctactgcagccataaagtgctaggaacacataaatggtaattgtaacaaattgttgtagatttaacgtagatgagctccagagagtgaaactcctggaggccataggcttagcagctctctacacaaactcacctccacggactctactaggttcttagtgcagaaacaagagtctctcatggctctggcaggggaggggaggagtgaccattgtaaaatatgcccagtgcattcttcattatgaaggtctacccttcaggggaaaagacttcaccagaaacttctctcacatgaggaaacagaacttccccaaactaaggcccttggaggagtgagaggataggattctaagaaatacattgtgaaggtcacagtctggggatacatggccactaaaagactaagatttaatcatgtaattatagaatgctccccctgtctgatactttttcaccacatcagcaaggctctggtataataacagtgtattaaaggtgaagaaaaaaagctggaagacacagattttacctgaggataaatttttagg

SEQ ID NO: 1881772 - DNA, 4001 bp, Homo sapiens
ggagccctcaaagctatccctaccttacctctgcacctacgctgatccctctgcctggaacgcccttcctttaactacttgacctttacttttcaacccatgaggctggccaccaaaattagaatcttccacaggccaaagcctccactgggtggtgagaatgcaacacttagcagaaacagagcagtccttgtgaggagacacctgagggataagaagaaccagtatacactacaccaccgctgtgaaagcatgaaacaaatgtgacctagacctgagggtcccagaggcttccctgaacaggcaacctaagctgagaccccaagaaagcttagattgaaccgagagggttggggagggatgtgatgggccttccaggcagaacaatgtgtgttctgtgtgggagagaactaatgagtttggaggaagagcggaggcccagtctggccacaaacacaagagtatgggacacgccagaggaagccacacggattttgcagggagacagtaaggattttgctcatcatcttaaagtacgtaaagtacgtgggaaagcctcctgcacagagttttagctggcagtcagcaggccctctggtcctggccacgcacctttccctcagcctcgcctcagcattcaagggaaaacctgccaccgcgcaagccctccagggtctggaatgctggcaggaggggatggatgcctctgctcctggagaaaagggctctggcagggaagcctgaggggctggttccaactgtacaggtcctgtggactcctcagaaaaggaatggtgagatggattttcataggagagcctctccaatttctccttgggacttttttttttttttttttgagacggagtctctctctgtcgcccaggctggagtgcagtggcgccatctcggctcactgcaagctccgcctcccgggttcacgccattctcctgcctcagcctcccgagtagctgggactacaggcgcccgccaccacgccctaattttttgtatttttagtagagacggggtttcaccgtgttagccaggatggtctcgatctcctgacctcgtgatccgcccgcctcggcctcccaaagtgctgggattacaggcgtgagccaccgtgcccggcctctccttgggactcttaccttgtatggaatggaagtggtgcctctggggtcccagacacgggagagaggaagcagcccaggggctgggagaagtggtgagacccagaagaacggtggacccagtcaggaagggtcctgccagcagggcgtgggccagcctcggggtcttccccaaaaggcaggtaggggcctccagcaagcttcccacctccgtgaggctggagaagaggccccctggatgagaaggaagaggccggcaggtccggcgggcgcaggcacaggtagacttctggtgggaaaagcgtgactcagcctcctccagcggctgcaggacgtccccccgctagaaagggccgggctccctttgctgacccagagtcaacccagcgattcctcccggggaggcggggggccccggccccggcccagagcgcatgcctatgccgggagctgggcgaggacagggcacagccacagctgggtgcccaacgggaaaggcggccgttccccctcaagctgcacctgaaggggtccccagggtcgaggccacttctccttcggctcagggttgaccttcagtgaccactgtggcctgcgggcatcccctgggagggacggagggggatggaggaaaactccaaagggaaaggccgaatcctgcagggtctggtcgtcggaaagccaaccatacagtcagccctccctctcctcgggctgccgtcgccatccgggtccacacgggctctaagacaaaaccccaattgcccccaaggccccataggaggggcgctgccagaatcgcctatttttagtgaaagagaaccgggccgggagacggcggcagggggccggagcattcccgaggtctcggtctgggtgtcgcgaggcagggaaagagggcggccccggagcggagcgggaaagggggcggggcagggtggggccggacgtggcaacctcccgcttccgggacagtgacccgcggcgcggcaaggcctttcccttgggcgtgggtggggacctggactccctgtggaacgtttaagaaaaagagaaccgaatgaggtttcgcgaaaggaaaaaaaatgtaactgtgatctagtgctgttgacggccgcgaatggagaaaccccgtgttctcgaggacaaattggaactcctcggcgttttaggtcctcaacccgggaacccctcgcaccgcgaatctcagtccacagcgggaggcgggtgtggtcgttcacctatttgtgcccgagggctcagggaggcgctggcatgacccgagtggggggcagcaagctggttagcgggagggtgaaggcagcggtcttccacgaccaccacaatcacctgggtagggattgagtcccgtattggaaaagcgaaagaacagtcagctgggggtgccaaggaggcaggtgatgtatacaaacctggagccttaggatggtccacaggctgcggaggaccacagccaggacaacgtcccggaaagcccaagggagactgcggcggaaggcaggggaacctgcagaggaccaggagagcaagctgtttcagggagggatcctggccttccctgcacacctgggcgtctacagcctccggcagctctgccaccctccctcgcctgtcttctgcctttacgcaggctttctagcagacattgccaaggttcttctccaggccttcaaggccctaggttaactgcaccctccatttccctgctctgtcctcagcccctccacactccagctcagtacgttggcactaactcttccctccgattgaaatatttttcccccatttgacttccctccacaggaacattattctcccatatacccgcagggctctctccgtgtctctgttccaatgttctcccctcttcgcataccgtaggaagtaaactgcaaataaaacaaaccagggtcccccctctgtcttgttcacagctgtgtccccaagacctaaaataaggcctggcacccaagaggtgctaagtttcacaacatttactctgccttgttcagggcgctttacatttgcttcttcactttccacaccaccatgtaatgtagatactaatattatttccaatctcatttcacagatgagaaacgaaagttgatagatgtcacaaatagaaaagtatatacttaggtataatgccccctttattttgcatagatgttggtggctgctatcatcctgatctgtgcccctgtttaaaactacttgaatagacatggtgccaacactgtctcttatagtcagagatgggtgagaatgggagccattacttatttaaattcctgcggtcgagcggaaggcagaaggacagttaggtatccgtgttccaccgcttccctgtctgggcacgtccttcagggcacagttggacccccagacccctgggcttttgtgtacgctggctgggcccagagagagctttccactagatgtccccagaagtcagaaccttaaggtcctcctttgggcatttccgtttctgcgagagcttcccgtgttctggcctaggcaggaacggattggcagtctagcaacacacagggcaatttttactttattattttattgtatgtatgtatttatttatttgagtcggagtctcgctctgctgcccaggctggagtgcagtggcgcgatctcggttcactgcaacctccgcctctcaggttcaagggattctcctgcctcagcctcccgagtaactgggattacaggcaccccccaccacgcctggctaattttaattttttttatttatttatttggaaagaggttgcatcatgttggccaggctagtcttgaactcctgaccttaagtgatccacccgcct

SEQ ID NO: 1881773 - DNA, 4001 bp, Homo sapiens
ggactggtttcgtggaaaacaatttttccatggacggggatgggggatgctttcaggatgaagctgttccacctcagatcatcaggcattagattatcataaggagcgcacaacctagatccctcgcacatgcagttcacattacggttcgcaccatgagaatctaatgatgctgctgatctgacaggaggcggaacttagacggaaatgctcactcacccatcgctcacctcctgctgtgcggccccgttcctaacaggctgcaaaccaggtaccagtccgtcgttggggacccctggtctagattacagctaaagaactacaaaggctttctctttatatgcccttccttcctgcccaagacttctgggcttttaactagggatgcagcactgcaagtatccggaggcagtaactgggaaaaccacctatcatgattaaaataaaacacgcattggcctctggaacgaaggatgttaaaataatacattctgcccacatcttggattcaagacttggggaagttttagaaaaatcagttatctcaagtaagtattcagtgcacacaatccagtgactgagtctactttttctggctactaaggtacaggctaggcctaagcagcataggctttgaaactatcatccaggttttcaaataaaaaggagtaagaaaacaactgctggtaatacaacattacaaacattaacatatgcccaacgaacagtatcgtagatcgttagattatctgccaaaagcctgttccctggtaaataacagttattgttgttttacctaaactagttaaacatgtcgcagcttgctcctgaaagagaacattctatagtctttggagaatcagtgaagaggtcttgcaacatttgtcagaggtagtcaaacagtgcaagcaatcacaaaatttggtcaccaaccaaaccagattagctaatctttcagttcctgtagattagaagacaatattaactcaccctttctgcatgttgacttttgcatccctttatttgtgtattgaaagaacaagcacctctatgggaactctatgccctgacagtttaattacttatcaagtttactctgggccggtattgatcattctttcgtgaaacgaattagatacttaaattaaaaacaaacaacaaaaccccccttttcacatagcatggcggcatgtcccttggtaacaaggttgagtggatccaccaaggcccagtagcttgcctccttttcgtaaggatgtaactattgtccaaccagaagagagaggcatggagtgggatgtgcaccaggatgaactcgccggaatcgtcaagagtcgttgtgtgaccctcaccttgacttcgggcgttttgtggggacccaactgctttcttgccgctgctctttggtctgagtttccctcagccaaacacttcacccacccatgaccctccaactgtcccgctacagcaggggatgggggttgtcttccgatcgacctcggggggcaaaggcaaaagtccctagctgcttcggaaccgctcctcgagtcctgaagccgctccacgcctcctcgcccaccacttggtccccgcaggacgtggcagtctcgggctccagcctggaaaggagcccgcccgggtgccgtcacccgccccgcgcggcctcacctgccgctccccggaaatctcagcgctgccctgcccccgcccccaccctcccgcgtcctccaactcgaggtcccaagacccacacagcaatggcgcagccggaaactgggccctagacttactcacgcccggctggcggctcgggtcgcctgtgggcgggacgcaaaggccgcgacttccgccttcctgcttccggtctggcggtgagtggggagtgggatccgatcccgtggggctatgtaggggaagttggtggctgcagctgccgtggttttctcctggtgtccagcagaaacggcggcggcgcaaggtgtggctgggccaacccaggatctcccaggaccctccgctctgcgcgacaaggggcccgcgcttgccaaggccgacgggcaggagtgaacgtggcctccgtgggtctgcagccccgatagggtaaggagggaagagtgagcaagggagaaacgtaaggaataagggaaagacaaaggaggaagtgcggacggccgtcaagtgctacccgttgcagccgcaggggccacgcgggtctggttgggagatcgagcctggtcgatccgttttgggcggaagagtaggatttattcctgaaagtgtggaggcgcgagcgtttgggtccgaagttgagttgcagggagatgtgtggcctgtggaccatggctcttttactgcaaagttcttttgcttatttctgaaacttacattgtttattcgctactgggctggagaaggtgaaggcagatcgatctcagtagtacctaattctaactgtatgggtgaggtcgtatgaagtccaggagctaagatatttaacgtattaggcactttcatgtgtgttcagttgaaaatcgtggggaagatataattaaaactagtcacagttttcttggggtaatgggactgtgggtgaattactataatttgtttggttatgtcttctaattttttaagtaaaggacacaaattgtatgatggacccaaaaaaacctttataaagagtaagatgagctgtttgattttgtagtggtgtacctaatccagtaaataaatgagtggcaacatttttagtataaaaattgaaaatctaggaacggatacgctgtgtaagtcagtcagtgagccaacttgtctcccgtatgtcaatgaactaaaaaaattttattattgaaataagtaacttagtaaaatacttgatttccagtaattaggattttcttacagggcatttgcaattgtaaattcaaatgaggaagaaacgtattaagttactataccggataggcaattttagatgtcatataggttgcatatatacaatatagaaattttccatttaaaattttattacaattatcctgaaattgtgacttaaattttgttttattttttgtattctttccaactagccaattgtacagaatttaaaccgtctctcagatgtgtacagtagaactcaagaagacagactaccaagggtcatctgaagtcgtgattgggtcactaataacaccaggacaaagttaagggatcactactcaagcataaggtagatgatttttttaaaaaaattccagttgaaattgtaagtggatgtatatacactcattccctacccaggtattctaattctccactttgaatagcggttgacacaaacatgaaagggagaaaagcctctggggcaaaatagaaaacgtcactcaagtcacataatcctcatttgccagttgccttttccttacactcaaaaaggaacaaaacacatggcatctgttaaggctactttctcatttattaaattaggcttattccaacagaggtcctcaaagctgaaagggcataaaatagcacagtactttttgcttctttggcatattaatgcgatgtcatgactcccttaccctctccttcccattcggggaaatagtcatctctccttctctgcgagcatttcacatgctctgttgcttgtccttttcaaacaccaaatttgctgatttgtatttttgttaattagtaatactaaggatatgtcaaaaaatgacaaactgtattcagctgtttcctggaatgaccacagaaaactcaagatttttataaaagcctcctcctaaataaagtttgtcttgaatataggaggcatgtgagaatgcatagtccttatgacagagtcacatggcttttttaaatcttctataactttacctctttgaagtgtcactattctggctgtactagatgaattactttttcctaaccagagatactagtccttattacaatagtactaagttgtactttttaaaaaagcaaactga

SEQ ID NO: 1881774 - DNA, 4001 bp, Homo sapiens
ccagctacttggaaggctgaggcaagagggttgcttaggcccaggaattcaaggctgcagtgagctgtgatcacaccactgcactccagccagagcaacagagtaagaccctgccttcacaaaaaaaaaaaaaaaaaaaaaactcaggttccaaccctggagttactaaatcaggatctcagaatgcagagatctggcatttcaaaaaaaacttcccctggagattctgatcagccaggtttgggccagatgaactctaagctcacttaaacctttgacattttatgagtctattaaatcgagtacaaaaaatgctgagtccaaactaagcaaaacaaatcccatctccctattcccagcctccttggattcagaaagccacactgcctggagagtaagcagagagagaattgtcattaacccaaagaccatctttgaaaacagactggctgcggctgagtgcggtggcacatgcctgtaaccccagccctttggaaggccgaggcaggaggatcacctgaggtcaggagtctgagaccagcctggccaacatggtgaaaccctgtctctacaaaaaatgcaaaagttggccgggcacggtggctcacgcctgtaatcccagaactttgggagatcgaggtgggtggctcacaaggtcaagagatggagaccatcctggccaacatggtgaaaccctgtctctactagaaatacaaaaattagccaggcatggtggcacacacctgtagtcccacctacttaggaggctgaggcaggagaatcgcttgaacctgggaagtgaaggttgcagtgagccgagatcgcaccactgcactccagtgtgggcaacagagcaagacttcatcaaaaaaaaaaaaaaaaagcaaaagttagctgggcatggtggcacacatctataatcccagctacttgggaggctgaggcagaaagatgacctgagcctgggaagtcgaggctgcagtgcactgagatcgtgccactgtactccagcctgggcaagcagagtgagaccctgtttcaaaaaaaaaacaggccaagcacagtggctcatttgtgcctgtaatcccagctactcaggaggctgaggcagaagaatcacttgaacccaggaggctgaggttgtagtgagctgagatcgtgccactgcactccagcctgagcgacagagcgaaactccatctcaaaaaaatagaaaaagaaaactacaatttgggtgggtagatatttagttccctgaaccgtctgggtatggacggccctcccattgggctgggacaggatgctgatctcggatagcacacgtccaccacagtctgccatctgccagggtctcctgcctgatccagcccagggcaggcagcgggcactcacttgaaggagtagccggcagattccaggaaggacgcaggctctttggccaaggaccacatcaccatggcggggtggttcttgtctctgagcaccggttcctccaccacccacatatggtgatgcatagacacgttgttgaagagttgccagcgggccaggagggaagggacagagggtcacggtgtggcccgagggctggccaggcagagcgggtgcacagcagggactcatggcagcatcaggcccacagcaggacactcatcgatgaccacaatcccataccggtaacatatctgcagcatctcctctgtgtagggatagtggctggtgcagaaggtgttggcgccaagccagcaaagcaggttgaagtccttcaccagcagcggacagttgaagcccttcccttggatctaggggacagcagagccgagtgacccctgtccctgtcgaagcggcacttcctctgagagccaggaccctggagaaccaccccatgaggtcccctctccagcccaagcaccggctccaccatggggtggtttggagccatttgcctcattgccttgagctgccctcaactgcaggacacagggaaggctaaagtggaaggtgaccagaagcagcccccacgaggacccaggagccccaacgcacgtccgcatcctcatgcttgttgacgccgtggaaatagaaaggtttcccactgatgaggaactggctctcggtgacggccacagtgcggagccccacagggagtgtgtagaagtcaaaggccccagtgacttctgtgcagtcagccacacctacgacagccaaagtgccaggtgtgagcgccccgacagcctgagccccatctggcctgccctacagcaggaagacccctcgtgcatgcaccccagcagtcacctctgggcctgcagagaagcagcaatcagaggctctgcccttcactggctgaccctgggacctgcccttcaaaatcgggccttctccttgaccagacgagatggctcatgcctggaatccctacactttgggaggctaaggcaggaggatcacttgagttcaggagttcaagaccagcctggacaacagagtaagaccccaactctataaaaaggattgttttttgagacagtctcactctgtcacccaggatagagtgcagtggcatgatctcaattcaccacagcccctgcctcctgggttcaagcaattaccctgcctcagcctcccgagtagctgggattacagacgtgcaccatcatgccctgcaaattttcgtattttagtagagacggggtttcaccatgttggccaggctggtctccaactcctggcctaaagtgacccgcccgcatcagcctcccgaagtgctgggattacaggcgtgagccaccatgcccggcctacaaaaaaattttttttaattagccaggcatggtggcatgtgcctgtagtcccagctactcaggaggccaaggtaggaggattgcagctcaaagctgcagtgagctgtgatcaggccattgcattccagcctgggtgacagagtgagaccatcacagaaaataaataaataaataaataaataaataaataaataaataaatataagtaaataaataaataaaaaatctgggcctcccaccaagggtgggaaacatcagaaagctcagaggaccacacctgcccgttcacctatcctgggatcctgctgaagccagggctaccagatgggggcaaaagacctcccttaagcaagtcccaaaccaccattacctcccacgagtacaggtaggcggggtgttcgtgcatcaggtacggccaccagaggttggtacccagcaccttcagctggccctgggtcccagcctggttgtccacgaccttgttttctgcattcaaaagatacacttccaacttgaactggttactgcacttgacggagatctggtaattcactagccctgcaggaggcaagagagaccagggcttagggagggacatgacctgggtcacacaaacgggaatgccccacaatgaccacttccaggcaccctcatttgcttctgttgctttttttttttttttttttttttttttgagatagaatctcgctctgtcacccaggctggagggcagtggcatgatctggactcactgaaacctctgcctcccaggttcaagtgattctcctgcctcagcttctggaatagctgggattacagacacctgccaccacatccagctaatttttgtatttttagtagagacggggtttcaccacattagccaggatggtcttgatctcctgacctcgtgatctgcctgcctcagcctcccaaagtgctgggattacaggcttgagccactgtgcccagccctgaaccaatgctcccggcccgcttttttttaatttaatttttttttttttttgagatggagtctcactctgtcacccaggctggagtgtagtgctgcgatcctgactcactgcaaactccacctctggagttcaggtgattctcctgcctcagccttccgagtacctgggaatacaggaatgcaccaccatgcccggcgaatttttgtatttttagtagaga

SEQ ID NO: 1881775 - DNA, 4001 bp, Homo sapiens
tcattgcgtgaagtcaggttggaaaggcacatacgctttgcttacactgagccttaacaagaacctaagtccacatgagcttgcaggcagtcctgacgcactgtccctgttggtcccgaagggcctgccaagatcaacagtgcggcacggaggggcctcctctcccttccggggtggagcctgctgggcctcaacttccttctggctggaattgaagacgctctccccacctcccaaggaggacgattccatctgacacggagggcacacccgctcgctcccgcccatctgtcccccacgctttgaagcaagctggagggtagaaacctagaaccagagcccccttccctgtgccccagagtccgcccatgggctgcactggtgactcacacgcacggtccgcaccatgcctcacggcccactccacctccctgctgccagagcaggccagagaccaaagcctcgtccttcccgggggagcccctggagctctcgatccagcacctgggctggacactctgggccctcttctttccccgtggaagccccacgggtggaggaaaagaaggatgagcaaggcttgcagacaaggatggttccctgtgcaatggggaggcaagcagaggcctgttccctttcccgcagctacagagagagctgaagaaaacgatgcaaataactttttcagagattgtccaagtcaacaaatctcaaatgtcattgcatgaccacagatgacaagaaacaagttcatggttctttgaagtaaaaatgatggaggaggagggtagaataaaggaaggaagcaaatatatgtgaggattgccccaaataccccatggcactgcccaaaaggacatcctccaggtaggagtgaggctgccctgccccgcacatcgccactaatgggggcagcatgggaaccagggggcgcgtctgcagccccagccaggccagtgcctgggagagtggccctctcagggccctagttccttcatcccccaggagccctggggctgcatcatcctccagtcccttctggctctgacctgggcagccggtcacctgctgctccagcttcccttcggggcctgtcttgacctctgcagagcagcggctctgtggatgacaaacagacctgtgcccggctgcgggggcgaggtggcgggggcagggtaggggccccccagctccctgagggaggggcagggcaagctgcacgcaggcgcaccttccctgactgggtcctggcctcaggctgcagaagcggaagaccctccagccctagtctgaccccaggccagaggtccagcccccatgccctcccctaaccctggcggctgggaccaggctccccaccagggcatgccccccttagcccgggcaggtcacagactcattggtcctcgggcggcttatcaccgtggtccattcgcgcccacttgcccgggtcctggtgcccggacctaggctttgcccctgccacagcctgctgttttgagagtgagccggctagggactagcgtgggcaccaggagagaacccagaactgggccgcttagcacggaggggcttgggagaggggcaggggaagaaaggcaggacctgagcgccctgcagccaattccgagggttggctggagcagcagcctcgccctccacaggccttggggggtgggggaggggggaaatactaagacctcggagggaaaccgggccgacgacaagggtggctatttccgggctcttcgcgcccggcccaagcgtccctgggtggggcagcccaaacggggagaggggccccgtgggccgagggcccgaggccgcagcgagcttagcgtttggccaaatctggctcgcgcgccttcccactgtcctgttagggctgtgtgacctcccggagccctacgtccccgcccaaacagctcccagcgcccctgctggcacccggggcgccctcaccccagctcctgcacccggcgcgccgcgcgcagaccggacggaggggaaagttggcaagagcgcggcgcccgcgggagaaagcgttaatgggcggccgggtgggagcagcgcgctcgctcgcccacgtcacgccggtgcgggctcggctgacgaccgcggcgcctggggacgccggcgcgctccgctcgccaggtgctccgcctggaaatgtctccattagttgtcgccggctccccgctggagcgcgcgcgccgagcttccgcgcggagccctcgcgggctgccgggagcggcccagcgccaccgcaggtaggtgaggtcccccgctcccgcccccgccccggggttccgagacccctccccccttccgaggaggcggaggctccgcgcggccgccgaggggagcgggcggcggcggctgcggcgactccccggtgcgtcccgggctgcgagctgctccccgcggccccggcagccacacggcgcgggcgggagcttccccagctcaggtagggagtgggctccgccgcacaaactttgcgaggattgctcttgcgcttaaggggacaaagtttgctacccgtcgctaggctctccagaggccgctgcgtttgctgcaagttgcgggaagcagggtgcgcgggccggcgcggggcggggggtggggggctcggagtggccaggcctgagtcctggacgcccggacggcgctccgtccagcctcaggccgtacccagggagcaagcggcgggggcgcagcgggagagaggagggagagggccgcgggcccccatggagggcggttgggaatccagagattcaccgcttgtccctgtggctccttctcctaccactggctccgagggggcctcggggctgtgaggaaatgacctgccaacctcgaggttcgccagtgcggcgtcagcgaccgtgaggcctctcaaacccacaccccagccgggtgtcccgagcggtgggcgggcacaggcgcccccaaggtctctggccccaggtctcagaaagaaaggcccttgcctggtgccccgggctcccggcttcgcctttggctggagttaacttctctgggctggaaggagctccctccggacgagctcttggtgcggggaactggtggcccccagggtaactcctgaagcaccagggctaggctggccgaagaagggtcagggcccggcctgtctccccggaggccttccatggttccgacggccaacggtaaccccgtcaaaataggcgacccgcctgcgcttcgcgttaggggctgaccatcccctgcctcccctgcggcctgctccggccctggtcctccgctcttcggagcgctccaggccagcgggagcacctcatctccccgaagctgagccggtgctgtgtactccgggagccggctgacttctggcccacctgctcacgggtgtatttagtaccgggggtccctagagggaggaaggctcagcactccgagtctatgcagacgcgttcagctgatacctgagatgctgagcgtcctatcgttggtgaaagggacactgggtgcctccgctccaggcttggccttttggtgaaggcacttggaaaatattccagtattatctatgggagaagggtggcccagtgagaatccccggtttgggcaggcgggcctaggccaggctacagggtttcagtgagatgtcccggtggtcgccaatccacaggctggattgaccctgtgtcctggaatgagtagtggggcctgggtgaggccgggcgggtcaggaggcctcctgggcagttgcgagcttcccgaggcagggtgactgtgactgggcccggaccccaggcgctggggcctgctggcgggcaggaagtggagcgtgtgtgtgcggcggcctgggaaagccgattcagaggccaggtttctgggtcacggagaaagggtcgcccgctggtggggactggagcgtcgatttatgcacacaggctggaaaggcaaaagagaacaggagaaggtggcggtggtggtcaaaggaagccccc

SEQ ID NO: 1881776 - DNA, 4001 bp, Homo sapiens
gtgaaatccaatgataggattctttgctagattattactttttcactctgtaaagttttctggtttaatactattatcggaatgaattattaacatccctaaatttaccaagacacacatttaattcatgtgattgtgtgattctttttaaaaaaacatatcttgagatgggatatttattttcttgaaaaattttagtatgaaaattcacatcaacatattatatttactctagtcctcagcttgcatatatatatatatatattatatatatatatttgcatctcatttcagcaaaataaggcagagcattttttgcaacttggatttggcttccttttattcttcgttttcattaatgcgttccttgctttggcacagaactctatttggtttgcaacactctaggaaaaatgcttaattactgaaaaactttgaaattcaggaagaacatgcaggggagcgtatttgttcaggtcacgtttatgtgactttcaagaacagataaaaataatctgtagctaaaccaaattggtgctttcgttgaaaggatttggttgtcagtgggacagaaagaaatggtggtgtctaaggcttcctttaatttaaaatgccttaaaaggaaaagcaggatgcataacagagcctctgctggcatgggatcaggctcttcttgagatctttccagaatactcaacaccgtgcagcagaattgaacattaatgttgacttttaaaaccactccatgtgcactgagagactgctcagttactatgaacatctgatcttaaaaaaagaaaaaaaaagatagaaaggaaaataacaccggattatgagttagaagaccagaacttcagcttttggattcaccacttcctacccacatcactttagacaagtccctgctatgcactgagctctggcttcttcatttgaaaagtaacgatacctattttgcttcccattcagagggcttaggaggatctaagggttaggtatatggaaacacatagtaaaatatgatgttatatataataaaaaggaaatgcaaaattatgaagttattttgattgttgctaaagtcatacaaaagtaaatgtttagcacgcttttttatgtatggatgaggttgagaataatcagttatgctcttatgctttgagacaagggaggtggagctggggctatgtcagctcctctcttttctagaagccacaattttgacttcctttgactttcattgccaggaacataagactgatgaatacttctctgccttcattcatccccaaactgtgaaggatgtttccaagacttttcttcttttgtctctggtcaaaagagaacaagatatctgtgtaaagaagaagacaaatcatattttgtcaggataatgttgtctgccttagtgttacatactattatttatcataacttgccctcaaattgtttgttttctagttgttaacaggaattcatcttcattattatttaatttatttttaattgacaaaagttatatatatttatagtgttcaacatgctgttttgatacatgtacatcttgtggaatgattaaatccagctaattaacatatgtattaccttatttacttatctttcttttttttgtggtgagatcacttaaaacctagtcttaatttaattttaaaatatacaataagtttgtttagtcaccatgtggtagaatgttaactttgcttttagattatacctggggcacaaattacactacaatatttcaggttacagaggtcttctgaaagagctaagtggtctcaggctctttaatcaagactgctgtctccaggatatcagagacttttccttggattctgagtagcatgaaatgatactgcccaaataattaccactcgagatagttttcaccgttggaattaccttctgaattagccagatgaaaacataaggctctgttgtaaaaagaatgtatctctttaacttaagggagtgtgaactgggaacaggatatattccaattccatatcaaaatgagtaacagagataagaggaacatcacattatgacatcacaaaatctcttgaatgtgatgtgcatttgacaagctgtagaaggactatgtagcactgttgtaaatatacctataaaattcatcactccaagagttaaagaatatattataatgattcattgtaaatgaattccatagggtttgaatgagtatatgaattaaagagccattaatgactactggaaaattcagaaaatttctggtacactagatatcaggaaacacagtgtgtgatactcacggccacagatgcaaacgaaaatttgaatggcctaagacaacaatgacttctcgggtatcttctggaatgggcatggcaggccgaatggaccatggttcagttggtgacaattcgtatgtccaatagttgtcaccaaaaatatgctccaaacttgtttaactcagttccttgaattatctgaaattatattttaaaacatttctctattgagaaattacaaaggtagccttaggctgaaattctaattgggaggtaaatgaagggaattgtgatatataccaatacatgcaaaattttctaaatttgcattaacttgggagaaggattagaaatataatatgttttaagaaaatgcaatttcatttgtttcaactattagctgtaaatggaataaggttgacaaatagttccttaaaggaacttatatagttccttaaaaagtttgctataacccgtttataaaactcctttgcaactaaaagtacaatgtaaaatatcttttacaatgctatgtaaaagagttcttacaaagaacttgaaaaatcaagtttccaaaatgcgttatttacttcccaatagtttgtgcttaccaatctagaaataaatagcatctatgaattacatgaagttgccatttgtatgtcaaaatctgtcaaatactggaggttttaatgtgttcaaatacacactaattctcccaataaagcaataaacgtttgttgtattattactgtctaacacagtgcttggtgtgctgtgaatcctcactgaccctttgtagaaggaatgaatgaggtcgtaaatgaacagaagattgaatgagtgaataggtgagacttctgggctgggcgttgtgccagatgccacgggagttaaaatggcatggctttcaatcttaaggctatttcttttaatgttctttccagattccctggaattaatttttccaccgtcgtggccccttggaggttgcctcaccagagagtccttccctagacattctatccccatgtaaaatctgttgctttttcctctgcgtttagttcctttctccctcctattacttgaaataatattctttctagtttatatactttttgttttctctcttctccaatagcgttcatgattggaggcaccttgtcttgttcagtaatgtctccccatttcctagaagagggggtggcatatggtaggttctcaatacatgtttcttgaattaatgaatgagtggtttggagaaaaactatctagtgagagcagctgatttgccagtggtctaactcagaaactcaactttaagatgaaattctgaggcttcttacagagtttagagtattacaatgataaactttgggtacatatggatagtctaatactgtggtattgcaggggctctgaggctgtagaacctatatccactcattaaataattttatgttggggccgggcatggtggctcatgcctgtaatcccagcactttgggaggccaaggtgggtggatcacctgaggtcaggggttcgagaccagcctgaccaatatgatgaaaacctgtctctactaaaaatacaaaaattagccgggcgtggtggtgtgcgcctgtaatcccagctactcgggaggctgagacaggcgaatcacttgaacccggtaggtggaggttgcagtgagccgagatcatgcc

SEQ ID NO: 1881777 - DNA, 4001 bp, Homo sapiens
cctggaaaatatagtttatattaaaatttgtgcaaaatatacttgctgtttacaagtgaaagtgagtcaggttctaggccctgatagttgctctttacctaccctggtgtctgaggaacactccagaagtgtatggaatgcaggacaggttttgattgttctcgccagggcattgctcgccatccagcatccctggctgccatcactcagtgccactgtgacaacccaaagtgtccccacagattcctccaactctacttagggagtgctgtctcctgtggagaatcattgctctgagattccaccaaaagatataaatcagaccaaaggaaaagccaaagtttttaagcatggtatctagacaaggcaactcacatgacaataagacacaaaactttctcactcaagatagcaggtttggtttggtttgatttttaactcaagtttgatagtgtgaccaacatcatgttaggccttgtgagagacagaagttgggaagaaacaccccccacccccctccacacacacacggacacacacggtccctgccctcaaggacttccagtctagtaagtaagtggcaacagctacagtacaatccaggtcagcgaaaaatggagcctaaaacagagcaaagaaagacgcaggtacgtataagaagtggggcccctgggcctcacagtgggcactttaccccgggttggatttcatggaggcccctccggccgtgttgtccgcagggtacgattttatgaaggctctgagttggtggctgactctggcgtcaccatagacaccacaatgcgtggaggccgacttggcgttttctgcttctctcaagaaaacatcatctggtccaacctcaagtatcgctgcaatggtaatgtgcattctcgttactgttcaacattgttactagaattagtcaaacactgccaccttatttttataccgcacttcccccccaaaagcccaacgctcataccacatagtcattaaaacctgatagtccctgtgtaccagaagtaaaaagcagatcacatttatcctattttatccatgtggaaattaagacccatagaatttaactgcatggtttagggtttggggttcagtgagaaatccagtcagatttaatttacaggaagcctttattttcatgtggttaaaacataatcacagatgcaaaatccattctgcctgctgattttctgcacggccgggaaggagcactcctgggctttaagccaacggtttgcaaagcagcctgcaggagaaaatggcggcgagggcctgcggggcgtcctgggcgggctaacagcgccccctacaggacgcctgagccgcgggcgggggtccggggtccggggtggaaggagcctcgctaacctccctgtgcccattcctattgcagacaccatccctgaggacttccaagagtttcaaacccagaatttcgaccgcttcgataattaaaccaaggaagcaatctgtaactgcttttcggaacactaaaaccatatatattttaacttcaattttctttagcttttaccaacccaaatatatcaaaacgttttatgtgaatgtggcaataaaggagaagagatcatttttaaaaaccgtgttgctcagacattgctctcacgtggctcaggctttgaggtgcccgttctcggagggatccctgttaacttgcagggtggtagtttcttctcagacccggtggccgataagatgagcctatgcgtgaatcacaaggcccaggccagaggtctcagctggggtccccccagtttgctccatacaaaacgcctaaccgttccatgctcaccttggcagcctccttatttcgggtaaggggtctcagaaacacgtgtttggggtggcaccttccctagggaggcgtttttctgacctagtcctgggacagatttgcccaattctttctgatgctgtcatcccatcccacaccttccacagacttctattctggccccttcaacgtaattcttaagcttatttatatatttggctccccctagtggactgtaagcatattgacaataaaggatcatgtcattacaatcaatatccccacagtacctggaatgtagtaaatagccagtaaatgtttactgaattaataaacgaagaatgaatgaatgaatgcctcttaaaggacagtagagtgtacatgatcataaaagtcctcctcaactcaaaaagtcacaacatatcctctatttgtggtaccagtagctggatgtacagcacagaaacttgcctaatttgtacactagcctttcttgtatttcaattgtaaatcaagatccaagcaaatttttataaattctctagaaattttgtttcaaagaatattgctgtgcggttatatattttcttattccagaattcctagagatatattaaatcatgtatgaagaaaaaaacaccacagttttatcatgactttaacagtgagaaaatacaatggtgcatgcatgagatctggaggatttctggacatcctcctctcatgtacagcctggagatgtgtgtggccttgtaatccaggacatctgatctcctacatcaaaaactccaatggggccaggtgtggtggcacttgcctgtggtcccaagcactttgggaggccaaggcaggcagatcacttgaggccaggagttcaagaccagcctggccaacgtggcgaaacccatctctactaaaaatacaaaaattagccaggtgtggtgccacttgcctatagtcccagctatttgggaggttgaagtgggagaatcacttgagctggggaggcagaggctgcagtgagcagagattgcaccactgtactccagcctgggcaatgagagtgaggctggtgaaaggaggcagcaacccacaccatgcccacccctggggcagcctccctgttgtcggctgtgcaagcccaagaacgcagtatgtccacaggaaacagactctcttggttaaatcttttgtgtctataactattttagaaaccatgggcccacaggagatccagaacataattccatcccttagggagcttattacatttttgggaagacaaaacttgttatttatgcaaaacaagaaacaaagacgcatgtagaaccagcagtgtgctgaagccaactcctaccagctcataagagccaactattcaagttttaggaatattgtgagccagttaaacggttggtagtttgaaattggccatggtgggagtatttacacagaaactggcaaacactacaaatcagggctccagagaactggttgttaaatatttatcagcacacaagtgattattctaccttgtcctattcctagttggccctccttatatttttgaagctgatgtagaaaacttgaggctttcagaaaatttcttgcataagaaatgaagtaagaaaagtgaaaatgggtggggtgctatggctcacacctgtaatcctagcactttgggaggcctaggtgggaggatcgcttgaggtcaggagtttgggaccagtctggccaacatggtaaaaccccatctctactaaaaatacaaaaattaggccaggtgcagtggctcctgcctatactcccagctcctcaggtggctgaagcacaagaatctcttgaacccgggaggcggaggttgcagtgagctgagatcgtgccactgcactccagcctgggcgacagagcaagacgtgtctccaaaaacaaaaacaaaaaaaaaaaaaagtgaaaatcaggaagcacttgagagaagctagccagttgcagactgacgggatgagctagcaggtgtggtatgctctcccccaggtaactccctgggcttcttggatacttgttatactcaaccttagcacaatgactcaaattcctattacagttccattaggttagtaagagcctcatttgaatcttacacctctaggactgagtggccatcagtctctcaccaactagtatg

SEQ ID NO: 1881778 - DNA, 4001 bp, Homo sapiens
agcaaaggacctgggttttcacccacaaaccctcgaggacagggcttgtcaatgccttttggttgtggctcatttagggggagcagaagaccccacggccccccttccctgtttgttcccaccttcccttgggaagaatgctaaagtttgtttatgatttccaaataatatgtagcccttaataacttattcagagtatcacgagcaaggagcccttcggttatactcataaatggcagcctgttgcactgtgtatctctcccccagggaagcaggaggggggcctggcatttctggattagccccaggaggacttttcctgcttctgagtggacagaggatcatccttggaaaattgctcttctgagattgaattccagatcctacatccctctgtcaatctgcctgcaaggtctgaagctggtcttagaccctctggtgctatggtgcccattaaacagacactgtagtctcctgttaataagattcaattaggaaaggggtggagaagggcactcaccgcctgagagtgtgtcagggaggcctgagtggctgccttcatttcgcgcctgctggaggcaggagggaggaaggtggtgagctcgctcagcagggaaggccaggctgcacccacctccctgggggctggggaaactcagggtgacctccagagcctcaggtggcagcttactgtatgatcgaggtgatttttaatgtctcagagcagccccagggtcatcagagacagaccaagctgtgccatctggaagggccagcttcgaatctagttctggcccctagggttgcaccagtgacttcaagcctccaagtctcagtttcaggttctttgattcttgggtcaagtgaagggtggagataagctgccttctaccaccacgcctgatacttaggaaagccccaatatctgggattgtttttgttgttttgttgaaaatatatatatatatatatatatttgttttttttttttgagacggggtctcgctctgttcaggctagagtgcagtggcacaatcttgactcactgcaacctccgcctcccaggttcaagcgattctcctgcctcagcctcccaagtagctgggaccacaggcatgcaccactatgcccgactaatttttgtatttttagtagagatggggtttcgccatgttgcccaggatggtctcaaactcctgggcttgagcaatccatctaccttggcatcccaaagtgctgggattatgggcgtgggccactgtgcctgccctttgttgctgatttttaatccttacttccactttacagatgaagaagcagagatctaaaagcatgttttttgcctgcaaatgctgacattcacttgtcttattgctaggaagaaatctctgtactttcgcggtctctgggagggcccctggtgagcagactgtccctggacctggttggaagcagttgtggagctctcactactcccagcttcagctcagttggtccttaaaaagtcagttctctccccttgccataaatccccaccgtctctaactcccatcactaccctaaagcaaagtaggttttaaaaatgccagtaacacaagtgagaaaactgaggtcatttaacgataagtttgggagtaaaaccaaaaacaaaaaaggaaactgaggcccagagaggtgccataacttgctcagggtcacacagcacgtaagtgccaaaggcagggagctgtagctgctccagcgtggatatgccagggactagtgacaagcccaacccctccagcccaactccacccttcctcatgccaacaaaaggagaatcatttcctatttctggcatctttgccagcccacagagacagagagaagaagaaatatttccaaatataccaggctgatctttcgtagtttctcagtcttgctgtctgttgttgtttgaaatctgtttcccacgagactctgggaagatggaggtgcagggcttgggtaacagctgccttcctcagggctgggtacctgctctccgagtctgtgtctccaggctgtgtgctcagacttgaccatgtttgggcatggaggcttgccccagatggggaccaaaagctgcttccctggagacgggcggggaggccaaacttcctgctgaagctctgtggcctcttttggggtgggggcgggggtccaggcagaaagaaactgtctgctgctcaagacccacaggacgccgggaagactgtgagtaccgggcctgaaagcacttgggaagtgatttctctgaagaccgggctggagggagacaggggaaagcagcctgccacggggcagggagggaggcaggcaggaggactcccttcctctcggggctgtccttctggatggagggcccgtggtctggtggccagtggggagggtggcacagtggccaggttactctggtagtaagcgccctggccctctaggtcccagttctcagagtggccagaaggctgcagcctggagattaacaccaatgctggcacttgtcaccggtagagaggtgggacaaaaatagattcatcaagaggggtccagacttctgctccaaactttcagggtttccttcgttagtagtaatagctaatatttactgggggctgatttggggctaggtgctatgatacatgtctgatactcaatatggcatttgatctttagctgaactctctgaggcaggtaccatggttctcgtttcacagtcatgtggttgctaagtgtaagtggcagagccaggatttgattccatgtctgaggacctcagaatcgccctgtccacaccccaccaaactgttcaacaatgtactctattccttgtccttctaaggaaaaggatgtcgacccagctatcaggtcacccaggacactccaaagtcctgccttcctttgtccttctccatcttctctgaatctatcccagatctcaagtgacctttctaaatgggaagatatatcctggaacttcagagatatttagaaatgctcaaaactgggaagttcttcttacagtctaactgaaatccctcctatgatagctgaaacccacttcttccttttctttctgtcccttgggggatattgacagttcccatccttcctcccgccaaaggttctccctttggatgctgaatactaacttcttgctgaagtcatatctacactgaaccccacgcatggtcttaggaggatttatcatgactctataaactcactcagtgcaggcaacaatctcatcagaccattagagacgggtcagacctgaataagccaagtttccagacttctctgtgacagggaagcctctcctttcctttccttctgagctcctaaaactggtaaaaccaggttcctgccttcaccagcctcaggagtgcccaggggcctgagagggcactagaagccaaatagcagaggaggccatggccctgggcgctggggggggctgattagccaggaaggagccacaggaagcccccacaggtgcgatccagttcccccaggagagaaatggctttgttgtgggcactcagccctaggcttccaagatgggatttcccattggcttcaaatgatttatgtctcacagtatctggggtggggccaagtgccagtgacccttgcaggtcctggggaagcaggctgttggggcttttagcttacctccaggtgattctgttgctttacctgtgaatacatggagagtcttgttcaactgacgccaggtagaaaaaggcatgggctctcccattcccacaagatcacagaacaggaggaaaaggattgaataaaaagagttgaataaaacatctctctttgtcgggggcaatttctgcttgcttgtgcttttataatgtctccattagaatgcaggagaaactcacctcctggtgccaaataaaggagaaaaagttgtcattggatgtcacctctgccgatcgataggggaggtggaccagctcactgggaag

SEQ ID NO: 1881779 - DNA, 4001 bp, Homo sapiens
gcctgagcctcccacccactccatgggctcctgtgcggcccgagcctccccaaggagcgccaccccctgctccacagcgcccagtcccatggaccacccaagggctgaggaatgcgagcgcacggcgcaggactggcaggcagctccacctgcgccccggtgcggggatccactaggtgaagccagctgggatcctgagtctggtggggatgtggagagtctttatgtctagctcagggattgtaaatacaccaatcagcaccctgtgtttagctcaaggtttgtgagtgcaccaatcgatactctgtatctagctgctctggtggggccttggagaacctgtgtgtggaaactctgtgtatctaactaatctgatggggacgtggagaacctttgtatctagctcagggattgtaaacgcaccaatcagcgccctgacaaaacaggccactcggctctaccaatcagcaggatgtcgctagggccagataagagaataaaagcaggctgccccagccagccgtggcaaccggctcaggtccccttccatgctgtggaagctttgttcttttgctttttgcaataaatcttactactgctcactcttttttttttttttttttttttttttgagacggagtctcgctctgtcgcccaggctggagtgcagtggcgggatctcggctcactgcaagctccgcctcccgggttcacgccattctcctgcctcagcctcccaagtagctgggactacaggcgcccgccactacgcccggctaattttttgtatttttagtagagacggggtttcaccgttttagccgggatggtctcgatctcctgacctcgtgatccgcccgcctcggcctcccaaagtgctgggattacaggcgtgagccaccgcgcccggcctactgctcactctttgggtccactctgctttcatgagctgtaacactcaccgtgaagatctgcagcttcactcctgagcccagcgagaccacgagcccaccgggaagaacgaacaactccagaggctctgccttaagagctgtaacactcaccgcctaggtctgcagcttcaatcctgagccagcgagaccacgaacccaccagaaggaagaaactccgaacacatctgaacatcagaagtaacaaactccagacgcaccaccttaagagctgtacccactcaccgcgagggtatgcggcttcattcttgaagtcagtgagaccaagaacccaccaattccagacacactatgggctcacagcgtgtactcgcgcacacgcagtcaggtgtggatgtacacccgcgcacacccaggcacatgtacacccgcgcgctcacacaccccatccagctacagcagaattctggccaggctgttgaccgcacacctgctgcctccttggccaccctgtccacacagtagcccgatcgacccccgtggcggccgagacccaggcccatccgcagccctgagacctccctagggattgcacccagcagccagtcaccggcctccgcggcctggccagttgagggtggccgtgaccgcggggccaggagcgccgccacatctcggggcaaatggcgcgggggaagagtttcctcctcagcctccccgtctccgatcgctccgcaaactccagagcgaggcacgcgcctttaaaggcaggtccgcggctctcccacgtcctggcgcccggttttccgcacccagtgtccccacagctgtgcccgggcacagaggcgcggccagaccgcactccgcgggctgcaggtgtcccggcctctggcggcgccggtgcggcccggaggtgggagcccgcggagccactgcagtagctggagtcccgccgagtccccagccccaaggcagggcaggagcgcgcaccggccggaggtccatgctgagcatcgcccgcgccggtgcccggcagcctctccaactgtgtggtccccgcgcgggcagagaggcacggactgcaggccgtgggcagctccatcttcccgcgtcctcctcctctggcgctgcccgctgtctcccgccttccctctgctccccgctcgcctccgcctcagcgccccgctgacctcgcctcctcccctctgctctttgtccctgcactctcccctcctcggtcctctgacccccccgccctcacctcctcccctcctctctcccctgcccgccccgcgctctcccaccgctcccgccgcccccgccgccgcggctgccactccgccccccgcgccgcacggagcttcagtaataaccccggcgcggcggcggagtcgctgtggggaatcctcccgcgctctgcctgggtcgggtcctccctgcccgctcgcacgctgccggccggggaccctccggtggcccctagcccctcggagcgctcctggatgaagccccgcgcgcgcggatggcggggcttggcggcgctgtggatgctgttggcgcaggtggccgagcaggtgagtcccgggcgctcccaccagcgcggaaaccgcgggtccggacagctggaggcgagtcccccgcggctcctctcccgcggaccccgccgtctcaccgcgatgtcgccgctgttttccgcaggcacctgcgtgcgccatgggacccgcagcggcagcgcctgggagcccgagcgtcccgcgtcctcctccacccgcggagcggccgggctggatggaaaagggcggtaagtccgtgaggtgggggcttctaatccttgccatttagcagctcgtaatctccgtgccgctggtttattaggtgctgtgaatgttcacgactctgtggaaccctacttttaagatgctgttgtgaactttttttttttttaactgtatgagcgagccccgatgagtggatttccaccaatatttacattttattccctggcaaaacggtttgccagagttattgatataacattaggaaaaaggtgaggaagttcattttattttattctaaagagcttaggaagaatctaaagctattaatgtatgcatcaaagccgtcataaagagcaaattactttcttttccgtccccttctacatcctcggatcctccttcccgtccccaacctttcctccttctcctcctttatagattaaaatattcctctatcgttgcttattctcagtgaaggagataaaagaagcgcttagcatctcaataccaaagttaatgctccaacaatcagggcgtacttcaaacataatagtgcctgaaatggctaatcagctgattgtgacaccatcagcaacgttcatatcctgggccacaatttgacatgagggcaagtcttattctttttcaatgcatgcttttacttctgccacttacaagtgacatttggaaatttgctgtcttatggaaagggatctctgtgtcttcatactgcatcaggtaaatgagaacgcaggtgtgtcgcactggttgctaggtggttttttaacctgaacccatccaatgacagttaataaatattattttgcattgttaccaacaataaattgccgtatcaaatgttaatattaattgacttttataggaagaactaggtttcattctctcaatgtatttccagaagatctagaaaattaaagttaacaattcagaatttctcagtatagttatttcaatttgataaaataacataaaggcaagcacttaatatatgcattaacttttgaaattattccctgccaaatgagtacacaaatagtatataaggtgaccggtgtcagattgacgctcaccatagtacctttttgagaaccaccagggggcgctaggtgcaaatgatataaaatgttaaaaaaaattgtcacagtgaatttacaagagaaagttaattatctgtccatttacagactatcctcttgtggttgtccttgtcctttttagggttttgcttacaatactaaaagttaattcttacaattttaaaggttaattctaattcacctttttaagtaag

SEQ ID NO: 1881780 - DNA, 4001 bp, Homo sapiens
ttagttttattattgaatcagagctagagcatatggagtttatttctagttttccatttgtgcatctctaagcaacaatataataaaaataatttaagtctacatattggtgttgcacaataatgttatttgccttattaaatggagtggtttggattactgaggtttgaggaataaagtaatggactcaaagaattatagactgagctgctaggaatcatttttccagaaatttcccctaccagatacagacactaggcctgcagagtgagaagtgaatgtcaaaggtcagaaagcaagggagtggtagactggggtcagaggccaggtggacatacttctaaccaggtgcccagtctgccatgtcaacccacttccaaagatgaaccatggcagataaatggccacagctgccaggccacaaaggctggttaggcaaaaacaaatggagaattgctgcattgttttggttaactctgagggtagaggctgtggaaggggtggggacgaagggaataacagatttgttcagagcctaagtcccaatgagcaatgggtgatagtgagaggaaatgatggccatttttctgagttccttggtattcccatgggtaatatcacctgagccattccctcctcaagtgatattaaccatcagcctgtattgttcggtgactttcatcataaggaaacaaaactccaaagtctaaggagttctactctgtatgaatttagactgtaagcttatgccacctaactagagttctgtactgtcttagtccattcgggctgttataaccaaataccatagactggggggcttataaacaacagaaatgtatttctcacagttctggagaccgacaagtcaaagatcaaggtgccagcagatttagtgtctggtgaggatgcacttcctactttataaacagtcttctactgtgtcctcacgtggcagaagggggcaaggaagctctgtgggatgtctcataagggcactaagcagagtcctcatgacctaaccacctcccaaggccccacctccttataccatcaccttggggattaggatttcaacatgtgaattctggaaggacataaacattcagttcattgcatttaccactgggaagaaaagactgttggaaaatgatgtttctcagctgcacatcagagttttgatcatcacttgtggagcaaaaagaattcatctgtgatataactagttggtcattagcaatagcttgcgttcttttcttttcttttcttttctttttttttttttgagacgggctctcactctgttgcccaggctggagtgcaatggcgcaatcttggctcactgcaacctccgcctcctgggttcaagtgattcttctgccgcagactcccgagtagctaggattacaggcatgtgccaccatgcctggctaatttttctatttttagtagagatggggtttcacgatgttggccaggctagttttgaacttttgacctcaagtgatccatgtgcctcggtctcccaaagtgctgggattacaggcacaagccaccgcgcccatccagcagtagttttctattgctgagtaaaaacattaccacacacttagcagcttaacataggagcatttattattccacagtttcctggaatcagaattctgaacatgcattagctggatcttttgttcgggtctcacagtgctgcaatgaaggcattggccagggctaggctgtcctctgatgctcagggtcctcttcagtgctcacttggttgttggcagaactcattttcttgtagctgcagaactgatggaggcttgctgcttcaaagacagcaggaagggtctctctcctccaggccctcttttaaagtactcacctaattaggtcaggcccacccagaataatatgccttgtcattaatttagttaacttcttagggactttacatctgcaaaatgccttaccttcacgatagcctgttggttagaggccagtcacaggttcagcccactctcaagggggaggagatgatgcggacatggataccatgagggcgtcttaggaatctgcgcaccacagtcagtaggtttctccatcactgggcagtagagtgtggttcatatttacagactttcatgtgacatctgaagaatgtttggtaatattaatgtatatgattatattaaaggttagaagagtagaaactcagccttgagctaagattatttagaccagggattctcacccttggtaccattgacatttgggctggataattctttcttgtggcggccgacctgtgcattctaagacgtttagcaacatgcctgtcctccacccactagatgccagttgcacctcctggctcatttgtgacaaccaaaaatgataccagatattgctaaatgtccccttgaacagaaaaatcatctccagttgagaactgctgcattcgaaaaatgaaatgttttttgttgtgttttgtttttgaaggaggacctattaaagcagggaattcattttttgatgtgacgcagctatttggagttagcggctcttgctcctctgattatgccttattctttgcttatttcctttactgagaaatgcataatttatagttgcaaataaaaaattaatgcaggagatgtgttccccacatgtactttcttattcacatttatgccaaaaagagattatgttatcatatttgactacgttttataatcttgtctgagtttatagtcaagctatattataagaagactttagttctcctataacatggatcagatatttcccaaaagatatttaatgcataaggcaaaaaaaaacttaataaactccattctttgtattatagctgctttcttggaaactggtgatatggcttgctgtgggaccgagtggaaggcatggtccaggtctgaaattacaaatctcaaaagctgctcattcctgtttcttccaggcaaaggcagctcgagcatctcatctgacgtgagttcaagtacagatcacacgcccactaaagcccagaagaatgtggctaccagcgaaggtaggcagctggtcttcattatctctctttcttcttcacagggctggctatttttggaacagaaataaagtgtgggagtgttagttctattctcctgagtgggagcatatgagatcttaaaaatgaggatgttcagggtctcctaagttttgttgttgttgttgttgcgctgcagttacagttcatgaaaattgatttgacgggattcaggtgcctcaattataaggcaaatgttgttttgtgaaaatggaataggctgaattaagggaaggctttacaatatcatataccttgtctttccgtataaaaaatgatattattttaaaatccttgtgctgtagttgaatgttcctggaggaactttcaaaataggcacacctggaattcaagattttgacagtggcaatatcatagtcatgttatttgtagaacttgagttaatctccaaaatttgggagtaggaaaaaagggggtttctttattattattaaagaatatgtaagaggtccttcctgtcaggacaaagattggtcgcagtgattttcttgatgaagaatttgcatgtggtaatacatgttagaattccactgcttttcaatatggaagcttttgagttactacttacttgtttgagtgtggaattaattgtttctattgtaattatttagtggaaagttgacccaattatagaatcagctctttttattttaatgttaaacatgattaaatgactttctgtctgaaaatgagttgttgctaaactaattgttggattaaagtccagtttaaacatcgacgccattgataatgaaagaccttgagctgtcagctaattttcatgacattgtgtagcgcctgctttcctaaagtctgtgggatgttgcggaagcacacttccagttttttgtttcagatatttaatttctgttgg

SEQ ID NO: 1881781 - DNA, 4001 bp, Homo sapiens
ggagcgctttgcacgtgggtcgctgagagcgagagcattgctcaccgccactcccgggacctgtgcagaacgagcggccccagccccggctctggccccagcgttgactgagaaccatcgccctgcacctgaggcaggagaacagggaatggggtcaccgagggctaaggcagaagccggagggcagcaggtgccaccggttcctggctggattgggcggcacacaggccgcagcctccttcctgggaaaacaagacaggagtctccacctcagcctctgattggccgcaggccagtcttcataggatgcagccaatcagagacctggaaagggcacctgggggtgttaccaaattcttttagcccaatacaaaccctaatgggggctccggagcacttgctggagtcccgtccccccttgtggagtgcatgttcactgcaaaggatctgcgctttcattactctgttatttgtcgttttgtgagttttgctcaattctttgttcaacatgccaggaacatggactcacagtcaggacctcccttccggtagcacacccagtagggcctccagcccacccacagcgtggctcccaccgcccccggggttgcccacggcggggatcccaccacccctcgggccgcccatggcagggctcccactgcccaccagcgccaagcccttctgctcaggtcgcctgctcctgagtggcggggacacggctctgggatcctatggccacagatccgttcctcacccctttgctgtaaaatgcgtttcttggtcaggaacatcgtgtgggaaattataacatctgaataaggcgttcggaaagactgtgggcgacagtgctgaagacagccctggagtaagggatggtgacaagtcccagacaagcacccaccccagagagaatagctctgctctccccaccgtagaaaagcccagttttggccgggcgcggtggctcatgtctgtaatcccagcactttgagaaggccaaggcgggcagatcacgaggtcaggagttcgagacagcctgaccaacatggtgaaaccctgtctctactaaaaatacaaaaattagccgggcgtggtggctggcacctgtaatcccagctactcaggaggctgaggcaggagaatcacttgaacccgggaggtggatgttgcagtgagccgagatcctgccattgtactccagcctgggtgacagagcgagactctgtctcaaaaaaaaaaagaaaaagaagagcccagtttccattggccgccaccgtggctgcgccctgcagtgacgctgtgaccagagccacctccatgagagaaaacgcttgctggggagccctcgtgttctccccagtgccactgtggccacccatccccaagctctcgcaggaaggatggggcagctgggaaggcagcatattgtccattctcacatggagagccccagtgcccgggatggtcctcagtgagcattcacagggcgcggcgtcctccagccgtgagcattggataggctgatgtacacctctgccccgaccaccctgccacgcctttccacgggtgctcctccctccttgatggtctcgtcaaacagcggccgtccacgagtcagcgtgcatccatgcctctggccgtctctcctccagtggaggcgagcaactcacttagtgtggacatcctgcctcccagggcatgtcccttccccagcaccttcaggaccacccgtgcctgggatgtgggcccacaagctgccgcagccacacaaaagccacccagacaccgaggggcaagtagcaccagtgcattggcagcctgcagctcacctgctgagcgggtcaggatgtgacacgggcggtcactggaaggcagaggggccccccagccttgagcctccttcgcggtaagtggtgcaggggcagccatttctctttcacttctcactgtctccagaacaggagaaatatccggagctcaggcctgtgtgtgtttgtgaggccagaggtcagtgaagcctcacaaactcaggatgtgctcctcctaaccctcatgtctcctcctcttcctcctcctcacccgtcccctcctcgttcctcccactgggatatcagagtcagagagctacaggggtagaagggatgtgggggtcacacgggcgtccgctcgagccctgcctgggcgctggaggagggcctggccatgttttctttcctagaaactctcatttgatcctccgaagggagagaagggacgggaaggaacagaggccttgggtgtcggcctaattcagtcccaaggccacccccacctgccatccttggggccactggtgactccacattgcagagcagctgctggctgaggctgggcttggcggtgctcacgtgcctggggtgtgaaagctgcacgcagccctcatctggccaggtccccggctccgactcacaccgtgcttggccagtgtttaactcacacagcgtgatgctctccacttcatgcctggggacggacgtcactcctattccatgtcttgtctttccacaggactcacgtacggactcacatggctttgtgtgcaaaagacgactacacggtcgtaaacgaggcggcccaccccagctctccctcaggtgaggctcagctgggggcagaccaggccagccacgtcctgcagggcgagaggcacccggcccgctggagtcccacgcagccctgacatgcccaggaccctgctcaccccacaccctcgctcgggcacccaccccctgcctgcagtgggggctttccctggggcctcaagactgcaggagaggcaggcggggcctgtggggttgtgtttcttctctccagagttcctgagtccggagcacataggcagaaggagctgctccccatgttcccagggctgctcctgcaggggctcaggagtggggaccggggggttttgtcagagcaagtccccaggggccaggcccagtcatctcgctccaggcagcctgggcctggggccctgaccacttgccccgcacgactcagggccccctccgcacctggacacgggccccacaggccacgctcaggccaccccagggtcaggaacacaaggctacgctgggaagtgccagcgtctcgcacatagaattggtgttgcttctctcttctcaatatccaccccgaataccccattttccacatttcctatattaaactgtattattttgtagttagaaaaaagttttatttctaaagatggcagcttctgtctctgtacccgtggagttagaatcaggaagagaatgtggctcccgtcgcgtggcacctgtggtcagggtgggggcacccagctataagccacatcattcgtgttcagtccctgtcagtttcatgagaagtggcagccgagagggcagcccgggaggtgccacccgagctgacggtgacaccacggtgatgcctggctgagctcagggcggcagcacacccctcctcgggaccgcctgtgtgggtgtcccctgtaaggtggcattgcctgggcccccgccaggccacagttttccaaagactccagggcttggctgctgcatccagctgcaaagaggcctgctgggaaaagagctgatgccacagggaagaaacgcgacccccacgggccctgctggcctctccaaggccccgaccactggacgcagaggaagccggccttgcgtcagggtgagatggatggagacggccacgggcagtgctgcccccagcggggcgcgcctcaccctggactgtggggtcctctccacaggcagcgctgcccccagcggggcgcgcctcaccctggactgtggggtcctctccagagccgcccatctggtcctgagacttggcccaaggctttgggtccacagcctggctctaaggaaagcctgtgccaggccttggggaacccattgccgagcagtcacagaaagctcccggggtccccggggcccatctcagtgaagcct

SEQ ID NO: 1881782 - DNA, 4001 bp, Homo sapiens; identical to SEQ ID NO: 317842

SEQ ID NO: 1881783 - DNA, 4001 bp, Homo sapiens; identical to SEQ ID NO: 317856

SEQ ID NO: 1881784 - DNA, 4001 bp, Homo sapiens; identical to SEQ ID NO: 317862

SEQ ID NO: 1881785 - DNA, 4001 bp, Homo sapiens; identical to SEQ ID NO: 317864

SEQ ID NO: 1881786 - DNA, 4001 bp, Homo sapiens; identical to SEQ ID NO: 317868

SEQ ID NO: 1881787 - DNA, 4001 bp, Homo sapiens; identical to SEQ ID NO: 317884

SEQ ID NO: 1881788 - DNA, 4001 bp, Homo sapiens
gaaatgacaagattgggctggatggtgtttagatctctttccattcttacttctagcttcatttgggggaaaaggacaggattggtggcagttttcggggtctttggattgggaggcagagtcccaccatgttgagcaagggcaggacatagttcagcactgtgggagtgtctcctgtcactcctctcaaaggtgttgacctttgttgagtacatgaagtgttagtgacatggaggaagggaaaggatatgaagaaatctaaaatatggtttctgccctcaaaggatttacaatcgagttggtaaacacaagggcaagagtctaaggccaggagcccagaagatctacataccatcttacacgtgtgttgactttatcaagcaatgggcatttatgctgattggaggcatatatccatggctgggttgccccatccaggagaagatgaaggaatgtcctacaagtcttggtggcttcttactttgtggagtcaccatttttcccagaagagtctgttttctttttaaaatgtcgcttgattttggtcttctgatggcacacattcagctctgtctccatagaatgcatgccctctgggagaataggtaggctgtgtgtaaggagataggagtgggaaaaagatgacaatgggaaaaagcattaaccaaaatcctagggtaagaaaatacaagatgcattcaggagacaactggcaggccagtttggctattatatagcttttaaagagtattttttaaaaaacaacaaaaacctgaaaacataattaggattcagattaagtagcatgatgtagtcaaaagagagaccaaggataaaatctagccctgccattccccatctgtctgccttgagcaagttatttaatctctctgtgtctatatctccacttggtaaaatggaagtaataacaccaattttatagtattttgtgaggattaacttaagcgatgtatgaaaagctcctggcacactaagaatgatcaacatatggtaattttctcaaattctaggatctttctacctccacagtggcttcttctgcaataggcgattaggagagcagtcaccagacagaccttggatttgagtttagctcagccagttataaagtcttcaattttaggtaaattacttaactactcttaactcagttttcttatgtataaaatggattagtcatacttaccttgtaagattattgaaaagtttagaaatatatcatgttaagcacccaatagtacctgataagaagaggagatggagtagaattcaataaatcatggtgatgggggaagaaggaggaaaaaaggagctgttttaattgagaaccttgaattcttgaccaagaagcctagaatttatgttgtaggcagtggagagtcactgaaggtgatttttcagataggaaatcataggataaagatgaagagaatcttaaccttgttgagaatgtgttaataaggtgcacagggcaaggaagaacagcctggaaggagagagaccaaactactgaagacaaaagccagcttgctttatgtatgtgctgtataattcttttactaccaaatggatttcttcttctggaatctaacaattctgaatatgtgagagaggcagagatagaaatgaagagtgagggaaaggacagaggggagaaagagaaagagagagaggggccgagagagatagatacagtagttccctctccgcaggggatgtgttccaagattcccagtggatacctgaaactgcagataatactgaaccctatatatgcagcagaactagcataaatttcattttccttcttcacagtttcacagatagaagattcattcttgccatagatcttagcaacctcagcatatgatttttttctttccttaattcagttgagaactttcaccttttaatttaaaagatgcacttcatggcttctctttggcatatctgaatcccagaatcactgctcttgcactgtggggccattatgaagtcagataatggttactggaacataagcacttcgataccatgacagtgaatctgacaactgagacggctgcagaccatggggcagggagcatatggagcacggatatgccagacagagggatgattcatatcccaggcaggatggagcagggcagtgtgctatttcatcgtgctactcagaacttatgaattgtttatttctggaatttcccatttaatatttttggactgtggttgatcgagggtaaatgaaattgcagaaagcaaaaatacagataagggggactgcttgctgtacaaagatagagacaagaggaaggagctgtcctcaagggccttttgtgtgaagacatctggcacacagatacgctgcatgcaggtggcttgagagaacatgcatccaggtataaatctggcatcgacaggttgaattttcagttgacaggtggactactttaaataaaactggggaattggtgtggaagggatgagaacaccgcctcccctttgttatcccacctccaccaagaagtgcccgaacccctgagaacagctcactccaccctgtctctgggtcatctgcatcatctgctgactgcacttctctcgtctggtctgggaggagattgatttctggtcaacagcacgccccctgacaaaaatgactttctgccatttccttccactccattttcaatctgattgctattctgtttggaggagtgctatggtcggaatgtttatgtctccctcaaattcatatgttgaaatcctaacccccaaggaggggcctttgggaggtacttagatcataagggtggagtccttgtgaatgggatcagtgcccttattaaagaggcccaaaggggctggtttgccctttccaccatgtgaagatgcagtgagaaggcaccatctgtgccctcatcagatactgccagccctttgatctgggacttcacagcctgcagaactgtgaaaaataaatgtttgtggtttacaagccatcagtttatggtacttttgttgtagcagcctggacagacaatgtaggagggtgagtttgtcttcctgagaatggtgcatgacttagcttattctgaaagcaaaatgtctttaagtttagtttatgttttttatgctttttatgttatttttcctttttcttttccactaggcatccaaacactggatgtctaataactaatgagtggcagcatcctaccaaagccagtttctgttgccaaagttgttactgccctaaaggctggtgcctggctttttcagttgagagagggcagcaagttaatacctgtgctggcccaaatccactgtgaggacatgcaggtgccctggagccgctctttaaaaggctgccacctcctggtggagtgtttcccatgtgcaacctaaatcagagcgctgtggatcagtggattctgcggatgacagttgaataaaaatgccaactgaatgttccccaaaagatgatgctctgtattgacgtctgagaggttttctcacccacctttcagttctgaaagatttagttgtcctgctaagatggatgaaatggatgacccccaagataccttatagggccccctttttttggttgtgggagtgtttactataatctcccttttttgttttaaagaccttttagtgaaatactttgtacttcaaaagtatatatatgtatatatacaacatataaaaaatatgaatatttacaggtacccagcacttaccttaagaaacagaatatgatggaatactctcaaaggcccctgtgaatcacacctcattcacatcccttttctatcttcccttgggtatttatgtgtttgtcctgcttttttaaagagtttaaattacatatatatgtatccctaagtaatatattgttttgtttgctgttgtcttttatattaatgtcatcaaactagatgcattcttttgcaacttgcattttttttgtatga

SEQ ID NO: 1881789 - DNA, 4001 bp, Homo sapiens
gagaaaccctctgtggctcatctccttattaatccaattcctgcccttatgggggagtgggaataggaagtcttcctttggtggtacaaagcagaacctctttaaactcaggtctcatagcaaaccagcctccctgacacccctcttcctctactcttgcctctttcttttatgatatcatcttcctttcagtttgctaagcttgtatcctggagtcatctttaattcctttcctctccttctctacctgctaattcttcttccttggcaattactctttctttccccgcccccacatttcagtttccaggtcttatttcagattctttttacttgaaacctgtaataggctcctaactagcttactttcagtgtttctgattcatacccatctgtattagtcggagtaagctagataatgctgcagcaacaagcagccacaaacctcaatggcttgaaacaaatgtggttcatgctacactgccatggtagattataagagactgatctctgaagcatctttactgagtgacccaagctccactacttagaattttgtcagtttctgatagaggaggaaagtggacagaaggatctcacactgacaaatgttctgttcaagaaatgacactaacttccactcacaaccattggccagaacgagtcacatggcagaaacatgtaaacctctcatgggcttggaacgcatggagaaatggatatcggatatcctacactgaaggcaagaattctataatgaagactagggatatacaaggaaggccagggtcctgcattcaagactaagtttctccaaagaaggccaaggtcctctaaggaaggccacggtagtctcctcaaagcactccattacttaaagtcttttggcagttcccactatcaaacagcccagaatgtaaggatctctaacatttaatgaatagccaatatttgtgaagcacttactctgtcaggcactttgctaggttctttatacccattatcttagctcacaacagttattcaggtggacattattacccacatttgacagatgagcaaactgagcattaaagagtgtcttagtttggatttttccaaaatcagaccacagagatgaagacttgggtgccaggaagcccaaggaagggtcggggtagagggtcagtaatgtgatgagtgagtcaccactgtgagcagctggggctcagcacagctgcagaccctctgagagcctgtagaacagcgctccgcactgtgggctaaggagctggactagttttccaccgattcctatccctccttggttgagacttgttcttgagatgttaactccccagcaagtccacctgccctgccacagtagccaagcacaagctgtcagccaggatatacccataagcagaggcgaggaagcttcagttttctggaactgtgccgataaccccgacaggatatgagcattgacagcacatgttacagaacagtgcagtgagcaagatttaaacccagtcttgttccaaaacccactatctgttcaccctgacctcttactacttgctactactggagatagctctgtgctctaaccaaaaaaaaaatggattactgacctctctccaaaccatcttgtccttttccttctcaatcccttttttcatgccgtttcttcttccacttggagttccctttgcctctggcctccaattcaaattccgtctgtgctctgcccagctcagttgctttctccatgaatgaagccctttttgccctctgggatgctgcctctctcctttaaaaccctacaggggtcggccgggcgcggtggctcacgcctgtaatcccagcactttgggaggccgaggagggcagatcacgaggtcaggagatcaagaccatgctggctaacgcggtgaaacccgtctctactaaaaatacttaaaaaattagccgggcgtggtggcggcagtcgcctgtaatcccagctactcggggaggctgaggcaggagaatggcgtgaacccgggaggcggagcttgcagtgagccgagatagcgccactgcacttcagcctgacagagcgagactccgtctccaaaaaaaacaaaacaaaaccctgcaggggtcagttatgctcctgccacactcactctgtggtgtctcgcatagcagggatacacttagagatctttttctggattagactgtagactccttgggggcatggactgtattttattaagttgcttcaaatatttggtggaataaggcaggtaaatatgactgtaaatgtgcacacaatatccatatgcatattcatttcattttcggcccatgttggctgaccttcccaaaggtcacactgaagtctggatttggggaggagaaggttttctgtttctctgcttcctgcaccactaccagcttctctactcacccaacctctggcatctgtgtggccacttgcagtttccactcctgagtaggaacagaagagggagctgactcatgagggcagggtggtttccagcaatttgcagcaggttcctctccacgtgtctccacgtgtcttatctggaaatgtgtacctgtcattattcccattagaaatagaagtggaatgaaaatggtttgctcaattctgatgacatgacaaagagaatgcaattaaccttaaggaaaattgcccagaaacctgacactctcagccatatgccaaggattgctaatgattaggaggtgacaaaaacctttggctttgtttggttcagggctagaaaaaggaagcaactcttcagggctgtcacctggtattcagagttgcacttttcatagtctaagaaaaatggcatggaccgaagagggaaattccacctggctcttcctcgcttacatgtttctgaagaatggcttttagatttctattgcactgcagagctctgcgtcaagaagtaacagcacaatcaatggccccagcctcgtccatggagtcactttctgggttttgcaacctgtgaagttttctaacatggtaaccccaacccctgcttgttaatattgaccttcagtttgaaatgctgagcccaagacagaaacttctggccacagatggtgattcactctaaccaaagataagtggcctttctcattttccccccagatgtgcagaaacagaatattcctaatcaaatccttaacaatgtcttatcacattacttgcttcaataatttcctgcacagcaaatttataagttaattatacagtagacaaaaaaaagcattttcttttatctgtgttaaatgagttgccttctgatttcattgtccactcctttgttcttacatggctaagagtttgtttgaggaatggctttgtcgtgtttcatgtgtttgtcactgctgcttaaatgaaaagtttaaaaggaaaacattgaaaaagttggctgcccagtggcggtctcttgcaagtacaggtaacctaaaagtttgctttcatcttccaggttttgaaatcatcccatttgttaatcacatgtgttccccagttcgctgctgaatgctaactgaacacccaggtcttgagttgatattattcctgtatcaaaattgcacaactattccaggtatactaaagggatagtacccacctgtacacatagaggcaatttaagtatactatgcaaaagtatgtgttcctatcatgaaaattttgtataaatagctgtaagaagattgatcagggctgggggttgggtggcatgtgtgattaatcaaggagaactttctggaggagttaaattttgtggcaatgttggaaggaaaagacagcataaagagccatgtgaacaactataattattacactagatgaggtaagtcagagtttctatggggaaccattaatcatcacaaaaaatttcctgctctgtctattttcttccccatggaacataaaacagagttatcctggtgaaaagcagcttcactggaaatgtcttttc

SEQ ID NO: 1881790 - DNA, 4001 bp, Homo sapiens; identical to SEQ ID NO: 317897

SEQ ID NO: 1881791 - DNA, 4001 bp, Homo sapiens
taaagcacacctgtcactagaaatcagtctagttctagccacgatttttgagtcactggaagaaagtacatttctctttgggccaaacacaagctattttaaggctattaattatggtgacagcagtgaatactgatcaaaaaagaacccctcctcccttataactttttagaaatagctgtttctggcagttaatcacttaaaacacaaatgccaaagtgcattaatatatttattcacatcctcactgtcttaaatgtgtatttacagactccagcaggtaattatgtcagtactcctcagactcccagaaatttcaaatgatccaggcaactcttgtgaagatcaaattttcaaaatcctcaccaaggacatcctaagagaaaaaataaagtactcaattcgacagcaaatatttttgtattacattttaatcaagaacttggtaatatgcctgcgatttcacaagcttttaaaaaactcaattactacacataaaaacaaatcttaaagagatgcagaatgccagtactatgcgtatttatttccctgggcttctcaggaagtatcagcaaaaccttcccaaaaataagctgtggaggctatcccatttattaactcaccttaatagctacagacagagcaacactacgaatgtaccactgacattaaaactcactagagaaggaaccccaatttaaaaggtgataaaaattcccattacaaagtgctttaagacatatcaccctaccttcaggtcacctttatgctcccagatggtattcagctagcagcagtctacacttcaggcatccatcttccacctgaacaaaaattagaactggctaagagaaaccatacacttaaggctagcagggtcaagatcacgcgtggaaacgtaaaagcagcaactgttacttatgcagctcctacaccaaaggtatcaaatttaagggcaggaaaaggctgcaaagcgtttaatttacgccttttttgacaccacattcactagtttccaaagtgaatgggcaacacaaaggctgacactgcgtgaggtaggctttatggcataaggttgctgactggctgacagtaatgccgattacagcctaaaaacggacaatacatttcagagaaattttctcacgatttaaaatccgacttaataatgaaaagtgaaatgcgatgcgttttaaatggcgactggtcttgcacgaacgtgaaaactcacctgtagggtaggtgatcactcccgacgagcaccgcacgtggaaacagctgtaaccaggcacgctgcttttaagttattttatacgggggcagggcaagcataaagtcagttatacggtaaggccttttcactgacgaaaataaaaccaggcttatctggagaactccctggcatagtcgatgatgtaaacacaaatcgacgaagctccccgtttccaaacgtgggaacgcaggcctgaggccaggccgctgcccttgttcacggccccggacacttcggacacaggccgccgcagtcgactcaccagactcagggtggccgcgttcccccgcccggcgcccctgcgtgagagaccacgcggccacagccaggcgccatcccagaggacccagagcaaaaaccacagcaagctcgcaccaaaaggaagaaaggacaggcttccgtcccacaatgcttttctacaagtggaaggacccactgtccgagagcgcgaggggggagcgggctgtaccatcggccgctgcgctatggcgagacgccgccgtgtggccggagggagaagtgccagtgagggaccgaggggcgtgtcaccaaagggaggaggagcctgggttctcagcccgagtcacctctgcggatgtgtggccagttctttccacagaggaggtatccagacatccccccacccgaccagggtcaagagcatatgatcagtgctggcagcggcaggagcccaaaggactttagaccacgtattttgggacccgacagaattcatgagtccagctgaggaagagtagagtcattcattcgaaagatatttagtcagcacttactatgctccaggccctggcctgagtgcctgggaatcaggtgtgggtgagccaggcaaggtttctgtggtacattctgcttgggtgagtaggccactgaccaagtgagcccggatgctgaaattctacaatgtaagtgccaggagggcagcaaaagagggtcatgccatagggtagcgctgtccgatggaaacagtgtgagccatgagtgtaattttaaattttccaattgccacataaaatgtgaaaagaacgccgggcgcggtggctcatgcctgtaatcccagcactttggcaggctgaggcaggtgatcacctgaagtcaggagttcaagaccagcctggccaacatggcaaaaccccgtctctactaaaaatacaaaaattacttgggcttggtggcgggcgtctataatcccagctacttgggaggctgaggcaggagaaatggcttgaacccgggcggggtgggggtggaggttgcggtgagccgagatcatgccacttgactccagcctggacaaaagggcgaaactccgtctcaaaaaaaaaaaaaaaaaagtaaaaagaaacagatcaaattaattttaataataacccaacatattttaaatatttcaacaggcaatcaatatgagattattaataagatatttcttttatatctactaagtcataaaaatccggtgtatattttatacttccagcacatttccgttcagactagacacatttcaagtgttcagtagctcatggggctaggaataggaagactggaagtgaactccgagcagatgtgtgaaggcggttatgcaagatctggagacagcaggccttggccagtgtggctggagtcgagtaaggagtgtagagtgacaagatgcagctggagagccaggcaggagcaaggcacttagggtcttgtcacacagggcaaggtgttgggattttatgctgaaatcttagagttgattaattatcaccacaaaaattaagcagagtttgttaattggcttttttcctgataaccataactccttgaagggacaggacaagtggcagcaagacaagttgtatgataacaactaggtctccatgtttctctaagtcctagcagagattcatccagagaccagttttagcacctttcgttgtttctttgaagcctacttctataaaagaaagaaggaaagagaagaaaaggagcttatctccgaacacatcaagttatatacattaaatacagctttttgtatctcaatcatacctcaataaagtggtttaaaaaaaaaagaaaattcaggctcacagcccagtggtcatcacacaaggactagcatgaataataaccaaatcaatctggagaaaatgactgtacagaattagtaaatgtataattattacaagaaggtaagtaactccagacttcattaggaagtcactgtaacatctggggcaaaaggaagtttgcagaaggaaggcagtaacacgaagattgtcctttaaagacagcgaaaggcacagtgtggggattataacatgccttagtcttgccttcttgctagggaaagtcagtgacatgttttggctgtgtcctcacccaaatctcattttgaattgtagttcccatactccccaggtgttgtgggagggagctggtgggaggtaattgaatcatagggttggttaccttcatgctattttcgtgatggtgagtgagttctcaggagatctcaccagatctttgcttggcacttcaccttcctgctgccatgtgcaaaaggatgtgtttgcttccccttccgctatgattgtaagtttcctgaggcctccccagccatgctaaactgtaagttaattaaacctttttattttataaattatccagtctcgggtatgtcttgattggcagcagcatgagaatggactaatgcagt

SEQ ID NO: 1881792 - DNA, 4001 bp, Homo sapiens
actctgtggaatcctcttgtcactagtaatctctaattttgtgttaaatagattttaaatgttcttttctccagtctccgataaagaaatggaaaagaaaatgcttcactcaggaaagagtgtcatatgtatgggaccttatggctttgtaacttaccttatgaggagctgggaacagaatccctgcccatccaaaaccctcagccttctcactgccactggaggtaaaaaaacaaaaacaaacaacagcaaaaccaaaaatcagaaagcaaaaaaaccaaatcaaagggccaaaaaacaggtgagagcaaaactcaaaaaaactgggaacagatgattgcttgaaccttttgtttttgcagcctcaagtgtctcggttggatatggaggtaaagaatgaaaatgttaagccatctttcaatcacatttggtaactcctgtcaggaatactgtattacagaaaagaaaagcctctacaagcagaaatgctaaaatctagcataataaggtgtcacctcataaggcaggcaagactttgacaataaaacaaagctggacacgaaatttgatcagaaattcaaaacctgagtcaatttcacagaaaattcagaagataaaatagttttattcatagcctaggtaaagttcagaaatttatattgcactttggcggttatgctgatcctgtgtttggatggggtcacaatagcagggaaggccgaggcttcctacagaaggtcctttgtggcaaatcactatgagaggaaactccatcaaaagtcgccaattgttcatttcatttctactgtgctacggaagcctggttttgttttaagggctaacgtcctaggttttaagcaattttttttgagctttggctacccagctaacaagcagtagaatagtcaactcaaaactacgtctgatgccaaagctctaactctaaaactcaatatagagttttttttctgtgacacctcccctcgtgtctcccctaactgcgactcgcattaactcgctgctggttcccagctggagagcacagattgcacctgctccgaagcccagcggggctcagtgtcgtccgcagctcaacctcggctgcctgtgcacggacatcgggacccaccaggggtcactgcagcttcagagctattgtgcccctcagtcctggacgcggccgaccgcgcggagggcgtgggattgggaccgccgaaccgtggggtccgagcagcaccgcgtcctcttctccccacccagcctccaggtctctcgggggaaggacgcagcgagcgctggactgccccgcggcttgggcgcagtgtgcggcttggcagcgtggactcgccggcacctcgccgctgggaccacggtctctgccccgccctccgcccccagctgataccccgcccagaaggggctcccctgccgcggccagcgctggactggggggtccgcttcgttccagggctttttgcagacgcctggaccgggcccacatgcacctgggctgctcccgcccggggcgccaccactcgcgcggccaagagaactttccccggagcctctgcggcctggcgcgcccagggcgcaccccccgctcgcccgtccgccgcgttcccagctggggcgtcgctcctccgcccgcaggtccccgcctccccgctttgctgaatgtcctgaagaagccgtattccgccgccgcggcaggcattcccggagggagagcttgaacttggctacacacggccacccgtaatgagctcgggagtccccggacgggagccacaccccgcgacgagctgacctcccctcgctggtctgggtaaggagcctgctgccctttccgcctctcttccggctcctcggcgcttgcggctgggggacggggtagcggacggagcgacgaccttcgcctctgcccctgcgcccatggtcggggcgtcgtgggtgctcctcacacaaaagaaaagccgagcgcttcatactcggcggatctgacccggggctgcggggcggggtcgcggctggaagtgcgcgcccgcgggggactccgcaggccgatcggacgccaggacgtcggggccgcgctcaaatccgtgcggcaggagggaggtgcagcgcttccagggttttccaaggccggggagagcctcgaattcccatcactcctttttctggtctcttgcccccagtgccaggagacttttgtcgtccccaggactgcgggaggggccccgcgcccccgccttcggaggagctcgagccgcaggatgcgcggggacgcgccaccgccctccgcgcccagttccgccggcgcttccccggcggctcccgggcgctgactctcccgggcttttccgcctttctcgctcccgccccgccgggcggttcggcggccggtccccggaccccgccgggagctgctcgtctcaccctcgccacggcgcggacaataaattaatgcatcgcgcttgagtggagggggcggctgggcgcctcggtggtagctttctctcctggctggagacgaccacaaccgacatgggctgtttctgcgctgttccggaagaattttactgcgaagttttgctcctggatgaatccaagttaacccttaccacccagcagcagggcatcaaggtgggtgcggcccggagcgcgttccgggggttggcggcagggcgggtgcgggggtccatcgctttgagggctgtcaccggtgggtcgagggcggcggccgcgactctgcgcggtggggaggagaggccgctgtcccctgcgcgcagggagagggtggacgtaccagggtgagttaactttgagttccttcataaagcaaagttgagtttgacgtttctaagtttactcagcacaccggctcccagcagcaccccaaaactcttccccaaaccggttttctccaaaagcctctgggtgccccgcagctctcaaagaggggcagaatgggttataccagctgcgtcccaccagtgtggaaggcatggtttccctcgactttgttgaaggcgttttccttgacagtgttattagggaagtgaactagttcactcgttgaaacgcattaatgggtcattgtgattgttttgcgtgggttcgtagttgggtaatgctacgtttggacggaaaatattttccctttctacagcgacctgggtttatcctcacatttaagtaaacatctctcaaagcgacccagtaataactttgctcctgtttgtgggtcattaaaatgcaatcactacattaacctagagagcccaaacaaaaaggcagcagagctcgcagagatcctcttccttacattggatgagaaggtacgtatgtttgtagtgacaacctgaccgacgcgcctgcgtgcttgttttgcttttgcaacagtgttaactacctaaaggagatctaaatccggagcgttttgttgttttgtttatctttctctttcagttttagatcgctaaggcattttagataaggcaacagctgagtctggtgaagggaaaccgcccccccgcccccgctctgatagagctggctttctgagaaatcgagttcaggctgccaagtatcctctcttagtcgcttcatctcagaagttaatcataatggggtaggccctgggcatttccttttgtgaatcagtttttacatagttttatgcacactaggataactattcctggctaaaagtttcagcgttaatgttgccattcttagtgtacagaattccagtttcataggtgtaattcttttgcgggagaaaggagcaaaaataatcagttaaagctacaagattgttaaccctttcctttaggaggttgttttgaatattgtttccccagtaattatactgagcaaaattcagttcgattctcattcggtatttcctttcaagaccaataaaatagactcttttcggggagggtgtacattttgtatttttaacttttctttatgttccaaaatatttctcctctcac

SEQ ID NO: 1881793 - DNA, 4001 bp, Homo sapiens
aaaacagaagtcaagaaacttttttttttgagacagattctccctctgtcacccaggctggagtgtagtggtgccatctcagttcactgcaacctcctcctcccgggttgaagccattctcctgcctcagcctcccagggagctgagattacaggcatgcaccaccatgcctggctaatttttgtggggttttttttggtagagatggggttcctaccaaaaagaccatgttgcccaggctggtctcaaactcctgggctcaaggggtctgcccatctcagcctcccaaagtgctgggattacagttaggagccactgcgcccagccaataaataccttttttttttttttttttttttttttttttttgagacggagcctcgctctgttgcccaggctggagtacagtggcgcgatcttggctcactgcaagctccgcctcccgggttcacgccattctcctgcctcagcctcccgagtagctgggactccaggggcccaccaccacacctgcctagtttttttgtattttttttagtagagacggggtttcaccatgttagccaggatggtctcgatctcctgacctcatgatctacctgcctcgcctcccaaagtgctgggattacaggcgtgagccacggcgccccgccaagaaagacttctaatcaatgttttgttaagaagttactagacagtcctccatccaaattcactaccagacactgatataatagtatgagtctttagttcataatactcaatgttactatatttttaagagtcctaaaagctttggcaattttggcaattttttcttcattagtttcaaaatttctttacagtcataatttctaacacaattttaacttttttactttttttcattgctcaacttgttgctagattttcagaaattacaaggaaaaactgaaataatagagccggggtcagtgtcaacatcagcagggcacggggcagggctccctgtcggagtggcagtgggggctcccgcaagctccatctccttcctgtgtgcccctgccccatgctgctgccacttccctggtctctgctggcttccctgccaccttccagacccttcctttcgtgtggctaattttcaggaggggcaggggcacaacctagcagctccaacctatgaaagactttgtcagttggtgtgtcaaagccagcatcttttatcaaacagacaaaccctgaacgctcgtggtttagcacgtgcttcttcctccaggcgaagccaagtgctggccatgggcctctcctccaggaagcgactcaggaccggccctctgcagcgcggcccagtgacccacattcattctccaagacctgcgctgctgggcctctgaggggccccggaaacatccggtggccacccatcccactggcattgttcccacgagggtgccaatgactgcgctcctggaggggctgagttcgtctttgggtccaggaggtacccaaagccgcttgtctgctggtggcaggtatgacagacgtttgattcccaaccttctccgctttggtttcttcgtttactgaatgcccggcgcccacctcagtccgcgggaaacgagggacgcccctgccacactgcagtgcggacgacgaggccaacataaagacagcaggcatcagcagaggatggagacagcggctctggggctgtcttctctccgcaggttgggaagggaaaggagagaaaatgcacgcagtcacgctcggcggaggcgtccaggactgcgcccgccctggggaagggcgcacgcggtggtcgccaggggcagcgagagggcctgagttgggggggctgggacggacaagaagccccccacctcggcggtttccctgtcctgctggggagcggccatggggcaggtccccgagctgaagtcgctcggccgggagacgagtacccgccccgcgggagggcccggacccgtgcttccggcgccgttgccggaagcggaagtgcccgcgcgctgtccacttccggccgggaccccggaggcggaggcagcgaaggcggagggggcggcgggggcggcggcggcggcggcggcggcggcggcggcggcggcggcggcggcgtagccgtagagggtgagtcggtggcaggtcctgacggccggcgggtccttgggaggtggtcgccgtctttcatccttgctctccctgtctctggcttccgcgggggcgcgtagggggaggccggaccgggacctggagggcggggaggccgttccggaccccgtggagtatcccgctcgtgcgagtgtcctcggcgcaggtgtcctccccggcacatgtgtcccccccaggcgtaggtgtccccttggcacatgtgtccccacaggcacaaggtccttcctggtgcaggtgtccccttaacagtgtcttcccccacgccccaggcgctggtgtccttcctggcacaggtgtcccccctcggagcaggtgtccctccttggggcagatgtccctccaggcacaagtgtccttcctggcgcaggtgtcccctcggcgcaggagttctccaaggtgcaagtgtcccctcaagcacaggtgtccctcccaggcacaagtgtacttcctggtgcaggtgtcctcttgacggtgtccccccccaggcgcagttgtccttcctggcacaggtgtcccccctcggaccaggtgtccctcgtcggagcaggtgtccttctgggcacaagcgtccttcctggcctttaggaagctttcaaggtgcaggtgtcctccaaggtgcaggtgtcctccagcggagtgtcccctccgtgaggtgcctcccagcacaggtgttcccctcggcgcaggcgtccccccggtaaagggtccctcctggcagaggtgtctgcccggcagaggtgtctccctggcgcaggtgtctccgtgggtgctgatgttccccgcagtagggtgtccccccgctcggcggagaggctcacagcggagccagcgccaggggaaggcagtcagaaaggccctggtaggggctggacctgggtctctgtttatggtctctgagttcctctttggcttctgtgacccaaaatctttagtcttcaggctgggatggaagcctctgcggtgcgttttttaactccagattttccccttttccacatgagtagctttattctgactccaaggcgagccctgcttcacagctctccactcacattgccttggcttccacccacagcgtgacagacttcactccagccttaagatgggcgcagccacctcaccgcgtgccccagcagagcggctgggggtccacttcttgggttattatccagccctataatcaaaatcatacaggctttaatgtcaatggaaatgctgatgataatgtccaaacaaaataagaaaacaaaagtgtgcacctacaaagtcatataagcagtggaatcttagctttaaaagaaactcaaagggaaaaaactggaaggaaacaagccctgttggagggagttgcccctgagtgtcgggatttaaggggagttgtccctgggtggcgggatttaaggggagttgcccctgagtggtgggatatagcgggggttacccctgagtggtgggatttacgggaagttgtccctggattgtgagatttaagggaagttgcccctgggtagcaagatttaagaggagttgcccatagatgatgggatttaaggggagttgcctctggcatctttgtatttttgtcctgtccagattttctacgttggtatgccaaatttcataatcagaaaataaagagaaaggaaaggttgcaatgtaggtccagatgaaaaaggagaagagaggtgtctgaaagcatgtgggcatggagaatgaaaaattccaggagaaggtgaatctttttaatattcatgaagatgaaaatcagacagctgaagtcaaggggaacaggtgtatcggattccctcattgactgatgctcaccaagc

SEQ ID NO: 1881794 - DNA, 4001 bp, Homo sapiens
ccaccaaattatctatttaaaaagtaatcagcaacttaaacttcaggcagcagtataaaaaacatcctcacacattgtggatagaaaacagtttcattcctcttttaatttaaatgcttataccagaaaagcaaaggctttttttcctatttacataagaaacttgtagatctgcaaaaaagtactttgcccccttttacagtttttgattatttgatttgaaagaattccctgtaaaatgaagatgcacttttcaggccgggcgcggtggctcacacctgtaatcccagcacttctggatggcggctcactgcaagctccccctcccgggttcacagcattctcctgcctcagcctccggagtagctgggactatgggcgcccaccaccacgcccggctatttttttttttttttttgtatttttagtacagacagggtttcaccgtgtttgccaggatggtctcaatctcaatctcctgacctcgtgatccgcccacctcggcctcccaaagtgcggggattacaggcgtgagccaccgcgcccagccctaaaatttttacaaatatcattacaatagtaaaagacagtaggtgtcatgcaaaaatgttaaaaccttgattttttcattcggcttatgtaaaattgataatcacagaaagagctcacattttgagaaaaatgtgtcttcccattcaggaacacagaacccacctcccacttccaagtttccttctaagaaccttcagtaaagaaccgatctacacaggtggatacggatgtaaaacggacagttttaggtgagagcttttcgctactgaaaatgactcacggttttttttttttcttttctttttttggagacggagtctcactctgtcgcccaggctggagtgcaatggcgcgatctcggctcactgcaaactgcgcctcccgggttcacgccattctcctgcctcagcctgccgagtagctgggactacaggcgcccgccaccacgcccggctattttttttttttttttttttgtatttttagtagagacggggtttcaccgtgttagccaggatggtctcgatctcttgacctcgtgatccgcccgcctcggcctcccaaagtgctgggattacaggcctgagccaccgcgcccggccgactcacggtattttttgatagaggaatgagttctctcattaggcacctcctataatgtatataacatcatgttttaaacgtgtaggttaaaaataacactgtgtatgcttagcttggtgagttaaatcactcacattctccaccaagcgctccagctggggaattatgggggatgcagagcagctgaggctccgtttggcaccacccctctgagggtgccctccgaggccccatcccaggggctgcggggaagccgggcctggggaccccctcccaccctgggctgagcccacaccccgctgcctgtgctgcctgtccccggcttccaggtctccgctcctgcgcgccaggcagcgctccacttccgcggcttcgcccttgacagcgccctgtggttcttccgattcggtaccccgaacccctgtagacgtggcctagggagccccggaccgccggcccctgcggctcccaaagccgaataacttcttcaaggtggtgagttcttctcagacccccaaccactggctcctgagccgcggcagctccgtgtcaccctttcactccccctcgccccacacccagccccaaatccccaatccaactccaaatcccctatccaaaccccaatccgcgatccaacccccaatccgcgatccaaaccccaatccgcgatccaacccccaatccgtgatccaacccccaatccgtgatccaactcaaaatccccgatccaaatcccaatccgcgataccaagtctgcgatctagcccagaatccgcgatcccgcctggtccgcccttcagcagcgacactggcggcctccgacctctcagacctagtgagcctcgcaaagccgcccggctcccggaagccgcaggtgcaggcgccgctgggctcgcgggttctcctgggctggcccgggctgccccaggaccacggacggaaaatcgcaggcgcgcggcccaccccgccttaaggggagggcccgtctggccgtgtagcccgccccgctcctccttccgaagagagatctggtgctggcatgggcaccccgcggccaccggagtggcttcccggataagcctggcttgggcgctgacgctctggccctgggggctgcctggctggtgtcaggtagcggaagacgcctggagagtcactcgctccttcccccacccgcccccaccgctgctcgtgccaggacgcgcagtttgcagttgcagctcaggcactggcgcgggatggcggagcttcccttggatggcgtcagggtcaccgagtgcacagcctacctggtctgagggtctgctcctcctggacacctctccggatcctgatccctggcgctgggcaatccacaggatgagactcatcggctgctggcgaagccgaccgcctgactttgctgcctgggcggctggccccgggatccgcgctgctggggacgcgggcctggtctgcggtgtccagccacttgctgcgggcgcgccacgtctaggctggtggctgcagccgcagctccgcgcctgcgggggctagtgggcctggtacctgatgtcctcagggtcaagtgcatcgctcacccacctgagggtctgctctgccttgacctcctccaagagcgcaggggccaccggggaggcaatttaggaatgcctaaatggaaggaactatcctttctctgtctttaagaaataagtggcttttgttgttgttgtttttgtgatacccagctacagcagaaagcaaaggggatgcagaggtgaaggtccacagccagttcctctactgattccctccaggcataaatgttcaatctaacggctttggttggcactttcacctcagcacttacctatgcctacaggtttgttcaatcgcagctcttcgattttgaattatttaatacccaattattgcataatttaataaccaaactattttaatagtttaccatctctgcaaccctgaattaattttttctttgtttataaaacaatcgctatagtaagataaaaatcacaaaacacttccacatttcattgggttaaaaaagcattaaaacattacacataaaagataaaaaacatatttgtttcatcataaaaattatggctttgcaaaatttttttacatttagctacattcttacgattctttaacttttcactgttattttatacatttttaaaacaatgcataccagtgtttaaaaaataaatgcagcatttcatctaggactgaacatataacgctggtcagctttttcagcatggtgcaggtgtgggcctcaggctgctttctgtttacatgtatcaaatgacatgaccatcttaactgcacagataccatcttctcggcttctttcttctcccccaaaactatttaatgttgctttaatggcaacatcaatttaactagttttgtaatttctgtacttaattgtcacataacattgtatcagttcttttttttttttttttaaaaaggaaagcatacaatcttagttgctgggccagttcttctgaatcaatttgaaatcaccttttttctctttcataataactacttattttaatcaatgagtcaacaatcattagatattaacttattttttctagttaaaattttgctatctttcaaataattccaactcttacacacacatttaatgtacataactgtaacatatacatacataagcacaggttaagccagatctaacatgaatttagatatgccaagaaagccacatgaccattatttacataaatatgaccagtgttcacatttatcaaggccaatgaatattaaggtgattgcttcaataagaaattaggtgaaga

SEQ ID NO: 1881795 - DNA, 4001 bp, Homo sapiens
acccggctaattttgtatttttagtagagacggggtttcaccatgttggccaggctggtcttgaactcctgacctcgtgatccacccgctctggcctcccaaagtgttgggaaaacaggtgtgagccaccgcacccggcctatatcccatctttattaaataaataccacttgtaatgacatgaatactatctcaaaggtcagactaatttgaagccttttagaacctaaaatccacaggtaaaacaccttaatttatggtcactcatgtggaaggtcaatgttgctactcacataagctatttctaagttccccaaacagatccccatcattaacttagagaaaagtccactataatagctacaagatttctgtgaaagacgatcatgttttatctttgtttgcgcttcaagtgttaggataaacggacttttcccaggtgcctctcaccatctcattccttgcctttcctccaaaacaagcaaaactaaaacactaaaaattttagtctggtccatactagtcaataaaaatctttcctcttgtaaacactttatagcacgataagggacgtagtttgcaaagatcatctgtacatcctgtgtaaaaaataaaaacgcatggcacaccaaacccagatccacttcggtgaattccctccagggcccaaatgtgtgcattatgcaacagccagcactcccgattgtaatccctgtctgtgatgcaatgacaaaatataaatggcttgggtataatctgctcagttcgtaagtagtaattcgcaagaagccaacgaattaaaagaattcccaaattctcaggaaccttgaaaatgacaaattgtgtcacagttctgtgagaatcacaatgaaaactttcccttctggaaattttttagaaatatgtccctccggtcccaatcccccaaaaacccgtacacacgttttaatttacgttaggaacggctctcccagcgggggaaggtgacctgcatcaggtggttatcttcgaatccacccgatacgatacccacgccgcttcccagacgctgaaaagccagtgagatgcttcatcctttctccccaaggacagtcatgggagtcagtgtaatccagacccccgagccataaaccacccagggttcaaggcttcacctcctgaggcacaggcctcttgaaaaatggcataatggagagctgagaacacaattaggacaaaactgcaacgaccagcattccagaggagggagaatcatacaatatctgttccaaaagtagttacaggtaaaggaaggcggtcagagcatctctggaggccacctggtcgggtgaaccgagtctaaacgctgaagttccacacctccccgagtccgcgtctccccaagccaaagcaatcagctcgcacgccaagcatccaggtggggagagggcgaggggagggggcggcaagccgcagctgcgaaccggcccgcggcggaggcgagcgaagacgggcattccctcacacaaaatggtggcgccgaggcggaggccggcgcacctgggggcgccacacgccctacgggatccccgcagaccgccgccagctggacgcgagccccgggtccaggcggcccgcactggtctgcgccaggcccagcccgcaggggccgcccacagccggtggcccgcgtcgccgctcggtgtccgcgggtctggtgctggcgggggcgcggggcccggcgcggccgtctcggcctcacccagcggtccgcgccggggagagggagcgcactcacctcagacgcgccccgggagccgctggaagagcccgggaaaggaggcggagccgcgcgaatgaatggagccggcggctgctcgctggcgacctccggccggtcccaggccgcacagctcgcggctgccagggcgagtgcggctgcctcccgctcgccccggacgcccggctcctcgtcgcgggtcggccgcggcccaccgtgccctccgacgacgtgacgcactagcgccgcagcgcctccagccttcgcttccgctccgcgcccgcgcccaccgcgaatccccccgcccgccagcgcggagcggcccctcctcggagcctgggacgccgccctgcctccctccagccccggctttcaggcgccggcccggcaggtgcgggcttggccagcccgggggcgtcacgcggcccccgcctcgccacccgcgccccctctctccgccccggccgccgtcacccggcagcgcgacgcccagctcagggcaatggcctggtattaaagagtgaccttggcttagatataaaaatagatgcggttaagccgcgggggctgcaacgctgattttgcgtattcctttaatgccgaccttcgcaggattctgttcgcatagcccggtggagttctccagccccgcgtaggccctcctgaaatttacccagagtgggcgcggccatcccggcctcgggacaggggtgcagagggcacgggcgaggaccgccggcctccgccccaccactttcatcctaaacctactgccacttaggtgcatgcaagttagaatcgtgggctgctttcacagtctacagaagtcctagagcccggactttcatctggagatgtcagggaaataccacattcctgcgctgaccttttctctttcaccgtttaaccggtacagaataaccctgacccagaaagacaacagggttccatccggctttcctcccgtgcctctcccagctctattctaccgtcttatggcctctggcgcctttgctaattacacactcctactgaaaattagccctccagcatttaaaacatgataaattgtctttaaggtaatgcgtattgtagtctaaatatatttaataactgtattgagaaacaatattgtatctaagtattaatgtcaagactttcttttactcatcatccaagaaccgtagtattatgttcagctcatccagaaaagttgaaaattgcttctttcattcctgggaaatatttagcaatcacaataccaactttcacgaatttactaatgattagcaaaattagcaagatcaaaaaatacttcaaagaatgcttgttgatatagatatatttgaccctgatttttaaaaaaagcttttctgccatataagaatctattgtttcatttgtataatatttaattagccaaaatctttactattacacatcatttaccattttaatgaaacttaatgaattagatttaatagagcaggaattttgggtagttgggttctacccatagccagtgatgaatgaaattatatgacttgtatttacatttctagagctatgtgtaagtaggagtccccagggtaatcccaaacaattgccatttggggaagctttggctaccagactatgccctacagatgttgaagcctcaggccttagtgtaaagctaaccaatacaacttgttgataatatttgaaatgcctgggtgtgattgactcttagctattgttttagaagtatgcgggtatttgtgcctgggtcagggaggcctggctcccagatgtctggctattctggtaggagacagaactacattcacccagacctataaaagaaaaggtccaatttttttttttttttttttttttttttttgagacagggtttcactcccacagcctaggcaggctggaatgcaatggcgcgatctcgactcactgcaacctctgcctcccaagctcaagcgattctccggcgtcagcctccggaagagctgggacagaggtgcacaccaacgcacctcgctaatttttgtagagacggagtttcgccatgctgcccaggctggtcctgaacttctgagctcaagcgatccgcccgcctcggcctcccaaagtgctgggattacaggcgtgagccactgcgccaggcctgattctcttttccctacttgcaaatgacactatttttgagagtttttggttttttctttttaaatcaccattgacttccc

SEQ ID NO: 1881796 - DNA, 4001 bp, Homo sapiens; identical to SEQ ID NO: 317929

SEQ ID NO: 1881797 - DNA, 4001 bp, Homo sapiens; identical to SEQ ID NO: 317930

SEQ ID NO: 1881798 - DNA, 4001 bp, Homo sapiens; identical to SEQ ID NO: 317932

SEQ ID NO: 1881799 - DNA, 4001 bp, Homo sapiens; identical to SEQ ID NO: 317938

SEQ ID NO: 1881800 - DNA, 4001 bp, Homo sapiens
gtactgagaccagcaacttgggaagtgcaggacatgccttgcaaagacagatactttctgggagtaatttgtctgcctgttctgcagacacttggtgataccactttgggtatgttatgccctgtagtagagacagtctgctagctagacccacatctgccccgcatcttgttttgctattgtgaaaccaaacaaaggggtagcccgggggggacaggggagggcgaaagaacacaataaggtcacagggccctgctctaagtgtgtccctgtgcacatgccataggggttggggaccagagacaagatccccctggtgctgaggaaacagcaatggatttagagccccgaagactggcatttaagttctacctccttactggctatgtacgtttgggcaaaatagtttaccttcagaagccctgttgcttcacatgtaatatgcaagtgctaacaaagccatctcagggctggtgtgaggaataaatttaacatttatttattattcactttaacagtgaatgcaaaagggcttagttgaagagtaaaatactaaaaacctattgtggttaagactttggctgtgagtcagatgattggtgtgtttgactatattattgtccaccaacattcagtgtttttcccgagtcaggctgggtcatgtgacttggccaaatgtgagcagaagtgccccatcagttccaaggggacatttaaaagcttttattagcaattccgcagctctctttcctctgccctagggatggggggagcatgtgtgaaaatggggccctggggagttggagacctgagtgattagaatgagcacagctcccaggctactgctggatgggccccttataccagccggtttaggccactgggatttgggggttgattgttactgcagcaaaacctagcctggcatcaccatacagataggtgccgtttctttatgcagtttaatagaaaaacaacaaaacaaaacactcacaaagaaaacacacagaaaataatagcaaacacaacgcagccttggggagatggcaggcgagcctgagctgggtgctatttgctgctgctcttgggaagaggtcggtagaccccgaccaccacagcgtggtcccgctcatagggctccagggtcagctgctcttgaggcttcaagttctcctgctgcaacttcctcacctcagaagcaaacacagcctcggcggatgcggtggagtcgatgcagttggccttgatggagatgagaaagtggcccccattgcgcaggaaggtgtgggcgttcagggccacgatgcgggactggtccggctgggccacgtcggcgaagatcacgtccaccatcccgatgagcatgcggtacttgagcgggtgccgcgcgtcctccaggaccggaatgatgttggtgcgcttcttggccacgttgaccagatcgcggccggcgcggtgggagaactcgacggcgtagaccaggccgtctgggccaatgatgtcggagacatgggagacggtggtgcccgacgcggcgcccaggtacagcaccttggacttgggcttgatgtggatctggtccaccccgcccaggatggccgcggccagcttagagcggaacgggttccacgtgcggtactcctgcttcacgccgccctcggtcaccgtgacgcgcctctcgccgtacacagactggcccggcaccatgttcagcgtgaccagcgcgtcctccgccccgcggtagatgaagacgccctcgtgccggtgcggctccaccgacaccaccatggcgcccttcctgcggcggctcttgctcttggccacgccgccccgccgctgtccaccgccgccgcgatccttgccgtcgccgccgccgcgcccccggccccggccgcccccgccgaagccgcgcgcccgcgccccgaagccgcccttgcccccctggccgccgccgtcgcccccgccgcccttgcccgcgccgccgccgccgcctcggcccccgccccagctgccccagccgccgcccccgcggccgcccccaccgcccccgcgcgagctcgcggccgacttcatggcacgcaccggggcgggtgccgtgggttaccggtgcctcggggcgggtgtcagggggctctggtggctctgggtggtcgtcccggcggttgtccgcgggtttagcagcggaggcgggcggcgggcggcgggcggcgggggcaggacgggctctaccgcagtgcccgcatcccggagccgccccttgacgcagcggctgtggcgcgattgcatcacacccgtccccgcgaccctgcggcccggaagccccgcttcccagcccgcgtgcagacgcagcctgctcctcttcgctcaccctgccccttccccatctcccgccttcccagggatccctggcacttccctgggccacagggacgggggcgtctctgctgcaggagagggggaggtaagcatcagcgtcggtcctggctgtgccaccagttctgggactattgatcagcaaggaagtgttgttgattcttcagtgtgaatggggatacacagagagccaaaatgtcatgttcatcctcgaagtctagtctatgcttcaaagtcactctctaaatctgcagcattttcttgaggaaagaaagaaaaagagaaaaagaaagaaagagagagaaagaaaagagagagagggagaggagaagaaaagaaaagaataattgggcagcaccaagggcagcaacgagaagaaaagaaaaaaagaaaagaacagaaagaaaataaaagaataactcggcaccaccaatggccccaaggccgcaacgcagaggctttagggtttagtcagcaccagggacagcgacagcagttggggcccccgttttggctactgctaggggctttgggaaccacacaagagctggggaaagtaggataggtggtgaaacaactggccagcctcccgttagttgaattaagtgtctactcgagagagagagagagagagacaacgcgcacctgaagatcggagcatttactgaacacctggtatgtgcagtatgacttccgttccatcctggaccacagctcttcccgtctcatactcatggacgacagtgccaggtctgattttccctgaggactggagtgtctccttaatggggaccagagttttatacactggaatgtgaacaagggatcagtgagtgaaatgtatgattcctgaggttgaatggttcacataaaatactctacttagaggtttccattcttgctataaggtgaatattttccaaaatgatgaactacacttggtgtctgtgagggttaattttatgtgtcaactttactgggccatgggatgcccagatatttggtcaaatagtattctgagtgtttctgtgagggtgttttttgatgagattaacatttaaattggtatattgagtaaagctgattgccgtctacgatgtggctgggcctcatctaatcagttgaaggcagaaataaagcaaaatgctgaccttccccacggaagagagaattctcctgcccaagggcctttcaactggcacatcagctctttctgcctgacaacctttggactgggacattggccctgcggattttggacctgctggtctccacaatcacatgagccaatatatatcctatatatacacacatatatatatcctacaggcctgtgtctttggagaaccttgaataatagagatcctgagacaaagccttgagtccaattggtttgtgaggtgatcccaggaagcacatgttggggaggcaaaaatgagatagagaagatagaaaggttaagaaagaactgggcacagtgcctcacacctgtaatcccagcactttgggaggccaaggtgggaggattgattgagcccacgagttcaagaccagtcctagcatgatagcaagaccctgtctctacaaaaataaacaagacttagccaggtgtcatggtgtgtacctgt

SEQ ID NO: 1881801 - DNA, 4001 bp, Homo sapiens
ttccagtacatgtttaggcattccttctagttaaacgttccctagtttagagtcattcttaaagaagtggtcctctaggagctgtttcttattcagattggaatggattatcacagtatttccttttttgtgcctcttaactcttggcaaaggtttcttagccttggacttagttctgtcaatacctgggctgtgagctagtttctgcgagcaagggaggagttggggtggcctgaaagagtgtgaaaaggagaggaggactagtagtgcagtgatattgtaaaacagagccctttaaacattaaatgtgaagatagaaaaaaaaaaaacctcccctttatgacaaagtgcaaaggaaattgcataaaaaagaaaacagacagcaggctattcagccaaattatatggtaaaatctttgcgatcgccataaagtgcgtttgctttgaagtgcacgcatgattcagtgaagggctcatgttagcaattagaaatcggttatttgggtccctgatttcatttgcgccgagagaggcaacttttaagggtgacgataaatctccctgagcttaaaaggcagagagggccaaagtgtgaactttttacttcagcaacggaagcgagaaatcagtgattcattaaagaggagacctccttggaagctggcagcagaggaggaaaggacactaattatgtcttccttttctgtgctcgttctgaccagtttataacctgctgctttggacggtttaaaatcctcagcatcttctgctttctcccagccctctcctcttctgggagtgagaagggaggaaaagtcagccaagcaccaggctccaggtggctctcaagtacttcactgccaaaagaaatgggggtggggggaggagatcctacgctggaaagcaagtgagaaaggggctccccagaagggattggttcaggctggaagacagcaaaattcggaaagcgggaagataccgtcagcgccgtggcccgcgctgcaagcataggacgctttagcagcgaattagacagagctagaggcgccggcggaggctgcggccgcaacagccgcggcgaggaagggacctggcagcccccgagctcggtgcaaaggcatcgcgctctctcctcgctcccctgctcccccacccccttctctgcccctttcaccctccctctccctggcgttcccagcagcctagggtttcagatgtcccaccgccggttgaccccctcccccctcttctccacccctgcaaatgaggtttgaccagcagaggcagagcccacctctggcttagaatcactgacatttagactccaggcttcaacctgtttacaagcggactttccaaaggaagggggtgggagatagggccatacaaaacaccagccgccgtcccccaaaacaaaaagtgactttcggcagccttcaaatcggcaggcaccactaaaaacagaaaggaagagagggaagaaaacaacggcgactgggcagctgcctccacttctgacaactccaaagggatatacttgtagaagtggctcgcaggctggggctccgcagagagagaccagaaggtgccaaccgcagaggggtgcagatatctccccctattccccaccccacctcccttgggttttgttcaccgtgctgtcatctgtttttcagacctttttggcatctaacatggtgaagaaaggagtaaagaagagaacaaagtaactcctgggggagcgaagagcgctggtgaccaacaccaccaacgccaccaccagctcctgctgctgcggccacccacgtccaccatttaccgggaggctccagaggcgtaggcagcggatccgagaaaggagcgaggggagtcagccggcttttccgaggagttatggatgttggtgcattcacttctggccagatccgcgcccagagggagctaaccagcagccaccacctcgagctctctccttgccttgcatcgggtcttacccttccagtatgttccttctgatgagacaatttccagtgccgagagtttcagtacaatgtggaaatggatactgacacattgtgcctcagcctttccccacctgcccggctgctgctgctgctgctttttgttgctgttcttggtgtcttccgtccctgtcacctgccaagcccttggtcaggacatggtgtcaccagaggccaccaactcttcttcctcctccttctcctctccttccagcgcgggaaggcatgtgcggagctacaatcaccttcaaggagatgtccgctggagaaagctattctctttcaccaagtactttctcaagattgagaagaacgggaaggtcagcgggaccaagaaggagaactgcccgtacagtaagtaacaaatgcatgctcccctccttccaattatccacccccagcccacacgggggggaaaaatctgttccagatgtggccagctaaatatttacgtccccaacccctgtaaaatgattaagtggaatactttcacactaattcaccccccaacccccgtgtatacattgtgctgccgcatcccctcccctaagcgcgctcccttcacatcccccaccccttgccgctctacccaccccttccctccagcctgtcactagccggaccacgcagggcgctcaagagagttgttgcagtgcaaagatgcccctttctctctccaccgcctttcccacctcatccaaagagcaatttttccttccttctggaaatggctcaagtaaacacattttgtttcttttccctggcaatcttgttaagagttttgggacaggctcctcaagctgaaaataattatccgctgtcaattataggggctttgtgggaactttatttaagaaagaaaagtcaattccactctctccccacccccatccctttaccccactacctctagatatgagcgaaaagcatttttctggttttgatttttgttttgttttgttttgttttgggtcccttatgttagtttgagtgattgcagtccatgaagttagcttttcaggcaccaccgctgctatttgtcttctgcctgccttccctcttggtaacatgatgctcatgtctgcattgtcaatagcgtatgcactgctttgtggtgtcctgttgtactgtttcttctgaaacctctcatattgcagagccatactactacagcattgtaaacatctgggactggattcacacagacctcacacaaatttcattgtcattcttttattttcaaagtaaaagtcataagtctgtttccatggctatattttatcccacagtgtgacattttctcctcagcgtaaattatgcctgggatccctacattttggtcttgccttttccctctctctttccttctttctctctttcccttctttctttcttgcaggggtgtgggctggttgggggaagagaactagaagaagaggggtggatattgtgtctcttcttgaatcaacccagcaaacccagattactctgttgacttcctttctcagatactttcaagtggtgagacttattcatccactattgattgttatgtgaaaggaacccaaggctctgtaatggcacactgaagacagtagacaatgatgtttaaacatctttagtgaccatttggcattatctcaatggtaaattccaagtcacctttaaaggggacatttttgtgttagttgttcaggaattctaagcatagattgtcttgtcagttaacttaaatacgtcagtcaaacatttcaagattccttggtttagaaagtaccaggtactaatgggaatgacagttgaccagaatttagcattttatttttgaatacaaatttacaagaattaagaatttagttttcttctgtggggatgcacacacattcaacattaacttctgtttctcctcagccactggttctatttactaaaattcacaatatgtttataagtaataaaaatacgtgtagaggtgctttt

SEQ ID NO: 1881802 - DNA, 4001 bp, Homo sapiens
tacaaaacaaacaaacaaacaaaacacagggcattcactaaatccatgcaccaagagaataatctttattgactttgaaaaatgttcattctcacattgttaagttaaaaaaaaaggctacaaaatagtgtatgccataggtcctatttttgccaaagaaaaaaaggtgaatagtagtgaatagaaaaaaatactgggagaatgcacattaaaatgtaataacagtactattttatggtgacactgtggggtgatttcattttgctattgtttccctgtatttggcaaattcttactttacacacagaatgcatatgaaatgagaaaaaaattacaccaaatttttagggtgtctaaaatgactccaacgttttgtccatttaataaaacaattggtcaaaccactctagactttcagtgctgtgaaaaccaaagtatagtttgagtacacctgtcagtttccagcccttcttggttgtggtgagcagagctcaaggaaaacagtagaataagttgatgatgtctaatttactcattatcattgaccccttgtaatttaatttatatgctatgctaagtgtttacctgggatctctgttgggcattgcggacgctggtgttggaagttggggtgctggcttcatgaagcttctggtcctgtaggcggctctgacccataaagaggctgctacaatcacctgtactaagtgctgggacagaggaagtagaaagagtagaatgagcttcaaatgtacagaattattgtgtgcccaagaaatataggatacagaggaggggctctcatctagcctgggagaacacggagggcttcctggaggaggggacctgtggagtagcatcagaaagacaaataggaattagtggagaaacaggattctgagaaagtgttccaggaagaagaatggcaggaaaaagccccagaggcaagtcacccttggcttgttcaaggatttgaaaacagtgctgtatggtcagaacttggaatatgtgtttgggagtggtatgagttaggttggggagggtaacctggggccaggcaaggtaggtcttaagatccttgataaggacttgaacttatcctaaaagcaacgagaaaccatgaaagagccttacacaggggactgacttggccagatttacactttagaaaaattcttcagaccacagcaagaatttggagggaggtcaaggagtctacgagaaagatgttaatgatgtagggaatgagcagtggggttgaaaagaggtggatggatttaaaaaacatgtaatgggtagatgggattagatggagaataagtataaagatggggaaaagatgacccaaggagatgccaggtgttctgcttgagcatcttggggtgggtgagatagaaatacctggagagtcaccagtttggaatgagttgatgtgcctgggtgaccactggatagagatgcccagtaggcttttgaaaaggcagtctgaaactcaggagagagctgggatgaaatgccaactttgaaatcaacagcttagacaaagtattgaagccgtaagaatgtgcacaacaggatagaggaaaacatcaagtccacaatgaagaacagccaggcagcatcccaaagaacctcaacacgtgaaggctggcccttgtgaagaagaatgaagtggaggggcaaaagagggtgacaaactctaggagtgcgtattgctatggaagccaaggagaggaggatttcaaaggcatcactgtcaacactggaaaggtcaaggacagaagcagaaaggagcatcttggagtttaacacttgtgagcgaggttgttggtccccatagtgagatgagcctttgcaggtacaagggcgcagatgttgggcacagtgggtccagggaggagagaggggtgagggaatgaggataggatggtaagcaccttgttcaagaactttgctgcatagggaagctaggttacagctcatgggagtttggagagttaaaggggaattttgtttgtcatcagggagactttaaagatttaacccagatactgcagaatcaataagagagggagagttaaaagttataggagaggagaaaatccagagcacaggtaagggaggggtcccccttcactgtcacaggagggagggaggatggatacagatgcgttaacttggcggttctggtatcagaaatttgcaagagttcctatgtaagctttctatttttttttcctgtgcagtaggagatgaggttatctgcctacagtgagtgggaggtggtggagtaggagatttgagaagtgtggagaaatttgaaatagatgttctagagagtgggagacagagtactcaggaaacagagtagtttctgaaagcactgatgctctgggtgagcctgaagaccttggctttgtagtggcaccagtctgcgaggtggtgagattttctcccccaggttttaagagccaggatgtgagcatgaagaatccaaacatcagggttgaagggaggttggaacatggctggcataagtggcagaggcacagtgggtttagtgagttgagaccattggtaagaggggtgtaaaagtcataaattttaaggtccaagttgatggagacagatatagaaccaggagagagggatgaggaggagctagtcaagaagtggtgggacttggggcctctttgatgctgaaggtcagatgtggtgaaagaaacgaactgagagtcttggaaagataagagattgtattcagaaagaacaatgcctgcccaaagaaagataaatgtttgaaatgatggatatgccaatgaccctgatctgatcactgtacattttatgtattgaaacatcactatgtaccccacaaatatgtataattattatatgtcaacttagaatagaaatgcatttaaaaaataaaagaaagtaccatgcttaggtttaatatttcctcagtgaaagggctttaggttatgcagagcccagagagtcatcatggaaatgaatgaatgaagagaagaagaggtaaatatcatgggcaaagaagacatcagagatataaccagagtgtctgatgggtgggtgcccacatggatagcgaggtcaccttgataccagcagggcttggggagaggaagggagaggaagaaggagaaccaggaagctgagtctttagtgagggaggggaatgatgggcagataagttgaggatcagcagtgaggagggataaggggctgtgtgaggccagaggagcaggagtttcatgtgaggttgaagagaaataatccagaagtggaaggtggttgagaaaatgcccagcaccattcgttccccacatgtgaaatgagggtaaaggagcactagcagttccattcatggggcggctgggaaagtggtgccttcaggagacagccaaggctcgcctacagaggtagatgaggcagagattcagtgaagaggctgcaggtataaaactgttgatttctgaaaagagaatctcagaaggatttgtgaaacggaagaccaatgaaagtttggttctggaaagaaaaagcatagcacagaatagaatgctgaaaatagcaacaacaatactaacaaaacaccaacagcatctcatactcacttaccaatgttctctcagcaagtatttatcaaacctgtgtcttctaagcacagagcttatagtggtgccaaacacagacagtgttctcctcctcttggagcataccttccagaaaggaaggaagacaaaaaatagacaaacaagtgtgtgtgtgtgtgtgtgtgtgtgtgtgtgcatatagtaatttcagttgagctcagtgctatgaagaaaagtaaaaataaagcaagaagatagagagtgaaagatgctgatgctttagaaataagagattccttaggaaaggactctggaggtgggggtggtactcaaactcagaccccagcagaggaagtggtaaaaaaggtaaatacaaaagatcgt

SEQ ID NO: 1881803 - DNA, 4001 bp, Homo sapiens
atttcaaggccaatactctacagaggtatctgcaaagtcatgtaattccagcacagcagaggtcttccgtcctgttgctctgaaaaatacttctccaatattgattcatccttttggcctcagactttaactactcccataaaatgtgagtttcttgggagcaggacctgagctgagccaataaaaagacacccataaaagcactaactcagtcatttgttttcctaatggtgccaaggcaggctggtgtgttgtgacatatcaatccacttctgtgtacctgcccttccccgtccagcaaaatatcatcatttttaatatatgttgtgatactaaaatatttcagaagtgttgaccgagtagacattcaataatgattatagctgatacttacagagcacctactatgtgccaaacactgtatgtattttaactcatttaatccttgcaacaatcctgttaggttggtattgttattctcattttgcagatgaagaaatttgaaaagacttgcccaaggtcacagagatgagaaatagaggcatcagcatttaaacctaggcaatctagaaccagagggtacatttaaccactatacatctcccctaaatacatctttgcatcacacctgttatctcagcactttgggaggccactaaggccggaggatcgtttgttgccagcagttcaagaccagccgggtcagcataccaaaatcttgtctctccaaaaattttaaaaattggccaggtattgtaggggcacctgtagtctgagatacttgggaggttgaggtgggaggatcgctagagcccaggaatttgaacgtgcggtgagcatgatccagccactgcactccagcctgggtgacagagtgagactgtgaacaacaacaaaaaaatcaagtttcctggatctatacaaaattttcaatttaacaaatttttataaaaatttgttttaaaataaacacccctctaaatggcaaagctagaacagaatctggtcacaatctataggttagatataggatgacagggaggagcaagagctgaacacatcagctgcagcaccatctactttgcctgcgactccgttagcaggcccactttgcccttttataaattatctgatcaacaactaagagattaaaattcgatctatgttttactctatctgaatcctcaatataatgaagaactttataattgttaatttatggatataatttaagttcattaaaccattatttccttcctatatcctctcattcttccacaaaaacctctacctttgggtgtttacttttacagacacccacgcacacaccccacacgcacgcacgcacatgccttatcttttaactcaagattctcatcttcctttggggagaaacaaacatcatgagccttgaggtccattttctgagggaaaggggggggcggaggcgggatgaataggtttttacccggtattttttatcataaacggggaggtacaaaccgcaaagaaacactagtcgcttggtgggccaccacctctggggctcactgatcaatcgcacccaaactcatttactaatttaaaaaagtactgtggcaaggctcgtttacgtaagtcttggagagaagccgccgccacaatctgccgcagtctcgtgcggagtcacggccaccgagctcttcactttccccaagaggctcccacgccttccccatccccaagggagctaggcggtccctcgcggctctgagtccctcggggaaggccgcgaagagaggccgcaggcgccctggcgagaagggagggcgggggcagcgggcggcgggcagcacccgggctccagttcatgaccccgttattccacagaaaaatggaacattccgctctttccgcccacagaggggaggtggggggaacccttcgatctagtctgggagaggcgacgcggacgcagccaccggaatccgggacgcgaagagccgcgttacgggaatcgctacccctcggagtcccgccccctcgtcgacaggcggccactggaccaatgcctgggcgcaaagggtctctcaggggccaatcagcgcctaggtcccggtagggggcggggcgcagcgttggccggccgggggcgcagctgggcgggattggggagcgccccgccccgccgcgggactggggtggcgcgctacctctgcggagaaggatctgacagtgttccggagccggggcgagcagccaaaaggcccgcggagtcgcgctgggccgccccggcgcagctgaaccgggggccgcgcctgccaggccgacgggtctggcccagcctggcgccaaggggttcgtgcgctgtggagacgcggagggtcgaggcggcgcggcctgaggtgaggaggggccgggtgctgggtcgcgtagctggagttagagtgtcggtggtttcggacgggctatctggcactcgaggagacctcccttccccctgagagcagcgcccggaacttgtcagcccagcctggaaatccccacattccttccccttcctgctcccggacctccgaattctacttccacaactttgtcacctcgattatcgcagccctgagtacaaacttcacccaggcgcacgcacgcacccctcttaacgcccgccccgcagaacgcccttcaagaacaaacccccctttttgttaccagatcccacgtttttcccaatccccttttcatctcccctgaaattctattcgctccgcacttgtcttcattctcgaggtggatttcccttccccaaagccgttttttcatcttgaaatcgtaacgtttcagctttgttgaaagttcacaatgcttataaacactattaacgtttctttccttcttttgatcttttctattaataattatcattcctaacgaattccacatctcactgtatcccaaggagaacaaatcagtttttaaaattttacctcctccgacctaaacttttgaagatagtgcaggaagcaagggtctgttcttcagtggatgaacagcattttatttcataatccgaaactgaaaaaaaaaaaaaatcacaggttaaaaataagacgtcaccttttttttttttttttttttttgccttcagaaggaaacgcattttggcttagtttgtgaagtatttcaacaattatactgccttaaaataactagttattagaatgccagggtgaattttctgaaagattgtggtatttgcttttgacagtgctgtaaacaaaccctttaaactgtgtatgactgccagcttcaagttggaacaactcttaatttgaaattacggactcagatcatcagtttagctgtgtgccattatgttaatttcttaaattcatgttaattcctatttggaagtatttttgaactatgaactgaaatattacatttatagaaccaacttgctattaaattgtgctttccaactatttctctttagggataatcttgaacgtttgtttttaatcttgagtgaaagaaaaaaattacaggaaggagaaagtgtcaaaaaggacagactgtagtgggatttttttcttattttaagtatgtattgacaataccagtttaattttctcacaggcaatttagattattataaatactgctgccacctaatttaatataatatagtcttacgtaactaaaaatgttgttctcactcttatttgtgaattgcagtattttcaatttatttaaatttgtttccaaggctttgcacttcagttcagtgttagggcgaaagttaaatacatgtgaagtaggtgttaaaatgtcccctttatagagaaggaaacaggagtctcgctgaaaactagatctgtgtgactccaaatcctgtgctctgaatcattttgtcatgttgacacgtttctcataaaaaccccagtgccacaatttggtttgggaacttaagggcaacccataaatcctctacagtggcagggagggattccccgctccct

SEQ ID NO: 1881804 - DNA, 4001 bp, Homo sapiens
tttagaaatatccccaaatatcaaggacatctgaatgagtgaaccatcagaataaggagcgattcccacagagttccatcccacagggaagggacgggaccagcggggcaggcctgaagcctgggttgagcggcgctgtgcctttcattcttcaccgagatctcggacctagagtttccaggttccggagggatgcggttgttgaccgctagcctagaatccgtgagggctgaaccgggacgaaggcctaggacagagaggtggtgtggaaggacccagccgcggccactggaagagcagcttcctgcaatgtaaagtgttcgcgacctgcatttgttttgctttcttcctggaggagccaaatccgtcccattctggatccttattccagctcctttccctctgcgaatcgcacttggtgggtcgcggggccctcagtaattagggatcacggatcagccaagaaaaatacaggttttcttaagcctgaagccactgacttgaggagggagcgtgggagtaatgtcagtagcagttttttatttcgttttcgtttttattttctagtcactaggccaccaaagaaagttccacccaacggccagtcgatccgtcgcagcgactctcttttccctgaacggagggtttatggctgacacctccacttgtttctcagagccggggctgactgccggctgcatctttgaatggcgaccaaaaaagacatgcatttgtctggcaaagtcgctggcgttcgcctggtgcccgcgcttgccgggtcctagagcagccagattttcacaccagcgagtccagcgcccagcgccactccgccttcggatcaccggtttctcacatccgcagcagcactggcctgacagttttccggttgcgacagcgctagttgagccaaacaaaacgttttcctgcttgctctgggcgtcccattctccatccgaggccttctagtcccggtgtcactgtcgcagcacctggcgttcgttagctctttcaccagcggcgcggagcgggcggttttgctgtcacggcacatgtggcacggagtttctcggtggccgaaaccctcttttttctcagagtccagtttcttggtgacagcgctgttggttgcgccataaggaatgttgtccttgacaacccgccggccgcagtcattcgcaagctccaggcaccgacatttcgcagaactgaggtctctcggtctcagcacagctcgttgctcgatgcctccattttctcggggcgacagcactcaggtcgccgatctgagggattcggagcttccccagctggggtgagcctggcgttcccgggcggcggcggcggcgctgggctaggggagcccgccgctcctccaagccggtgacaggggagctgcccgggcgccgtctcttcccagcgccgccgcagaacccgcagaacagctcgacctccagaaccctgtgctgtggcggcggggctggcgtgtctgtcgcaggaccccgcagattcgtctgtcgttggcttgttggtcctaacaagtttcgatttcagggtgcctgcgtttctttttcttttctcttcttttccttttgttttgttttgagacagagtctcgccgtgtcgcccagcctggagtgcagtggcgcgatcttggctcactgcaacctccgcaccccaggttcaagggattctactgcctcagcctcctgagtagctgggattacaggcgctcgccaccacgcccggataatttttgtatttttactagaggcggtgtttcatcatattgaccaggctggtctcgaactcctaacctcaataatctgcccgcctcggcctcccaaactgccaggattacagcatgagccgctgcgcccagccggtgactacgatttctatcccctggttcaagtcggggaatagccaaaatgtgatttctcaacccaagcaagtacccacttaggacaaacaccagcctagccctggcggcgatttctaggtcgtaggaagtcgatgtttcgccacagaaaggctgagtgaccctgtgactcatttcccagcaactccgggtttcctgtagcctaatcataacaaacgcagagttagccctgcctcaagtttcttttttctttttctttttttttttttttttttttttttttttgagacagagtttctttcgtccaggctagaatgcagtggcgccatctcggcgatctcggctcactgcaacctccacctcccgggttcaagtgattctcctgcctcagcctcccaaatagctgggattataggcgcccgccaccacacccggctaatttttgtatttttagtagagacggggttttgccacattagccagactggtctcaaactcccgacctcagatgatccacccgccttggcctcccaaagcctcaagtttctaagtcgtggcaagttccggcttcctactagtacggcttgctttagctgcgcaggagatgttcaactcctgtagaaatctgtgtaccagcgaatgcgattcatttaggtttagcgatgaccagtttagcagtgcctgggagctcttacaccaaggctagctgcgcaacatcaagtcccgccttagctatgttggtgttttttaaactcccatggaagtcaggaaatgccggcaaaagcgatttctggtttacgaagctcggtttgacgatagcaatttccgccgaacgcgactttttcctcttgtggaccaagtcgggatatatcagctactacgattttttagtcgtaaacaggtttaaccatgactgggttttgttggtttcttgttgttgttgttgtttgtttttgtttttgtcctaagaaatgtagacttaggtgtaacatgtaccggtttagatctaacagggatatcctaatcacagaattgcttcttttggcaatacttgtaatttctgctttgtagggttggttctctctaatttttgcttatttttaaatgctctttttgtgtcttttgctctgagaacaatgctaccggtagtttccagtgtgtttgctttgcctttttatttgaattttagaatttattattttaaaattttatcttatttaaatgttattcatttttcttctactaattttgagtatcacagcttcgtactccttgacttgcattctctcaggagctggggagccaagctcggtctccgcttcggtggtttcaggtcccgggttctgtctggcggctctgcttctaatgcggagctggcggttttgcagcaacgcttttgccagtagcgcccactgagcggtttttcagttgctgcaccgttcttagcgcccaacggaacgtttcccgtacgcggagtccataagttgtctgtgtcgtcactttctcggttctggcaccgctagtatctcctaggaacttcctaaacccgttttacggtgcagaacggtaattgcaccgagcctctgtgccaactagtacttccgtaataccgttagccggctcttttcctgtcacaacacattaaaacgtgttaaaacacattaaacggattaaacacattaaacggattaaaacacattaaaacgtcacaacacatttaaacagagtcggtccattcctccagacagtatgtttcgggatggaagcacccctcctaagaatccgcagtttctttctagcagcaccgttatggcgcctaaacggatatttgtttggcaataccagcgctatccgctaggtgccggcgcttgctgagtctcagcgccgccagattcttgctagcgaggtccagagcagtgcagagacctagcggacagttttccggtggcagcaatgctcatttcccggacacagatggtttttggcccctgaagaactctttaatccctgcgttttgtagcgctcgttctctgtaaggtttgcttagtatccgtttcatttcgacttcttttctcgctgtttttctgtcggaattacgatttgttttgtttctatgtgc

SEQ ID NO: 1881805 - DNA, 4001 bp, Homo sapiens
cacatgctccaacacctgtcattgtcaggcattagattcgtggccatgcctgctgtgcccaccaagctgccagcaccacatggctgctgctcactggtgtgcggtgtgtgcccagcctgagggccaggcgagctcaggacacagacctcccagtgccagcacataggaaggccctggtagctggccagggaggcctaagctcacttcagtcatcagacacgaagttccattctctaaggatatcatctgggaggaggtgaagcctttctgtcttgaaggttgggtctacctccaggtgtgaaggaaggacatttcatatacaggggaaagaggtattggccaagaaatatggagcccagattcaaagggggacagagaccccatctcttgatggaaggagggtcaaggaattttagaaacttattttccccaaacttctagagttgttgacaccagttgtttatttgtcacattgcttatttattcacttacttattctttaaaagttattttaagcataattaaagatataattcatctcagactattatcacgagattattgtcttattattaccttccacactccaaagccaccacccttggatgacataaatatccaatgactatttatcagaaccataggcatttttatctacctgtcaccttgcagggtcaacatttacaaacacgtcgttattacaggaacacagaataagataatgatcttattatcaagaccacagataataatcgtggctcgttgaagccctttgaacccaacagctgtgggcccatctggagctagtggccttacttctctagatcagatttgcacactttgaaaactgcagcagttaggaagctgcagcatcccacagggggaagcagctcaacagccagagctgggctgagaagcgggtatctggaagcttgctccttaatgcctcctgaggaagcgctgggcacacacctggcacagcccacatgcaagagttagcaccacccgcacacatagtgctcagctgttcctttggcagcactgttgttagcaatgtgtgaccgcattgggagggggtctgagtaccatggaggtgactgagatgctctgtacctctgttacttagcacagtgcagggcaggaagcaggaaactcaacagatgtctattcaatgattgatgggcagctgccaagcaacttccagagtagggggtcccatgatgcagatccctcctccccacccactccatgtcagccttatttcaggcctcacaacatcccacttgaaatattaactgagctcttggcctcagtcatcgtgttctcctgtcaccactgcaccatctcaaagtggcccttcctaccccactaggcttcccactgccccgcacacagccaaagccctgccctcacagcctggccctccagatgtctgcagcctgggccccatctgtcttcagacttcgcttcccataaagtttcctcatctggcttttggttttgtttcacaaataagccacacacacatgcacacacaaagaggtacatgcacacacaaagaggtacatgcacacatgtgcaaacatctgtgaccacagacccagatgccagcacacacgtgcacacacactcatgcttccaggtgcaaatacacatacatacacacacacacacacacacacaccagctccatactttaaacctctttcccctgtatatgaaatgtccttccttcacacctggaggtagacccaaccttcaagacagaaaggctccacctcctcccagatgatcttcttcccaagttgcaattgagttctccctccccatttctctatacagcggcaacagactcaccatcacgataccattgccgtcttctctcaatgcaggtgccgtccatgctgtgagtccctggagagcagcagggatactttttacagctttttcgatgctcacttacggcccccagcagagagcacctcagcaggtgctccaagaacgatgttgccttggaaaggtagcgaggccctgaaacacagagaataagggcaaagtctgggctgctctcagagcctcagggccctgccaccccaaagtcctaggacagggagcgtgtcctctaacttttctctctccctgcactttatctccaccaggaattctcaaccttttttgttctaatagagctctcttcaaccgcctgaaaaagttcctaatccttttataaaatattgtcttaaaatgcacataataggctgggcacagtggctcctgcctgtaatcccaacactatgggaagccgaggcaggtggatcacttgatgtcaggaattcgagaccagcctggccaatatggtgaaaccccgtctctactaaaaatacaaaaataagccaggcatggtggtgcacgcctgtaatcccagctactcaggaggctgaggcaaggagaatcacttgaaccagggaggcggaggttgcagtgagcggagatcatgccattgaactccagcctgggcaacagagtgagactccatctcaaaaaaaaaaaaaaaagaaatgcacaaaataaatattacaaagggcctgagtgatgctgaaatccagctctgcgttcacacttgagttgggggatggcaggttccccagcaccgtgtgctcccaggttcccagcaaatgtgagctcactctccctggagcccttgccctgggtcctgatcaccagccccctctggttgatcttccctcaggtaggaagtagccctgaggagggggagcacagaggagttgtgggcaggggtgcagaaggagaaaatatgttgaggacaacagcatcagaggccaaaggcagactctggctgctggtctgcacagaccaccatctatgggttgcagaatctgggtggacacgtaaggagaggagggaaaagagagagaaaaaaaaaactgtcacaggcaagcacaaagagtagctgccctcaattagggctagtaaagaattgttcccactgcacggggttttccaactgcaatctttgggcttgtgaagcattttctctgcatctgttgttgatgccattaagtagaatgagtcactgtatatattaagcactaagaccagcagcgacataagtctatgaattcaatgatcatgccagctttaagtagaaaaggagcttttttttttttattaaaccagtggcaaagcagaggaaatcaagtaatttttacattataagatttttgcttttttttatactgtgtctatttccttttaatgacagttatcaaaagtcacttttgggaaaaggctttgaaattgaatagaaaaatctcatgcatttacttttcctgtttttctgaaattcaaataagatgtgagcgacaggcgctgagtgctccagcccccatgctcagcaatcgcaagctttcttcagacctctctttgcaagctcgggaggagaccagagaggttccttaggaggatccctggctggaatctaggccaggaagccaacagcaaaatgtgtttggggtgagcatctgtgtttggggccttctggcatggtaacactctgacctggggtgttcgacatcacttgtgctctcagcacagcttccagaacaagccaatggccccaacaaaggacaaagggtccagaaccatgtgaccagaaaaggaagacagccaggtgtatttgacagctcccagaatgacctggccagacactcagaaggccacggaagcttcgctcaggcatgctgccagtgtgtgtttatgtcccaaaccctcacacagcatttgctacctgactggcctttggcaaagggctttagagatgttcccccaagtcccacatggcacagagggcaggtgcgcatgctgtgacaatttcacaggtgaggaaagggaggcccagggagcttacagagctcatgagaggtgcagccaggatgtgagcccagccagctggccccacagcctgtgcccatgtgtgacag

SEQ ID NO: 1881806 - DNA, 4001 bp, Homo sapiens
tacagggtgttttgcaacctgtaaggagactgatacaaaggctcagtccaactctcacccctggtgaatccctagcaggacaaactagatcctttcactaaaggagtttaaatgtgagatcaactgagagctgagcagttggtagcaggagcagaagccaaaggacacccaggggaaaacagcgagagaggagctgaatcaccttggcggctaagccgttagtggggatcggcagatgcctgctgctgagggggcagcgagataacccagtcacagagctgtatcctgaatgaccttccagttcctgaacttcaatccagttttcatgaggcctggctgggtggcctttccggaaggcttttcggagacacgtggcggaatggtggagattccggtcagccttccttccacagtaaattcccattactgagggtaaacctcagtggtatctgttccttgcaacccccgccccccgcccaaaaaaaaagcccaatcagcacaatgcccagggcctagcactttgcctggcacacagcaagtgctagatatttgcaggtgcttggacgggctgatcatccccagcaaaaagccctctaaaaataaagaaatcattcagagtaagaacattgatgagggtcgtcttcaaattccaaaaacaatgctaaacggcaataaatatattaagcttattctgccctctaatttctgaatctaactacatttctaccataaatctatcaaagagggaaatgtcattttctgcagaactccagagagcatcctaatttcagctaaggtatgttttgatgactcgattttcacttcgcttaatcttaaatcacagcaacgttagtaagaacaattttcctcccacactcgcttcactgacaaacctgcaaagtagctgatctttgacttttaagaagtttaataatacatgatcttccccccacactgccacacgcatttcccctgcctattgtctgtatcagctacttgaagaacacatactccccaacaaccggatgagtcataaaataagaggtacatggacgtaaactgagcctgtttacactttccctggccccagctaataaaataaaagaggtcccactgaattcaggtccaatggcttccggaaaacaggtttctgcttagcaaagacatgccctatttagtacattattttagaggtacagccaattccatgccccatgtgaatgaaatgtatttatggttatagccatgcacagggtgtgtaaggacttgccctcctcctgtcctctacaaaagaaggctcaggcagcttctggtggtgaactaaccaacaaaaggaatgcccagaaggtctcacctctcccatccacagagctctggaatgggggccgggcccctgatcgctggaaactcagcatccaagtgggcgcttgctgaagtttcccatctgcattttcgaaaatctggataaaagcaggtttagctcaacctcccctaacccgttcctgataaagtgatcttacgcctctggaattgggattttgaatgtatgtgcctgccccatgtctggtattagattacaacagcatgaaaatggagcctaggactgaggagccggccagcctcagaagccttcttcattgcctgccatgtaatacatgatatgcaaagcctctgacttcagccagcagatatttggagaccgtgttggccttagcatggggactaaactaatgtgtgtttaggtcagaaagcgaatcagaaaagccactggagggcacgtcacggagtgagagccctataaattcatccccactcgcagcgtcccctggcaaatactcggcttccctcacccggccgctccgcacctctccttctcggtgctagaactccggccggcagctccttttctcgccactgcctcctgccctgcggagaagcgagagggcgagacacccgagcgggaaggccggccttcgacaggcgcgaggaaagcccggcgctgccctgcaccggcagagcgccaccctcccagtgcggcgcgcgggggcaaagcccggcgcgggcgccgcggtcaagttcggattgcccctttcggctggcccgcgcagagcgccgcacattcctctcgatttttgatccacccggagaggagaaggcgctagccccgcggcgtctccgcgctctcagcgctctccctgcagcccagggaggggcgcctcgcgtcgcccactcgcaccccggccccccgcctcgggaactccagggcctcctcgctgctctcctctcctcccccaccgccaggcccagccgacgcctcccgacccctccctcccggggccccgcgcctcccctcccccaccccggaccccggacccccagcccgggctctagaagaccagcctgcgctcctggcgccctcatgtcttcacgggactccccgcgccggttgacgtggtgtctcgttcggatctccaggcaagacctcagctccggcagcagcatcagacaaaccagtctcgtgctcccaggcagtgcgcccagaggaggcgcagagcgcggcagctgccgctgagccgcccgcagcgccccgggcccgcgcagccccagccaagagcgcgacgcgcgcagccctgtcagccccccacccaaagcagcggcggctgctcggacctcggcttctgggggtgcgggggcccggcgggagagttgccggcagccctcgccctgttggcggcggcggcggcgggagtcttggccgccgcctccagcgcgcccttgctgccccgcgcgaccccaggattgcgaactcttgcccctgacctgttgggcggggctccgcgctccagccatcagcccggatgggtctcctggctgggacttggggcacctggagttaatgtccaacctagggtctgcggagacccgatccgaggtaagtgagggagcgggccggggagcagggagcgggtggtgcctgcgtcgcgggtgggtgcggccggctgaagggcgccctagtcagaggggtgcgtctggaccccagagcaaacggtgagagtagaaagtggaaagactagagggaacctaagctatgcgaggagagagaaaagtagaaccggagagaggccggcctttcggaggggcatgttgccttttccacgtgggcaaagatctgtggagccccagatgcgcctggacccggaatgcccaagaggggcagtttccttccccgactcggccaggtgctcttccgtcaagtcacagaacgattcagggcttgggtcatcttcgaacccaccgccgtcgaaatgtgtcctctctggacgtgcagagatactatcattgccaagagtgcaacttactattgagcttgttttgatctgtgccaaggaaaagcgcaggccgggggaggggctgctgcaaaggtgctgagaacctaaaaatggagggctcacctcctccgggcgaggtctggcaaagctacattcctcacccggttgcctgcacgttcctaacgccctccaccccaactaaccatccccgtcgaggttaggagaggggctttcttgccagtcctggattcaaatctctgtctcgaacgtattcttgagactccactaggccattgaggttattattttaatgacccctttttctcctgtactctgtgccgccttccaaaaacaccccaccaccactgccactactttacaccacctcgaggctaattccgcactggtggtttgtttcctgccccaacgaagaaaaacgaaccctcttcgggctggaaacggactttcgcgggttcccgccagcttcctggggcccagctagtttcggctttggtagaatccgccgccaggacccatgtgcgcgcccccggggggcttacccatcccagagctcgcgacccttctgctcataggcggggacaaaggcaactcttccggcccctgctgcggagatgttagaacgcgctcgactcttgctcagtgtttggaata

SEQ ID NO: 1881807 - DNA, 4001 bp, Homo sapiens
acgagaaactttagggtggatgaatgcgtttattatcttgattgcagtgatggtttcacgggtatagacatatatcaaaactcatcaagtgtaaaactttaaacacatgcagttgatctgacatcatgtatgccttgataaagctgtaaaacacttttttaaaaagaacgtgttacatgcctggtgctatgctaggcatgagaggcacaagataaaggtacaaggtcctgtcctcaaagggctcacagcccagtaagtcatcctgattaatgaattaggcttgtgagtacagatggggtgaatacatgctgagtcccaacacactaagaaggcactcagcctacagaccgagagtcagactttgtcccgtaagtacccccagcccccaaacccagcctgtaacaggcttcagcgtttgacaatgaggagcaccgtgtatacatgcacggctcttttaacctacttctactaaagctctggatacacatggtgaacaatatattaatatcttaaacatcccatggtaaattgtatattttccactcttagaaatggaattccatgacgtgttctcttcactttccacatctgtgttgcagaaccaggaaggatccatgacaaagaagtagttggcacaaatgaatcttctgaaagaatagtctggtgagacagctatttggaatctgctgtttccagtgaccaataccactcatgtttgacatctcttgatattgctcctgtggtgtgtgcaacattgcaagagtgcagtgctaagctctgaaagccccagatggcagctcagggggaaaatactatagagcaaattattttctctatttcctcctcaatcttgcccctctagttcctagggcttatgaaggtcaacagaatgtatccttagaactgaaagctgttgctcctaccttttccaccttcagaaaaaaatcattagctgcagtgcagatagtttcatcacaaaaaagtaacaaaattgatcaactgaaaatctttgtggaagaagagattttgtttttgtcatctcccttaagccctttccatgttggcccgtgcagcctgaacatcactgagtagggaatttcatacagggttgcagtaagtgctccccacaacccaaaatacctcccccttagcctaataaaacatctgacacgcttgcatgaatccttttagactaagacgctgaggctgaattgtcctctgggaaaagaaagcaaaaatccaactggcctgcattactgaggagaccttgaaagactgacgtaagatagcccccgatggaagaaaacgggcagggtccatgggggtggcccgcaggatcactgtggacctgctgggggtgcgacaaaggacaatgtgagaaggaggagatagtgacaataaactttggttatgccaaattttctgaagagccagcacttcttactgtgaaaaactgatctggagtgaagtgatgaattatcccatccaaaattaccaattcttttcaagaactcctttcacttttattcaatcccctaataaaagcaggcttgttgtcctcattaagcccaatgtattggcatctgaagtgtattgatgtactcgcatgtgatttccctaattacactggaacttgcaatgcccaagaactctgctgatgaaaataatccttctgtaatatttcctttttgactgggcacctctgggcattaaaaacacattttcaatgaaaactaggaagggctttcttagttcttatcacattaatcttgtcatctaaacttttctactggaaagctagcttcttctataaatccatttctcaaattattttggaagtaacctaagatactacatcaatgagaaggcccagagcagacgtgggaggaaggaaagaggaatcaatgacaaccttcagcatctattctttaaggactagcagcttaaaccccctaaaaagaacatgtgaataatcaactcactcctgaagctgaagggaataattctatctgaaacagaaatccctcattataatatggttttcataagcagatatttccaaagggacagagaggtaggggacagggagatgtcagaatatatccatccaaacccaacattgaaaagcccgcaaaacacatttagctacaagttggagtcagttctaattcccagtatgtcacacaggcgtctcacagcattcaccacaacacccctgtgactgtccaagcacatccacaccttgcccttggacaagtcacaccttgtccctgagtctaatttctcacccatacaaaggaaaggtttgcctaagggacctctgcagtctgtcaaaactatcctataatggatataggatatatcctatagtggaattaccctgatgctctcctactggccctgctgtgtcttaattttttggtgccttaagtccttacagcatgactcttctcaagactacccaaggaagcacactttcagtgttttgcaataccacatgttatggtttggctgtatccccacccaaatctcatcttgaattgtagctcccataattcctacatgtcgtgggagggacccggtgggaggtgactgaatcatgggggcaggactttcccatgttgctctcatgatagtgaataagtctcatgagatctgatgattttataaaggggagttctcctgcacaggctctgttgcctgctgccatgtaaaacatctctttgctcttccttcatattctgccatgatcatgagacctccccagccatctggaactgtgagtccattaaacctctttcctttataaattacccagtctcgggtatgcctttattagcagcatgagaacagactaatgcaccacatccaaaatgccaagagagaacttctttgggtgcatattcagagtggttcatggaaaagctaacagtgcaggcctactgcctgctgaatggaccttctaagcactatcagtgcagaatagcccagaactaagggagattttgcccctcaggagacatctggcaaaatctggagacatttttggttgttgcaacttagtggggaagggttgctcctggcatctagtgagtagaaaccacaggtgctgctaaacatcctacaatgcacaggacagccaccaataaccaacagccattctgcccaaaatgtcaatagtgctgaggttgagaaacccaggcctagatcggtagaaccagcagtgtggggcagccagctcttaccagtgcatgagagttaaatgtgtgcatctctttccagttccatgttcatgaggtcactctggtaagatgaaatctgccatggtgggaggatttacaccacagaaatcagcaaatcagctctacaaatcaaggcaattttatgtctgcgagcgagttgttaaacatttatcaacacaccgctaatccaaaccagcacctgaagtaactcggaagcccaaagttctttcagcaagaaggctatactgtagtgagatgactttacctatgggaaagaagtgggacttcctaacattacctaacaaccatgacaaaaaggaaggacacagaatgagggacatcgtgggcagatattggaagaatctcctgttctttggtttcatttgcttacttttaaatatgcactgccttcttccaaagagcacttgaggggacaattaggaaatacagaacaggcttgtttactaaactgctcagaggaaaagcataatggaaaaataataattcaatacctttaattttgaaaaattgacgtacaaaaataaagatcaacacacaacaggtgccaagcccgaggagcaggcaagctgatccttccgctccagcccagctgcctgacagacacatttcctagtgggtcctggatgctggcaaatctggactctaccagacccccccacgaggaaccgcagggccccctcttgccttccagagctccacacggaggatggaatgccctacagaaactcaagccacatt

SEQ ID NO: 1881808 - DNA, 4001 bp, Homo sapiens; identical to SEQ ID NO: 317997

SEQ ID NO: 1881809 - DNA, 4001 bp, Homo sapiens
atgtgagatttacctacagtcattttctgctgatgctgaattaaaagcatgagttgacatcgtactgacagaaatggtttgacagatattttcttggctttaaaatgattttttttgtatatgcatagaaatgcaatgaggataagaatagtcttctgtattgtccgtacagttcataaggcctttgtcattgttagtcaacttagatgtgaatatcagtagggccattaaattaaagctggcctgaaagttttcaaagtgctactgtttccaactgatgagatcttcagttttctggattttctgggtgacgattattttcaattcctttttctggtgatatatacaagaagttacagcagatatataaagggaaggtcagaaacctgctgtccaagttcatcaccacttgttcctgatcctttttaagtataagtatttgatagccagttgttctactacatactagttttccactactatcaaaagaagccaagcgtaatctaaatgctatgctccttcgaggccgtaaactgacagacccgctgcgtggctgattcagtgtattgcgtttgaaaatgatgtatccattggtgtaaattacaagtaggtcaaagccgaagttaaaacccgtccaacaccagtagtattcaccatctttggcaagctttctaccacacctcatgctatttccctctaggtcttctttattgatttcttgaggccctacctcacggtcttgttctgcccgcagcatagcaaaccactgctgtttatacacagaagacagccattctgaaggtactataccatcttgttcaataattcttgcagaagctaggtcactgataatatattgtaaccttaaatgtctgaatactgacacaaatggttttcctggttcagtttcaagaaaggccataccttcaaaatcttttctctgtttagaaaaccagacatctgtttctgtcaaaagctgttttaaagatccattccaagaaggcacaagttgaaggaacatccacttttttagagtggtgtatacatccatctccacttgcatcacaaataagttagaggaaccaatgagctgtttcatgacatttataccgagttctttaaaaagtttaacattctggtgagtcatcaaattgtttagaagccattcaaggcactttttctttacagaatctaatccatagatctctactgatgtgtaataaccgcatacagttttcacattaattgtttccttcattgtctcaccacactgctgtattaaaccatccagctgcagcatacaagctgctgccaaaatggcaacaactcgactgggttttatcaagacatcatctcgatacagtgaaccaaacgcaacctgcagtgcgtctacatcaatgttctggtcaggaatctccagttcaataatattcatgctggattctttccaagaaccactgaacatactagaaaagtagccagattgacataaatatattttgtgtaatcgccattcttctcctagagcacaaatcttaatgtcactgttttcaccattcaaaaataatgtttgataaatatatttggatgtactccttaattttttccttgcaggggtgttgaggagcggctgctgcttgtccccctcctcctcatgctcctccctgtgcgagtccgggtcacagtagcggcaggccccgctgctccgcttgcgcttgtgactgcccgggcagtaacagaagccgtagctcgccgcatcgtctccagtgtccggcctccgggccgagcccctggccctggcaccctgttcctgctgggcaagggctcgcctcggctggcccagcacccggctgctcgacgatcccatgggtcacggctccccaggacttcagggagcccagaggagggggtctctggccatggcccggccgccgccgccagccttccccgagcacaggtgcctacaccgccaccttctcacgcgcagccccaaccgttgcagcggacactgccgcctccaacctccgcacccctcccccacaatttttttttttttttttttttgagacggagtcttgctctgtcgcccaggctggagtgcagtggcgcgatctcggctcactgcaacctctgcctcgcgggttcaagtgattctcctgcctcagcctcctgagtagctgggattacaggcgcccgccaccacacctgggtaatttttgtatttttagtagaggcggggtttccccatgttggccaggctggtctcaaactcctgacttcaggtgatcctcttaccttggcctcccaaagtgctgggactacaggcgtgagccactgcctccggcctaaaacaatttcttttagagacaaggtttcactgtgtttctccgggtggtcttgaactccttggacagcattcttcattgctggaagcaattctcatctggcagccaaaaccaaggtccgttttagaaggaccacttccctaggagcaaagttttatttgcaagacctgacaaaggaaaatgtgtgtaccagacgcttgagcctaaccagtccaatgtaaatttgcgaccaggcacaaaaataaaataaaataataaaataaaataggccaggctcggtggctcatgcctataatcccagcactttgggaggccaaggtgggtggatcacatgaggtcaggagtttgagactggcctggccaacatggtgaaaccccatctctactaataatataaaatttagccaggtgtggtggtgcacgcctgtaatcccagcttttcgggaggctgaaatggagaactgcttgaacccaggaggcagaagttgcagtgagccaagatcgcatcattacattccagcctgggcgacaagagcgaaattccgtctccagaaaaaaataataagataaaataaaatagaataaagacttgaagtcaagccaggtacggtggctgctcacacctgtaatcccagcactttgggaggccgaggtgggcagatcacgaggtcaggagttcaagaccagcctggccaatatggtgaaagtgaccatggctgggtgaaatgatcactgcagccggtctgggaaggcagaagcaagcagagggcctgggcaggataggcagggattctctgtggggaggatctgtggagacaggggcagcaggattaggatgtcggaattgaggaggcttttgtccttgggggatggagtggagaagtggggcatggtcctggaaatttgccctgcagcctcaccaggccatctggaagctacttgttgggaaccccgtgtgtgtaaagggctgacccaggcccagacccggaggaactggagaagggcacacactgagaccacccgaggggtgtgctggaactgcttggccagtccttggggatgggatggctggggcatgtgggtgtcttcctgtaagaaaacaggacttgatgaggaaggtgggaggctgttccaggcagatggaggtctgtgcccccagagcaatgtaggagtcgccatgcggggctccatctttggtacagtgggggcagagattggcgaggggcatcagggccagatatgtaggtgtggggagccctagatgggccagtgctgcagggggaggcaaggtcatgccagggaggtggatgggacgctggacacaagtgaagagtgaccagccctgtggcttcctcaaacctatgtgagtgcctgccccattcccagatgaagaaaacagaggtttcaatagggaaagtgacttgttctaaatcccagagttgggaagtcaggaagctcagcctcctgattccaaaggcaaatctggagtttctgttggagttaaggggccaggtgaatggtctatgttgaccaaaaaaaaaaaaaaaaaaaaaaaaaagctctgtaaaatgtttaaagaagtttattctctggcgtgaacccgggaggcagagcttgcgccactgcactccagcctgggtgacagagcgagactcc

SEQ ID NO: 1881810 - DNA, 4001 bp, Homo sapiens; identical to SEQ ID NO: 318021

SEQ ID NO: 1881811 - DNA, 4001 bp, Homo sapiens; identical to SEQ ID NO: 318028

SEQ ID NO: 1881812 - DNA, 4001 bp, Homo sapiens
cctcagcctcccgagtagctgggattacaagagcccaccaccacacctggctaacttttgtgtttttagtagaaatggggttttgccatggtggccaggctggtctcgaactcctgacctcaggtgacccactcacctcggcctcccaaagtgctgggattacaggcgtgagtcaccacacccagcctcaactgaacattttgctcctccctgttttctgttacgtattgtgaactttaaaaatgaaaaactcgcataacgttctcaacgtttttaaactcaaattcttcgcagggcacagtggctcaaacctgtaatcccagcactttgagaggccaaggcaaaaggattgcttgagttcaggcgctcagatcagcctgggcaataaccttgtctctacaaaacatcaaaaaattagctgggcgaggtggcgagtacttgagtcccagctacttgggaagcaaaagtgggaggatggcttgagcccaggagagtcgaggctactatgttcactactgcactccagactgggtgacagagtgagaccctatctcaaaataaataaaataattacaaatatataataaatattataaatataaaagtaaatagcaactgagagacttttggctgaccatatcaaaggaattcttttttttcttttttttctgagacaagagtcttgctctgtcgcccaagcttggagtgcagtgacgcaatctcggctcactgcaacctccgcctccagggttcaagcgattctactgtctcttctgtctcccgaatagctgagattaaggcacacgccaccacagctaacctttttatttttagtagagacggggtttcaccagcctgttggccaggcctggtctcgaattcctgaccacaactggtccgcccacctcggtcctccaaagtgttgggattacaggcatgagtcaccacgcccggctaaaaggacttcttaattagagctgcctgcaatgggaaatccgactggacaggaggtattaaggtccctaaaactgcagacgttcaatgggaagtctgattgtaaacatgcatgctgtttaaaggattcatgcatcctgaagatggactttgtaaagatctccaatggcctgtcacttcccaacagtccattttcttcttaaaaatatcaccgaggccaggtgggtggctcacacctgtaatcccagcactgtgggaggccgaggcgggaggatcacgaggtcaagaaatcaagaccatcctagccaacatggtgaaaccccgtctctactgaaaatacaaaaattagctgggcgtggtggcacgcgcctgtagttccagctactcgggaggctgaggaaggagaatcgcttgaacccgggaggtggaggttgcagtgagccgagatcgcgccgctgcactccagcctggcgacagggcgagactccgtctcgaagaaaaaaaaatttttttaagtgatctgtttcctggaatccaaccccaaacaatccacgttcctcagcataagcctactggtgtgattcccgttacatgagctcggaatgctatctgccaacaaatgagagcaccaaacatcccaatttaagaagcttttcttcacaccttaccaagctatgtgaaactggcaagggtgattactgtccttgtttttcaggtatgggattcaggctcagaggttggtcactttctcaagcgggtcacaaactcgaaccctgaaccatcatttctaaaagtcgcgcttttacttagggagagacggcctgcagcttccctccctactctgcggctccccagacgaaagttaccttcctctgccttcacaagctccttcacatcctccttccctatgagcccaggcagggcaattcaacctccgttccccgccacgaaaacgctcccagccgcctagctagtcagacggcctgccccacctctgcgcctcacagacttccacacgcggactcaccggcgccgctagaaggactctcagccggaaactcagcccgacactcctctccgccgctttaggggcgccccggaagtcattccgccgcgccctgcggccacgccgaaacgttccggatgctgcagagtgcagctgccggagcggggcgctcaggtgcagggcatggcctccgctgagttggggcgcggaaagggacggtgttccagctggaattcgcagagaaccggaaagagtgatcgccattcgctctcggaaggtcgaaggctctgcagccatcgacctgggttctgaggagctcgatcttgtctttctacttctaaaaggttgggatgaaggaccctggccacagaagtaaagccagaattatccttgcttcttgctgtgtatttcaggactcctccattgctcttgctgttcattcaacaaacattgagcatctactttgagcctgatgcatgtctaagcactgaggaaataacaatgaaaaactgacaaaaatccttgctctcgtggagttttccttctccaaggggagtcagtatgaagaaaaacatatactatatgaaatggtgataatgctgtggagaaaaactaagcactgaaggggagaagtttgcagtttaaaatagggtggccaggccgggtgcgatggttcacgcctgtaatcccaggcatggtgatttgggaggccgagcgggggtggatcatcggagggcaggacttcgagaccagcctggccaacatagtgaattccgtctctactaaaaatacaaaaacattagccgggcgtgctggcaggcgcctgtaatcccagctactcgggaggctgaggcaggagaatcgcttgaatccaggaggcacaggttgcagtgagccaaccttgcactccagcctgggtgacagagacttcatctcaaaaaataaaatagggtggccagaggagtcctcgctgggaagacagttaagccatgacctgaatgaggaagggtgttaaccctgctgatacctaggggaaaagctcttcagacaaagagagctgcaagtgcaaaggccctgaggtagaagtgcattggggtctttgacgactgcaggagtgagcaggggatgagtggtggaagctgcaatcagaagggtaaggtggggaggagaggctgtgagcactgttaagaactttgggggaattgtgatggcttggaccagcagctggtgagaagtgactgaattctaaatcttaccaatacactggatgtgtgttatgagaaaagaatcaaggatacctccatagtctttagctgagcaactgaaaggttggggttgcaattattaaaatgttggcggggtgggtaagatcaattcagttttggacaagttgtatgactgccaattaacacaagtggaattactggcatttcccatacttgagaaatggagaggcagtgcacccccagatgagaaaagggttaggaataacacaaaggaactgcagaagctagggcctctttccttccccatcagcatactcatcccctccattgcctttattttattgttaaaaatttttcccatctctgttgtctccctcaaaaatataaacagaaggtatcttgcatagcagtggaaagaacagccctggatttaaaatcaggctctgacacactggctgggtgacctcaagcaagtcacaacccaagtctatgaactaatgtgtaaaatggggttgtctccaccaaccctgcagggcttagtgggaactccataatcagtctcatttcctcccagaagacaggattttaaaagggagaggaggggaaattagtatcgcagtgccaggaagcttccatgcttgcctccctcccacctttgacctcattagaggactcacacacaaattccacacttttccttttgtgcccttccttcctatccacacttttgcttccttccatcttaattgaccatcctatttgcaagacgggatgcattcctctaggacaaacagcctagaggaatcccaagcccc

SEQ ID NO: 1881813 - DNA, 4001 bp, Homo sapiens
tcagcctcccgagtagctgggattacaagagcccgccaccacacctggctaacttttgtgtttttagtagaaatggggttttgccatggtggccaggctggtctcgaactcctgacctcaggtgacccactcacctcggcctcccaaagtgctgggattacaggcgtgagtcaccacacccagcctcaactgaacattttgctcctccctgttttctgttacgtattgtgaactttaaaaatgaaaaactcgcataacgttctcaacgtttttaaactcaaattcttggcagggcacacagtggctcaaacctgtaatcccagcactttgagaggccaaggcaaaaggattgcttgagttcaggcgctcagatcagcctgggcaataaccttgtctctacaaaacatcaaaaaattagctgggcgaggtggcgagtacttgagtcccagctacttgggaagcaaaagtgggaggatgacttgagcccaggagagtcgaggctactatgttcactactgcactacagactgggtgacagagtgagaccctatctcaaaataaataaaataattacaaatatataataaatattataaatataaaagtaaatagcaactgagagacttttggctgaccatatcaaaggaattcttttttttcttttttttttgagacaagagtcttgctctgtcgcccaagcttggagtgcagtgacgcaatctcggctcactgcaacctccgcctccagggttcaagcgattctactgtctcttctgtctcccgaatagctgagattaaggcacacgccaccacagctaacctttttatttttagtagagacggggtttcaccagcctgttggccaggcctggtctcgaattcctgaccacaactggtccgcccacctcggtcctccaaagtgttgggattacaggcatgagtcaccacgcccggctaaaaggacttcttaattagagctgcctgcaacgggaaatccgactggacaggaggtattaaggtccctaaaactgcagacgttcaatgggaagtctgattgtaaacatgcatgctgtttaaaggattcatgcatcctgaagatggactttgtaaagatctccaatggcctgtcacttcccgtcagtccattttcttcttaaaaatatcagcgaggccaggtgggtggctcacacctgtaatcccagcactgtgggaggccgaggcgggaggatcacggggtcaagaaatcaagaccatcctagccaacatggtgaaaccccgtctctactgaaaatacaaaaattagctgggcgtggtggcacgcgcctgtagttccagctactcgggaggctgaggaaggagaatcgcttgaacccgggaggtggaggttgcagtgagccgagatcgcgccgctgcgctccagcctggcgacagggcgagactccgtctcgaagaaaaaaaaaaatttttaagtgatctgtttcctggaatccaaccccaaacaatccacgttcctcagcataagcctactggtgtgattcccgttacatgagctcggaatgctatctgccaacaaatgagagcaccaaacatcccaatttaagaagcttttcttcacaccttaccaagctatgtgaaactggcaagggtgattactgtccttgtttttcaggtatgggattcaggctcagaggttggtcactttctcaagcgggtcacaaactcgaaccctgaaccatcatttctaaaagtcgcgcttttacttagggagagacggcctgcagcttccctccctactctgcggctccccagacgaaagttaccttcctctgccttcacaagctccttcacatcctccttccctatgagcccaggcagggcaattcaacctccgttccccgccacgaaaacgctcccagccgcctagctagccagacggcctgccccacctctgcgcctcacagacttccacacgcggactcaccggcgccgctagaaggactctcagccggaaactccgcccgacactcctctccgccgctttaggggcgccccggaagtcattccgccgcgccctgcggccacgccgaaacgttccggatgctgcagagtgcagctgccggagcggggcgctcaggtgcagggcatggcctccgctgagttggggcgcggaaagggacggtgttccagctggaattcacagagaaccggaaagagtgatcgccattcgctctcggaaggtcgaaggctctgcagccatcgacctgggttctgaggagctcgatctggtttttctacttctaaaaggttgggatgaaggaccctggccacagaagtaaagccagaattatccttgcttcttgctgtgtatttcaggactcctccattgctcttgctgttcattcaacaaacattgagcatctactttgagcctgatgcatgtctaagcactgaagaaataacaatgaaaaactgtcaaaaatccttgctctcgtggagttttccttctccaaggggagtcagtatgaagaaaaacatatactatatgaaatggtgataatgctgtggagaaaaactaagcactgaaggggaaaagtttgcagtttaaaatagggtggccaggccgggtgcgatggttcacacctgtaatcccaggcatggtgatttgggaggccgagcgggggtggatcatcggagggcaggagttcgagaccagcctggccaacatagtgaattccgtctctactaaaaatacaaaaacattagccgggcgtgctggcaggcgcctgtaatcccagctactcgggaggctgaggcaggagaatcgcttgaatccaggaggcacaggttgcagtgagccaaccttgcactccagcctgggtgacagagacttcatctcaaaaaataaaatagggtggccagaggagtcctcgctgggaagacagttaagccatgacctgaatgaggaagggtgttaaccctactgatacctaggggaaaagctcttcagacaaagagagctgcaagtgcaaaggccctgaggtagaagtgcattggggtctttgacgactgcaggagtgagcaggggatgagtggtggcagctgcaatcagaagggtaaggtggggaggagaggctgtgagcactgttaagaactttgggggaattgtgatggcttggaccagcagctggtgagaagtgactgaattctaaatcttaccaatacactggatgtgtgttatgagaaaagaatcaaggatacctccatagtctttagctgagcaactgaaaggttggggttgcaattattaaaatgttggcggggtgggtaagatcaattcagttttggacaagttgtctgactgccaattaacacaagtggaattactggcatttcccatacttgagaaatggagaggcagtgcacccccagatgagaaaagggttaggaataacacaaaggaactgcagaagctagggcctctttccttccccatcagcatactcatcccctccactgcctttattttattgttaaaaatttttcccatctctgttgtctccctcaaaaatataaacagaaggtatcttgcatagcagtggaaagaacagccctggatttaaaatcaggctctgacacactggctgggtgacctcaagcaagtcacaacccaagtctatgaactaatgtgtaaaatggggttgtctccaccaaccctgcagggcttagtgggaactccataatcagtctcatttcctcccagaagacaggattttaaaagggagaggaggggaaattagtatcgcagtgccaggaagcttccatgcttgcctccctcccacctttgacctcattagaggactcacacacaaattccacacttttccttttgtgcccttccttcctatccacacttttgcttccttccatcttaattgaccatcctatttgcaagacgggatgcattcctctaggacaaacagcctagaggaatcccaagcccc

SEQ ID NO: 1881814 - DNA, 4001 bp, Homo sapiens
aaggttatggacttttaaatagggaaactatcctagctggcccttaaaggcaaagatgcacaacagctatggcggaagaagtcagagagatccaacgtttgagaagaatttgaggcgttatagttggcttgaagacgaaaggggcaacatgagaagtaatgcaggtactttaaggagctaagagggaaacagaaatctcagccctataacaaggaactgttgagcatggaaacattctcctcctcccccagtaactttatcaaaactcttaaaattttcccctatttggcacaaacatatggacacctttctcactcctgagtaaaggaatgatgtactaaaatgaaggatttataccgggtggggtggctcatgcctgtaatcactttgagaggctcaggtgggcggattgcttgagctcaggagatcgatcagcctgggcaacatggtgaaacctcgtctctaccaaaagtataaaaaattagccaggtgtggtggcacatatctgtggtcccagctactcaggagactaaggtgggaggatggcttaagcctgggaggaggaggctgcagtgagccaagatcgcactagtacactccagcctgggtgacagagcgagcctccatctcaaaaaataaaaaaatagaaaaggctgggcgcggtgactcacgcctgtaatcccagcactttcggaggccgagacaggcggatcacgaggtcaggagatcgagatcatcctggctaacacggtgaaaccccatctctactaaaaatacaaaaaaaattagccaggcgaggtggcgggcgcctgtagtcccagctactcgggaggctgaggcgggaaaatcgcgtgaatccaggaggcagagctcgcagtgagccgagatcttgccactgcactccagcctgggcgactgagcgagactccgtctcccaaaaaaaaaaaatgaatagaaaaactacagaactagtatgtgtgaacagaacccaaggccaatatgtgtaagtctactgtttaattactatcatagaattaatacacgctggtcaaaagagaacaagaagaccttgagaaaaggttcaaggaagttagaatcccaatgtttggatgaacagcatttataattttaaaatgcaaaataaaaagaaatcatttttcatgtatcagtctactaaagttttgttttcatttttaaaataattttctttttaaataataatacctactctgtgttggtacggatatggtaaaaatggcattcttaaattctgttaactttggtataacctgaaacaagttttttgatgggtattacggcagtaagcatcaagaagctttaaaaggcacatacccaatttttcagctttttaagtatttatacttctgaataaactaggctctcttttagaaatctaccctacagaattacatatttttaaaaatcctcgtacaaatgctgttatttacaaaaatgttcattttagcattattggtgacttaaaattagaaaaatcctttctcttcctttctctccaggactctcataactgtcacctgagttggttccaacggatacgcagaatagaagacaaatgggagaagaatattgacaaactgcaaggtatgcacccgagctacagtaattccgagttgacagctcgatctcccctcccactctgcggctcttcaaacctctgcaaaaggaagagggtctctgcctggggcagtcactcaccgaaccccgtgaagcccatggtgaccgcaagctgcgggtccggtcccgatgcgtctgagcctgtcactggagcaagaaaagagaggcggcctagttagtgcggcgccccagctcccccgacacggcccaccccgccaggactcgcttcatgaaacccaccttcgctgggcccagagcgctccatggctggccgcacgccgcagaaccagccacagagacagcccaaactgcaggggaacttgccaataactcgcggcaaatgctggaggaagtaccgcctccaagctacagcggcgccgccgaagccaagagcggcgccttccgcagagggactgcggctttctgcgcggcgccccctaccggacaggcgggaaagcgccgcgcaactcagaccactgaaggggagtagtatctggagtttctgtaacatcctttcccttttttttttttttaagccagagcctctgtcgcccaggctgcagtacagtggcgtaatctcagctcactgcaacctctgcctcccgggatcaagcgattctccttcctcagcctcccgagtagctgggattacaggtgcccgccggctaatttttgtttttgtttgtttttgtttttgttttgaaacggagtctctgtcgcccaggctggagtgcaacggtgtgatctcggctcactgcaacctccgcctcccgggttcaagcgattcttctgtctcggcctcccaagtagctgggattacaggcgtccaccaccacgcgcagctaattttttgtatttttagtagacacgaggttttgccatgttggccaggctggtttcgaactcctggcctcaagtgatccgcctgcctcggcctcccaaagtgctgggattacaggcgacaccctttgcttttttttttttttttttttttttttttgaggcggagtatcactctgttgcccaggctggagtgcaatggcgtgatctcggctcactgcaacctctgcctcccagtttcaagagtttcttctgcctcagcctcccaagtagctggcactgcagacacgcaccaccacacccaggtaattttttgtatttttagtagaaacagggtttaaccatattgaccaggctggtctcaaactcctgacctcctgattcactcatctcggcctcccaaagtgctgggatcacaagcgtgagccatcgcaaatacaaatattcattaaacgtataggctgtctacttactcgatgacctttctacctagactaaagccaaaaaactctgacaccctaaaagattcataaattatttactacataaggtttagatgcatcattaccaatattgcacatagaaatttaatgttgttagttgagcaaacagatgccatgactatttcttctctttataaatcttggtggcttatggcagcagaagcctactccactatttaggctcctatgacagctacttttcccctattgagcaagtttcaccttaagttactaccaaaaaaattatacaattaatatattttgtacctcctgaaaataactgtttatattatcatctcaagtaaaataaaatattttcacagagagatggagagatgtgtagaaaatttatcaaatattaacctcttcctaaacatggggttgaattcctccagtaacattgtaacgttgttagaattatgtgaaagggggctttgtctcaactatcctgctagtcattcattcaacagcactctatttatgttgtatgtttccctaaatgtttccatttttgcctccaaacactgctaatttggtttggttgctatttattttatactgtcttataaatcccctggaaagtgtattgccccatgcctgcacacactgcagtacaagagtgtactgaagtacataatggaagagttggttttttctgccactccatcacttgagtttaaataataaggaaacacagaaatctaaaacattttgaacagttaagaattattaaaagaaagtagaatgacaaacaggaaaattatctatccatatctatatatgtatatctttctagaaatgtccaaaaggacaaaagaggaaaaaatgaagggaaaatcatgaacccttgaatatgagtccttctgagcaaaactctgttcttagcatttctccactattatcaagtttctagtatcctccaagaaaataccatattatcatcctggaactttggtagtatatacctgtcctttctatccctatctacagagacctgtctga

SEQ ID NO: 1881815 - DNA, 4001 bp, Homo sapiens
aaaatgacaagcataaaacaaccccagttaaaaagggcaaagctaatacaggagcagaaaatcaaactccgcatcttctcacttataagtgggagctgaacaatgggaacacatggacacagggaggggaacaacacacaatggggaacaacacacaacacacactataattttctgtagggggttgaggagagggagagcatcaggaaaaatagctaatgcatgctgggcttaatacctaggtgatgggttgataggtgcagcaaaccaccaccacacacgtttatctatgtaacaaaactgcgcttcctgcacatgtaccccagaacttaaaatttaaatcaagaaaaggcaaaggacatgaacagatattttctcaaaagaagacactcaagtatatgaaaaaacactcatccttactaatcatcaaataaataaatgcaagcaaaaaccacagtaagatgccatctcacatcagtcacaacagctataattaaaaagtaaaaaaattagatgttggccaggctgcagagtaaagggaatgcttatacactactgttgatggaaatgtaaactggttcaggtactgtggaaagtattttggagatttctctaagaacttaaaacagagatacccttcgacccagcattcccattactgggtatatattcaaaggaaaataaattattctaccagaaaaatatacatgcactcgtacgttcatcagcatgttattcacaatagcacagacatggaatgaacctaggtgcccatcaaaggtggattggataaagaaaatgtggtacatatacactatggaatactatgcctccataaaaaagaatgaaattatgtcctttgcagcaacatggatggagctaaggacataatcctaagcaaattagtgctggaaaagaaaaccagataccacacattctcacttataagtggaacctaaacactgagcacacaggaacattaacatgggaacaagacatgctgcaggctacgggggtgggggaaagaggggagcatgggctgaataactacctactgggtactatgctcactaccagggtgcactgtacaaaagtaacaaatctgcatatgcactatctgtgtctgaaaaaaactgaaattataaaaaccaagagaatatgtttctaatgaacgtagactttatttgatggactggattagaatataattttttttaaggggaaaggcattgggggatgcacaatgtctacaggtttctaaacctctctggtttctcacctaattcatagtctcttatgtcattttcatagttttcatattctgcctttccacctcttctttttaacaagtaaaattcctcatagcatacaaaaaaacaattttataaaaaacccatattatagatcagggacctgtggattatatgctattagaactatacaaaatgtctctatatagttttctgtatctttggaatatctttgggtgaagctgcagaccttctcggtgagtgttacagctctgcgcagagccaaacagtgagcagcagcaagactgcaaagagcaaaagaacaaagcctccacactgtggaaagggaccctagcacgttgctgttgctggctctggcagctgcttttattcccttatctcaccccacccacatcctgatgatcggtccatttcatagagagctgatgggttcattttacagagagctgcttggtctgtttacaatcctttagctagacacaaaagttctccaagtccccaccagattagctagacacagagcactgattagtgcgttcacataccttgagctagacacagcatgctgattggtgcatttacaatcctccagctagacgtagtaagttctccaagtacccaccggactcaggagcccagctggctttgcctagtgcatcccggccgcgggcggagctgcccgccagtctctggcgcgctgccgcactcctcagccgttgggcggttgacgggaccgggtgccgcgtagcaggaggtggcgcccgtcccctcggggtggcgcgcgggagcctgcggttggggggcggggggcggggggcggggggcaggggacgggggcggggaggagggtgagggctccagcatggcaggctgcaggtcccgagccctgcccccttgccccgcggggaggtggctgaggcccagcgaaaattcgagcgcggcgccggcgggccatcactgttggaggacccagtgcaccctccgcagctgctggcccgggtgctaagcctctcactgcccagggccggcggcgccagccgaccgctcaacagtgcggggcgcgccgagcccgcgcccacccggaagtcgcgctgagcccgcgcccacccggaagtcgcgctggacctgcgagcaccgcaggcagcccaggttccggcccgcgcctctccctccacacctccccgccagcagagggagcccgctcaggcctcagccagcacagagaggggctcccacggtgcagctgcgggctgaagggctcctcaagcgcggccagagtgggctgaggccgaggaggcgccgagagccagcgagggatgccagcaagctgtcacctctcagaaatacaggaagaacatcaataatgttcgaagttataaagtagtaggtttctatcaagagtaaaacataaacgaagttataaagtagtaggtttctatcaagaataaaacataaacgatcaaagaattccttataaaaacattttttatttctaggaatcaaaacataaatataaaatttgagagtccaccaaaaaaaattagatgccagatttcactataattatcagggaagcgcccaaatgggttgtttacggcgcctcggggaaactttctgtttcgtgttaagggtcttgaaccatgatgtttagaaaaccatgggctgatgctttcagaacctctgtgatttttgcctctgacactgcatccaatagactagcatgttgattagggaaagctaaattcaataaaagacgactgtaagtggggtcaccaccttgaggggtcatgttagaaaagtagatgataaggtggtattgatagagtattgaagtctgggctcagatggttgcccggggcctttcaagaccaatgactgataagaataggtaatgttcaggacatagagtttaggattgggggacactgtgagttaagggccatgacagaagtcttcataagtaaactgttaattgacacaagctgctacctgcccaggtgagcaatctgttggcccagaggagagttgcttactgacataaattgatttgcagaaatttcctgaagcaaacaataagttatttattggtttgcagccttactttcctgaaaaataattttctggaatgaattgtgaaatcatgttgacacagatggcctcaggtttcagttcggataattaagctgtgtaaatatagaaagtcgaaggtttctgggtgctgttgattcacagtatgcaacaatgatcatattacttttatttactatgagcttcagctgaaaatccaaaagaaactttaatttcagatatttaatgaaatcattatagctgtggtaatttcctttagctgggtgtgagtgtgtgatgtgagcgtgtgatgtgtgtgtgtgtgtgtgtgtgtgtgtgtactctggcagcatattccaaataatttctgtaaaatttcagtttgaaattaatagaagacatattaaattgtttaaactctttgttatttaaattctatattactttagtcgattactctgtattattacggcaaagctttgatatgttgccctgaatttaaatgaaaaggctgttcggcctaaaaacaggaatattttattaccaaaaagaattaactaccatatgtcatttacagaaaagagtaaattcttcagggcatagaaaatacacatttccttctgtttgtgtggaaataagcaaaatacctgttataatagattc

SEQ ID NO: 1881816 - DNA, 4001 bp, Homo sapiens
gaaaaaatgacaagcataaaacaaccccagttaaaaagggcaaagctaatacaggagcagaaaatcaaactccgcatcttctcacttataagtgggagctgaacaatgggaacacatggacacagggaggggaacaacacacaatggggaacaacacacaacacacactataattttctgtagggggttgaggagagggagagcatcaggaaaaatagctaatgcatgctgggcttaatacctaggtgatgggttgataggtgcagcaaaccaccaccacacacgtttatctatgtaacaaaactgcgcttcctgcacatgtaccccagaacttaaaatttaaatcaagaaaaggcaaaggacatgaacagatattttctcaaaagaagacactcaagtatatgaaaaaacactcatccttactaatcatcaaataaataaatgcaagcaaaaaccacagtaagatgccatctcacatcagtcacaacagctataattaaaaagtaaaaaaattagatgttggccaggctgcagagtaaagggaatgcttatacactactgttgatggaaatgtaaactggttcaggtactgtggaaagtattttggagatttctctaagaacttaaaacagagatacccttcgacccagcattcccattactgggtatatattcaaaggaaaataaattattctaccagaaaaatatatatgcactcgtacgttcatcagcatgttattcacaatagcacagacatggaatgaacctaggtgcccatcaaaggtggattggataaagaaaatgtggtacatatacactatggaatactatgcctccataaaaaagaatgaaattatgtcctttgcagcaacatggatggagctaaggacataatcctaagcaaattagtgctggaaaagaaaaccagataccacacattctcacttataagtggaacctaaacactgagcacacaggaacattaacatgggaacaagacatgctgcaggctatgggggtgggggagagaggggagcatgggctgaataactacctactgggtactatgctcactaccagggtgcactgtacaaaagtaacaaatctgcatatgcactgtgtctggaaaaaactgaaattataaaaaccaagagaatatgtttctaatgaatgtagactttatttgatggactggactagaatataatatttttttaaggggaaaggcattgggggatgcacaatgtctacaggtttctaaacctctctggtttctcacctaattcatagtctcttatgtcattttcatagttttcatattctgcctttccacctcttctttttaacaagtaaaattcctcatagcatacaaaaaaacaattttataaaaaacccatattatagatcagggacctgtggattatatgctattagaactatacaaaatgtctctatatagttttctgtatctttggaatatctttgggtgaagctgcagaccttcttggtgagtgttacagctctgcgcagagccaaacagtgagcagcagcaagactgcaaagagcaaaagaacaaagcctccacactgtggaaagggaccctagcacgttgctgttgctggctctggcagctgcttttattcccttatctcaccccacccacatcctgatgatcggtccatttcatagagagctgatgggttcattttacagagagctgcttggtctgtttacaatcctttagctagacacaaaagttctccaagtccccaccagattagctagacacagagcactgattagtgcgttcacataccttgagctagacacagcatgctgattggtgcatttacaatcctccagctagacgtagtaagttctccaagtacccaccggactcaggagcccagctggctttgcctagtgcatcccggccgcgggcggagctgcccgccagtctctggcgcgctgccgcactcctcagccgttgggcggttgacgggaccgggtgccgcgtagcaggaggtggcgcccgtcccctcggggtggcgcgcgggagcctgcggttggggggcggggggcggggggcaggggacgggggcggggaggagggtgagggctccagcatggcaggctgcaggtcccgagccctgcccccttgccccgcggggaggtggctgaggcccagcgaaaattcgagcgcggcgccggcgggccatcactgttggaggacccagtgcaccctccgcagctgctggcccgggtgctaagcctctcactgcccagggccggcggcgccagccgaccgctcaagagtgcggggcgcgccgagcccgcgcccacccggaagtcgcgccgagcccgcgcccacccggaagtcgcgctggacctgcgagccccgcaggcagcccaggttccggcccgcgcctctccctccacacctccccgccagcagagggagcccgctcaggcctcagccagcacagagaggggctcccacggtgcagctgcgggctgaagggctcctcaagcgcggccagagtgggctgaggccgaggaggtgccgagagccagcgagggatgccagcaagctgtcacctctcagaaatacaggaagaacatcaataatgttcgaagttataaagtagtaggtttctatcaagagtaaaacataaacgaagttataaagtagtaggtttctatcaagaataaaacataaacgatcaaagaattccttataaaaacattttttatttctaggaatcaaaacataaatataaaatttgagagtccaccaaaaaaaattagatgccagatttcactataattatcagggaagcgcccaaatgggttgtttacggcgcctcggggaaactttctgtttcgtgttaagggtcttgaaccatgatgtttagaaaaccatgggctgatgctttcagaacctctgtgatttttgcctccgacactgcatccaatagactagcatgttgattagggaaagctaaattcaataaaagacgactgtaggtggggtcaccaccttgaggggtcatgttagaaaagtagatgataaggtggtattgatagagtattgaagtctgggctcaaatggttgcccggggcctttcaagaccaatgactgataagaataggtaatgttcaggacatagagtttaggattgggggacactgtgagttaagggccatgacagaagtcttcataagtaaactgttaattgacacaagctgctacctgcccaggtgagcaatctgttggcccagaggagagttgcttactgacataaattgatttgcagaaatttcctgaagcaaacaataagttatttattggtttgcagccttactttcctgaaaaataattttctggaatgaattgtgaaatcatgttgacacagatggcctcaggtttcagttcggataattaagctgtgtaaatatagaaagtcgaaggtttctgggtgctgttgattcacagtatgcaacaatgatcatattacttttatttactatgagcttcagctgaaaatccaaaagaaactttaatttcagatatttaatgaaatcattatagctgtggtaatttcctttagctgggtgtgagtgtgtgatgtgagcgtgtgattgtgtgtgtgtgtgtgtgtgtgtgtgtgtgtactctggcagcatattccaaataatttctgtaaaatttcagtttgaaattaatagaagacatattaaattgtttaaactctttgttatttaaattctatattactttagtcgattactctgtattattacggcaaagctttgatatgttgccctgaatttaaagaaaaggctgttcggcctaaaaacaggaatattttattaccaaaaagaattaactaccatatgtcatttacagaaaagagtaaattcttcagggcatagaaaatacacatttccttctgtttgtgtggaaataagcaaaatacctgttataatagattcctcac

SEQ ID NO: 1881817 - DNA, 4001 bp, Homo sapiens
ggttcacctgaggcgattctcctgcctcagcctacctggtagctgggattacagacgtccaccaccatgcccagctaatttttgtatttttagtagagacaggattcactacctgttgaccaggctggtctcgaactcctgacctcgggtgatccacccacctcagcctcccaaactgctgggattacaggcgtgacccaccgcatccggcctagaccgttgttgaagctggttttcttcttctttcctcagttcttttcttttacatcttccccccatcattgctctgcccatccgaaggctgtggctggcacaggacagaatagaacctcctagcctcaagttccaaacccacactctccaatagccaggctctcagatgggaagcttcaaagccttgtgacagcctggctgaacctctccagcctgggccctccctccatttcctgccccggaaacaggcatctcctctggccacctcccaaagcctgtctggaagcctcaggcacccgctcctggaagcctgtacgattcacaacaaacggcctgtccacccagtcgtgctgagcacacccctattcccccgagctctgaattgtcctttgcccaggctaggacaacatctcagagccttctgcctgctgcagactcggctcagcccaaatcactccatgaaattggggtgtggcatctgcctcaaggagcatttctacaacctctgctgcctctaccgcaaatgaaactggctctcacccactggctctcggtgacgggcacagtgcggagccccacagggagtgtgtagaagtcaaaggccccagtgacttctgtgcagtcaaccgcacctacgacagccaaagcgccaggtgtgagcgccccgacagcctgagccccatctggcctgccctacagcaggaagacccctcgtgcatgcaccccagaagtcgccactgggcctgcagagaagcagcaaccagaggctctgcccttcactggctgaccctgggacctgcccttcaaaatcaggccttctccttgaccagacgaggtggctcatgcctggaatccctacactttgggaggctaaggcaggaggatcacctgagtccaggagttcaagaccagcctgggcaacctagtaagaccccaactctataaaaaggagttttttttttttgagacagtctcactctgtcacccaggatagagtgctgcggcatgatctcaattcaccgcagcccctgcctcctgggttcaagcaattcccctgcctcagcctcccgagtagctgggattacagacgtgcaccatcatgccctgcaaattttcatattttagtagagacggggtttcaccatgttggccaggctggtctccaactcctggcctaaagtgatccgcccgcgtcagcctcccgaagtgctgggattacaggtgtgagccaccatgcccggcctacaaaaaaaatttttttaattagccaggcatggtggcatgtgcctgtagtcccagctactcaggaggccaaggtaggaggattgcagctcaaagctgcagtgagctgtgatcaggccattgcattccagcctgggtgacagagtgagaccatcacaaaaacaaacaaacaaataaataaataaataaataaataaataaataaataaaaaatctgggcctcccaccaagggtgggaaacatcagaaagctcagaggaccacacctgcccgttcacctgtcctgggctcctgctgaagccagggctaccagatgggggcaaaagacctcccttacgcaagtcccaaaccaccattacctcccacgagtacaggtaggcggggtgttcgtgcatcaggtacggccaccagaggttggcaccagcaccttcagctggccctgggtcccagcctggttgtccacgactttgttttctgcattcaaaagacacacttccaacttgaactggttactgcacttgacggagatctggtaattcaccagccctgcaggaggcaagagagaccagggcttagggagggacatgacctgggtcacacaaacgggaaggccccacaatgaccactcccaggcactctcatttgcttctgttgctttttttttttttttttttttgagatagaatctcgctctgtcacccaggctggagtgcagtggcatgatctggactcactgaaacctctgcctcccaggttcaagtgattctcctgcctcagcctctggaatagctgggattacaggcacctgccaccacatccagctaatttttgtattgttagtagagacggggtttcaccacattagccaggatggtcttgatctcctgacctcgtgatccgcctgcctcggcctcccaaagtgctgggattacaggcttgagccaccgtgcccggccctgaaccaatgcacccagcccgcttttaatttaattttttaattttttttttttttttttttttttttttttgagatggagtctcactgtcacccaggctggagtgtagtgctgcgatcctgactcgctgcaacctccacctctggagttcaggtgattctcctgcctcagccttccgagtacctgggaatacaggaatgcaccaccatgcccggcgaatttttctattttcagtagagacggagttttgccatgttggccaggctggtctcgaactcctgaactcaggtgatccacccgcctcagtctcccaatagattacatatattattaatgaattgcttcctttaacaccctattcattgaattttccagtaaaccacaattactaattactcctgaaatcagaaaagaggttaaaaagattttataacagtatcctatgaaatctactactttcaagtaatagtagttgaattaccaaaacccgtcactcaagccaatgactacaattaagatatgagtaacatttcctagataaataaagtcaattaattatatttgcatctgggaaatagagaaagtacatataagccatgattttgaagtcaaaagagagagaatatttgccaaggaggggtgagttatagtatgtaattataacatacagaagttttttgtatgctggtaactaattttaatttcctacatttttatgtagatttctgctattcttgtcctattttcctaatcatctttctatatgaatgactacataattctgagaataccaaaagagacagacacagaaccaatcggattcctttcttcttgaagcttctgcacagcaaaagaaactatcaacagagtgaacagacaacctacagaatgggagaaaatttttgcaacaatgcatgtgacaaagatctaatgtccaacactgataaggaacttaaacaaatttacaagaaaaaaaaaaatctcattagaaagtgggcacaggacataaacagacacttcaaaagaagacacacatgcggccaacaagcatatgagaaaaagctcaatatcactgatcattagagaaatgcaaatcaaaaccacaatggcataccatctcacaccagtcagtatggttattattaagaagtcaacgccgggcatggtggctcacgcctataatcccagcacttcaggaggccaaggcaggcagatcgcatgaggtcaggagttccagaccagcctggacaacctggcgaaaccccgtctctactaaaaatacaaaaattagcccagcgtggtggcgggtgcctgtaatcccagctactcaggatgctgaggcaggagaatcgcctgaacccgggaggcagaggttgtagtgagccgagatcataccactgcactctccagcttaggtgacagagcgagactctgtctcaaaaaaaaaaaaaaaaaaatatttgaattttgtttaaatcgctaacacatactgggcatttaataacaaaaaaaaaggacatgagattgtgatccttatgaaggtttgagaggcatttcactagggttcaacatacagcagtctgaaacatac

SEQ ID NO: 1881818 - DNA, 4001 bp, Homo sapiens
tttgtgtactttgaagggctcccattaattaaggtatttcttataagcattcagaaagtttcttttcttggcatgcgacttgaaaatttgtcctgatattttccctgtgacaatgttttgtgaattgtaactcagccacttaagtggctcctcataataaagccacatggtatccatgtacacatatttaacaaatcaaagaagtggttctcaacctaatctctagaggaggtccttcttgttcactttcaataactatgttgaagaatagattctaaaaagctatcaccaaattttcgaatatgttttgaaatttgtgtccacaaaatctataaatcaataaatgtatagaatagagcataataatccaattaacaaatttaagatgtcatctaagcaggaatgaatgcaataaataggccttcttacttcaaaatcaactgcagaggtaatgcattgccactagacttgtgtgctgtgttggtaataaattaacaaaaactttggggataagaaaaatctgcaaataaaatggtgtgtcatttgtgaaatataatcacaaaaatgttcagattgttataattaacagaaaaactattgtttttattatatccagtgtttaacagacactattcatgtatacatacaacattcttataataactcttgtgtccatgtaaatagcagtcttgccaaaaagaattgattatcatgtagtagtttgtaagtattttcatgcataggctgcaaccctttagagtgctattctaataaattattaatattaacttgatgaacacaattctaagacatttcatttgaggatatgtttattaactattaggttggtacaaaaggcattgcgttttttgccattactttcaataaaaaatagaaccagcatttagaaatctactttcagaaacttaataaaatgagaatttgtcctcttttacatataggaagcctgcataataagcattctgttgctagtacataagcttcccattttcatcaggaaactatacacttacatttcacttttactaacttcaatgcatgacttctaccttcaaggtgatttcatgcttctagccaccatgtctgtactccaggacagcagcacaaagtgtagaaaaataaaaaagacatacctccctaatgagtcaactgcacttaaggagccatcccagaagtttcacacggcttatttgaatacagctatatccagatgcaaggaatgctgggaaatgtggtattgtgcgcagctaaagttgggattatgttagtgaaaatgagaccacgaacattggaaggttaaaagcaatctctcatgacatatacaattacagaaattaaattaaatctttaagcaatgtgataaacctatggaatgttaacaggcaaaaatagcaacattaaaaattacagtgagggaataaggtatgattcgtttgtagatggtttgtgtgtcattaatctaggcaaaaagtcataaactcctctaacagtgaccacatgtataaaagaaataataatacacactatggctaacaacattccattttggcctatttactgttgttaagtctctatggttagcatcagaaatgtacagttttgatagcctatgacctcaacatgttcagtttgatagtagaaaggacaacataaagacaaaccaatcaacaaataagaataaaaactgttaaaaaaaggacaatattatcataagaacataaggatgtgataatgtatttgacatatcgtttatttattgttttatagttggataatacatataaatttactgctccttcaatgttagaatcaatagaatcatagcagaagtaattaagcagataaagatcaaaacgtcacctttattacttactgtttgaaaaatagtctaaggctggttttacagggttgctcctatccatcacctgatgtgaagtttcttaggaagcttcaggactacaccaaagaagcagaacctgctctttcactctgttgcattgtgtggagtgcaggccatcatgactgctctctacaagaaaaagaaaggaaataattaagaaacgcacaaaagtttgtgaattgagaatcccaaaataggtatgaaattggttagctttctaaattcaccaatctcataactaacacctgtccccatgcagtgaatgagtaaaggatggacagactccataatgattattctagggaaagccttctgagtagaaagaggagagttttgcaaacagttttgtagagtttactcttgtttatgcactgataataaataagagttcctaaaattctctctagaactctaggtaaatgagatatttcactgctcatgctgtgtgaccttcatgtcccatctgcctagactgtaaatatgctttctgaagtttaaaagaattagtatactatgcttacattaagcaaaaaagtacccttattatgcaggatcaagtaacactctaaagattcatgtttatgaaaaaacactgatgattctattttattatgtgtcttctaaagagaaaaatacttgtgctctgcagcataattttacaatgtgctattctaaatactttcatttaaacaagaccattatgaaaatgttttgcacacagaaatatattttgaatacttttttaaaaagatcacaaagtatatggtctctgtacgtgttcaattattttaatgctttcactataacaggaattcttaaagaggatatgtacttgcataatgctgataattctttctcatttctgtttgtgctttggctgttgttacaaccactgaaagtagtaattacatgagtgtattatccatgattatctttagatatatgtgcattttctttaattaaactataaactctaaatgaaaaataaaaaagaagtcacctcttgtctctttgtacaatattaaaatttttttcttgtatccagagtttcccaaatgcctgttgcaaaattttacttagggagtagaaagtggagaatcaatatggtaaaaaaaaactgtgttacagggaaggagacacagggtaagcattttccttatcttctctcctgtatctacgtgctgcacaagcataaatgatagcagtcacatgaacgagtacttttcaagaacgtagaatatggtgatggaaaaaaaaaaccgctttgaaacatcgaataatataaaagccagaactactacaactattttttacatccatagaaggtaaactatttttagatataaaattccttctgacggtagtcctgatcatttaaccaatattttgataaatcaaagaagggaaaaatggacattcagtccaaagatgggcatgtattcccatgcccagtcaggcaaaattgtggatgttctttaaaataacaattcattcaacaaataatttttaaatggctactgaatacctggaaaggttctagacacaggggctatagtaagaaacaagaaggaactaattgacaagaatgtgctcaccgacaatgaaacatctcctcatggagcttgagttctgtttgaaaagacagagaacaaaaaaatattattgcacagagtgttagttatgtgtgaattaaaagactggtcagtacttgaaggagaaggagtgacaacaaatctcacttccagttctatttacctgaacagattaattctattttgtttcaatgcaacagtagtcctacggttaacaagatgcactacacaaagcaaacaacttataaaacgcattttttccttatattgcaaatcaattttaagtggatctacaaatatacaataaataatataaattacggatcgtttgtttctaaggtaataagtacatttgttaatttcacataaataatttcagaaggagagcaaatgtaaaaatgtgttttagacagtggagatgccattttattgtaagactatttatactcaaaggacaaagtaatcagctttctatgtcaatgatcgtc

SEQ ID NO: 1881819 - DNA, 4001 bp, Homo sapiens
tttgtgtactttgaagggctcccattaattaaggtatttcttataagcattcagaaagtttcttttcttggcatgcgacttgaaaatttgtcctgatattttccctgtgacaatgttttgtgaattgtaactcagccacttaagtggctcctcataataaagccacatggtatccatgtacacatatttaacaaatcaaagaagtggttctcaacctaatctctagaggaggtccttcttgttcactttcaataactatgttgaagaatagattctaaaaagctatcaccaaattttcgaatatgttttgaaatttgtgtccacaaaatctataaatcaataaatgtatagaatagagcataataatccaattaacaaatttaagatgtcatctaagcaggaatgaatgcaataaataggccttcttacttcaaaatcaactgcagaggtaatgcattgccactagacttgtgtgctgtgttggtaataaattaacaaaaactttggggataagaaaaatctgcaaataaaatggtgtgtcatttgtgaaatataatcacaaaaatgttcagattgttataattaacagaaaaactattgtttttattatatccagtgtttaacagacactattcatgtatacatacaacattcttataataactcttgtgtccatgtaaatagcagtcttgccaaaaagaattgattatcatgtagtagtttgtaagtattttcatgcataggctgcaaccctttagagtgctattctaataaattattaatattaacttgatgaacacaattctaagacatttcatttgaggatatgtttattaactattaggttggtacaaaaggcattgcgttttttgccattactttcaataaaaaatagaaccagcatttagaaatctactttcagaaacttaataaaatgagaatttgtcctcttttacatataggaagcctgcataataagcattctgttgctagtacataagcttcccattttcatcaggaaactatacacttacatttcacttttactaacttcaatgcatgacttctaccttcaaggtgatttcatgcttctagccaccatgtctgtactccaggacagcagcacaaagtgtagaaaaataaaaaagacatacctccctaatgagtcaactgcacttaaggagccatcccagaagtttcacacggcttatttgaatacagctatatccagatgcaaggaatgctgggaaatgtggtattgtgcgcagctaaagttgggattatgttagtgaaaatgagaccacgaacattggaaggttaaaagcaatctctcatgacatatacaattacagaaattaaattaaatctttaagcaatgtgataaacctatggaatgttaacaggcaaaaatagcaacattaaaaattacagtgagggaataaggtatgattcgtttgtagatggtttgtgtgtcattaatctaggcaaaaagtcataaactcctctaacagtgaccacatgtataaaagaaataataatacacactatggctaacaacattccattttggcctatttactgttgttaagtctctatggttagcatcagaaatgtacagttttgatagcctatgacctcaacatgttcagtttgatagtagaaaggacaacataaagacaaaccaatcaacaaataagaataaaaactgttaaaaaaaggacaatattatcataagaacataaggatgtgataatgtatttgacatatcgtttatttattgttttatagttggataatacatataaatttactgctccttcaatgttagaatcaatagaatcatagcagaagtaattaagcagataaagatcaaaacgtcacctttattacttactgtttgaaaaatagtctaaggctggttttacagggttgctcctatccatcacctgatgtgaagtttcttaggaagcttcaggactacaccaaagaagcagaacctgctctttcactctgttgcattgtgtggagtgcagggcatcatgactgctctctacaagaaaaagaaaggaaataattaagaaacgcacaaaagtttgtgaattgagaatcccaaaataggtatgaaattggttagctttctaaattcaccaatctcataactaacacctgtccccatgcagtgaatgagtaaaggatggacagactccataatgattattctagggaaagccttctgagtagaaagaggagagttttgcaaacagttttgtagagtttactcttgtttatgcactgataataaataagagttcctaaaattctctctagaactctaggtaaatgagatatttcactgctcatgctgtgtgaccttcatgtcccatctgcctagactgtaaatatgctttctgaagtttaaaagaattagtatactatgcttacattaagcaaaaaagtacccttattatgcaggatcaagtaacactctaaagattcatgtttatgaaaaaacactgatgattctattttattatgtgtcttctaaagagaaaaatacttgtgctctgcagcataattttacaatgtgctattctaaatactttcatttaaacaagaccattatgaaaatgttttgcacacagaaatatattttgaatacttttttaaaaagatcacaaagtatatggtctctgtacgtgttcaattattttaatgctttcactataacaggaattcttaaagaggatatgtacttgcataatgctgataattctttctcatttctgtttgtgctttggctgttgttacaaccactgaaagtagtaattacatgagtgtattatccatgattatctttagatatatgtgcattttctttaattaaactataaactctaaatgaaaaataaaaaagaagtcacctcttgtctctttgtacaatattaaaatttttttcttgtatccagagtttcccaaatgcctgttgcaaaattttacttagggagtagaaagtggagaatcaatatggtaaaaaaaactgtgttacagggaaggagacacagggtaagcattttccttatcttctctcctgtatctacgtgctgcacaagcataaatgatagcagtcacatgaacgagtacttttcaagaacgtagaatatggtgatggaaaaaaaaaaccgctttgaaacatcgaataatataaaagccagaactactacaactattttttacatccatagaaggtaaactatttttagatataaaattccttctgacggtagtcctgatcatttaaccaatattttgataaatcaaagaagggaaaaatggacattcagtccaaagatgggcatgtattcccatgcccagtcaggcaaaattgtggatgttctttaaaataacaattcattcaacaaataatttttaaatggctactgaatacctggaaaggttctagacacaggggctatagtaagaaacaagaaggaactaattgacaagaatgtgctcaccgacaatgaaacatctcctcatggagcttgagttctgtttgaaaagacagagaacaaaaaaatattattgcacagagtgttagttatgtgtgaattaaaagactggtcagtacttgaaggagaaggagtgacaacaaatctcacttccagttctatttacctgaacagattaattctattttgtttcaatgcaacagtagtcctacggttaacaagatgcactacacaaagcaaacaacttataaaacgcattttttccttatattgcaaatcaattttaagtggatctacaaatatacaataaataatataaattacggatcgtttgtttctaaggtaataagtacatttgttaatttcacataaataatttcagaaggagagcaaatgtaaaaatgtgttttagacagtggagatgccattttattgtaagactatttatactcaaaggacaaagtaatcagctttctatgtcaatgatcgtcc

SEQ ID NO: 1881820 - DNA, 4001 bp, Homo sapiens
tagttctatctaaatttttatctgaaaaataagtttctctgctttaaaaaagaaactttgaagaccattttacagaagaattggtttgccaaggtggaaagagaagctcatcagtgacgtgacttagccaaaagcactggttatacctctatacctcggagccgacactgaaagccccggccatagtctttctgccccaaggaaagcctggggtgggggtgggtgatattgtcaagagccaggccccagctcctcatacacacagctcatttgctctccctcccaacccccaccttcatacttcttccacacgcataccaaagaaaataagaatctcaaggttggaaaatcccactttacttcaagtgaagtcactgggttgtccccatgaaatatctccacaatgggtgtgctagacctttactctctgtggcaccaccaagaccccctcaccctgccagagccctctgaagtgtactcagaatggaggggctggaagtggggccagtggtcctggtagtcagcctccccttctgacacaagaattatcgtggaacagcttgtgtgaccgatcaactggtctctccatctttaagccattgtcttgttgactctgttactgcagagtttggggaggtctcatggcttctcgcatcctatttcctgagcttccctgaagccaacttctggccactggtatgtgatgcgagcacagtgcctcctcctgctcctccaggaagcttctgctgattgaacgcaggccagatggcgagatccggagcaaccttcttagatcaagggaagaaaggggcacaagaggggagtaggtaacaagataaaaggagctccctccctgatgactacagagccatcgtggcagccctgggcctccatttcagacgttcatcttgcctaagccaccaccatcagggtctcagtcagtcatcattctcatttactcgggtggctgggtgagggcggaatactaccttccagctgtctgagattaagcctaagccaccaccatcagggtctcagtcagtcatcattctcatttactcgggtggctgggcgagggcggaatactaccttccagctgtctgagattaagcagaacagcagctaaagcagtaacagcaggtctccttcagcagcttgccacagggaagagggtcccgcgtgaaccgaactcaacttccacctgcgcagaggtagctaccatttgcgtagaggtagctgggtctttaaggttagagggaaggcgcagggagggagagacggcgggtgggggttgaacaaagtggagattcacaaaagcagactagggcgggcgacgtgatcagatgacctgtgcgggcggcagcctcctgccctcctccccttcgtgcgccggctggagcgaagagttcttttgacagccgtgagcttccccgccaggaacttactggggctgcatcaccctagaaacgtggctttgggctgtggaaacgctgcctctgtggaagtctctcctcgcgggggtggacgggtcgctgcgcgcccagcgttcttctgcggttctcacagcccgccgccgccgccgcctcggggacctttgcggggaggcctcaggtcagcgccgcccttgcgatggcgggagagcagagcggccccagggcctctgagctccggccccggcacgtcccgccctctcctccgcttgcgggagccggggcgcctcggagggaaaccttccggacacaggccgggagaagaggggccgtggcgccatcgcgcagcttcctggtttcggccatgtttttttttttttgagacggagtttcgctctttttgcccaggctggagggcaatggcgccgtctcggctccctgcagccgccgcctcccgggttgaagggactctccggcctcaggccgcggtgttcttgtaaattagaaccggcctatgcgccaagcgcgggtctcgcggctgcggagagaggcccagcagggggcggggacgccgggaggcggggcctggccgagctgcgcacacccgggtggttctggctacgggtacccggacctgcccaacgaccgttctccattcccgacctccgcaccctacccggtccgcagggcaccttcctcctctctctcaggcacgtcctcgacctcagttgccacgtgcacatgctggtgccttccaggtcggtctttctccaccagactccacctggaactttcttccttttcgtcctgtgctggcctaacccctgctcggcctcggccctcagctgccggctctaacaaagcctctgtctttcccagacccctgtgaccaggtcaggctctgctccctgcgttcctctctccttgcttccctcctcctcccctccccagaatcgcttgaacctgggaggcagacgttgcagtgagctgagatcgcaccattgcactccagcctgggtgacaagagcgagactccatctcaaaacaaaaaacaaaaaacacaactcttgctggctccttgattttagcccagtgagattcacttctaatttctttttttctttgagacagtctgttctgtcacccaggctggagtgcagtggcgtaatcatggctcactgcagcctcaaccttcctggactcaagtgaaccttccacctcagcctcccaggtagccgggactacaggggtgcaccagcatgcctggctaatttttgcattttttgtagagatggggtttcactatgttgcccaggctggtctgaaactcctgtgccccagcagtcctcctgccttggtctcccaaagttctgagattacaggcatgagccactgcgcctgggcttccatttctgatttccaaaactctaggataataaatttacattgttttaagccaccaaattgtagtaatctgttacagcagcaataagaaatgaatacagccatgcttgataattcctttatcaaaagctacctattggtgttaggaagtattgttttaaattctaagacagtgttttcactttctatcttgtgcactgactacctcatgaccccttaggtaccagtcaggactggtagactttaatgtggagaacttctgaaacagcagttctcaaaatgttacctccagacacacagaatctgcatcacccaggaacttgtaaccatgcaaattctcagccacccagacttcctgcatcagaaactctggggcccagcagcctgtgttttaacaaagcccttcaggtgattctgacacttgctcaagtttgagaaccgctgttctaggagctggtcctgcagggaaagggtggcctctcagttcaggttccagtgtggctgggggtgggggtcaaggtgagggtttggttgttgtgtctgacagtcagccaggcttgagcacacggactgtttacaaggctgcactttccatgttctggtcagcagtctcctggttcattccgttacgaatggactgtcaccccaaaattaatgttgaaatctatttctctatttggaggtggggcctttgggaggtaattaggtcatgagagtggagccctcatgaatggaatgactgcctaagagaacagagatggctcacacctgtaatcccagcactttgggaggctgaggtgggcggatcacgaggtcaagagatcgagaccatcctggctaacacggtgaaaccccatctccactaaaatacaaaaaattaaccaggtgtggcagcgggtgcctgtagtcccagctactcaggaggctgaggcaggagaatggtgtaaacctgggaggcagagctttcagtgagctgagactgcgccactgcactccagcctgggcgatacggtgaaactctgtctcaaaaaaaaaaaaaaaaaaagagaacagagagctagcttgctgattttctgccatatgaggatacagtaagagggcagccatctgcaacttgtaagatgaccctcaccataacgtgaccatgctggcaccacgatctcagac

SEQ ID NO: 1881821 - DNA, 4001 bp, Homo sapiens; identical to SEQ ID NO: 318058

SEQ ID NO: 1881822 - DNA, 4001 bp, Homo sapiens
aaagtggtaaatctctctctaaaatgcctgttttgcacatatcattggtatgatatttataagctaccttttttataatgtgttctcactgatggctcaacagggactatcagtcagaattgcttttcattattattttattagatcttaatacatggttgaattttaaaatacagttttttaaattaagttcagaagaaacgtagaaattagaaaaattgtctaataaaataaaatggtttaatgggctgggcccagtggctcacgcctataatcccaacactttgggaggctgaggcaggtggaattcaagaccagcctgagcaacatagtgatacctcatctctaaaaaatatataaataaataataaaatgcttcaggacctctacttttagccaacatggggtaacaagatgaacaaccaggtgcactgcccaaagttctgcccactgggaggatttctctttaccactatccttcagggatgtcccagagaagggctggtgtactatggctatccactttcaggtgatgcctacatatcacacagaaccatctataaactaggcccatgttgtttcttcctgtcaactcatcatagggaactctccatgagcttgggagaaaaaaggcaaggtagcaggaacagggaccatgggcatttgggtcacttcttcatgtaacttgcttttgccttcaggtcctgcctgggcccagtcacatacataacacgttctttgatgatgtactcctgctgtccacacccagcattatggcttgtgggtcagataacacccagctcatgatgggcagctcaggtcgcatggtaacttaattgaccacggtaagcattcagtccctactgaagcccagcagtaggcccagagctgtttctcaaaagagtagttatctgcataggataacaggtctttcttcaaaatactaagggtctgcactgagattcatctatgtgggcctgccaaaggttccaacagcatctctatctgccactgacacttcaaataccactggatctgcaagttcatatgtcccaagcaacaaagccgcttacacaatagcctggacctattgcagaacctttcctattctgagtcctactccaaactagcagcttttcaagtcactcagtaaatgggccagagtaacaaactcaaatgaggaaacgtcttcaaaatccaaagaggcctgccgcatgtcatgcctcttctggttgtaggagggggcagatgcaaaaacttaccttagaaggggtatctcaacatgcctcataccactggacccctagaaattttactgagacatgaaaaagcctttgaatttttgttggatttacttcccacttctgacatgcaaatgtcttaccaataggtctggagtagttgctatgtctcactcattaggtccagtgagcataatgtcgtcaatgtaatggaccaatgtgatgtggaaagaaaaggcaatcaagattcctgtgaacaaaattaggacagggctggtgagttgatatgccctgaggtaggacatgaaggtgcatttctagccttgctagctaaaagcaaactgcttctggtcggccttatagacagggatggagagaaaggcatttgccagatcataccaggtagctgcataccaggaaccaggagttgtgttaatttgctcaagcaatacatctggtactgtagctgcaattggagtcaccacctagttaagtttgtgataatccatctgtcttctgcccaggctaaataggcgagttgaatggacatatggtaggaatcaccaccccgccttccttcaagtacttatggtggcactaatctcttcagtccctataggaattgagcattgcttttggtttactattttcctaagtacagatagttctagtggcttctacttggccttttccaccataatagccctcactccataggtaaggaaaccaatgtgtggattattctgtcagctgctgactgtattctaattatacattctagaactaggggataaccacaggataggttcaggaattcactgggcccattgtgagatggaactaagctaaaactctgctgatcacctgacctccataagctgctaccctgacagtagcactttggatctcctgaaattagtgtcacttcagagagccagtgtccactagttcacaaaagatctgattattccctttttctaatgcacagttacgttggtaaaggttgtacatccctttgcggaggactaggagaaagactaacagtataaacatttggttatggaccagggtccctttgaggtcctccccttcaatcaaagggttttgggctctataaagtggctcaagtttgggaattaagggaccacgattctgtttttatgattcgagttcaactttcgtcacttgacttagaagttttctgcttatacagatcaagttaagacttcagtaggcttcctatctatttcacgtctaggaaaaccatgatcaactagccaaagcataggtctacaagtgagattattctaattgttcctttggctctgtcattatgataaccacttcaccttgcctttggtggttgagtcccattacttgacccttgccaccctgggatcctttacttccattatatttaggttttccagttcagtgactgcagtgagctctggcctacagagaagagccatcacagagttctgaaaaagatgctggagctctcctcgcaaatttctttctcatagtattggtgaaaggtatgctttcttgaccttcccagtgtggatgagtagttctttttttttttttttttttgagacggagtctcgctctgtcgcccaggccggactgcggactgcagtggcgcaatctctgctcactgcaagctccgcttcccgggttcacgccattctcctgcctcagcctcccgagtagctgggactacaggcgcccgccaccgcgcccggctaattttttgtatttttagtagagacggggtttcaccttgttagccaggatggtctcgatctcctgacctcatgatccacccgagatgagtagttcttaagtgaaaaatctaatttcccaatattcctaaaccttttaatcccatcctctagattaaaccaaggcatgtccagcacttccaattcatcttttccatgttttagtaagccaatcaaactgtgagcaccctttctaactccccaagctgcaatgttaaatgcagaatcttggcttagtgagcccatgtcaataaatttgacctgatccaactttatgttccttccatcattttccaacacctttattatccattccgacatatgttcccagatttttgtctgtataaattagagactttgagtaactctttggagtatagcacatctcttcataggtaacactttgttcctgtctagtttcaggtctagaagcaaagaagggtggtggagttgggtctggaggagaaccaacattgtcttgcatatcaactgcctcaaaggaggccattacaatttcctcaggcaatgcagtgttaatcatcacagacaggttggagggtactatcactggaaatggagaagctgcttccaatggggttgagaagcctctccactagcaaagaagactcatcagaatttaggggcttaatgtccccagcttcatcaaggtcttcccatatgtcccaatcctaatttacagaatcccatttttttttcagtaagtgccctccttttgacaatagtcactctgcaaggctggaattctaatttgtgttgtaattcagccagtcacaggatgagatgctgtgtttgattttcaacagtctcagctctggggctacaggagatagggttttcttcagggtgcacatagaagctttcagattatttatggagcacttgagctgggaataaaaatccctacactcacttttgcaccactttatccagtgacattagaaacaaccaactg

SEQ ID NO: 1881823 - DNA, 4001 bp, Homo sapiens; identical to SEQ ID NO: 318079

SEQ ID NO: 1881824 - DNA, 4001 bp, Homo sapiens; identical to SEQ ID NO: 318092

SEQ ID NO: 1881825 - DNA, 4001 bp, Homo sapiens; identical to SEQ ID NO: 318093

SEQ ID NO: 1881826 - DNA, 4001 bp, Homo sapiens; identical to SEQ ID NO: 318158

SEQ ID NO: 1881827 - DNA, 4001 bp, Homo sapiens; identical to SEQ ID NO: 318110

SEQ ID NO: 1881828 - DNA, 4001 bp, Homo sapiens
gaagcaggagaatctcttgaaccctggaggtggaggttgcagtgagccgagatcgcaccactgcactccagcgtgggcaacaaagcaagactccgtcttaaaaaataaaaataaataaagtatactcaaattattctaaaaagtatttgggtaatctcatattaatttaaattaacactaaaccatatgtctccaacacacacacacacacacacacacacacacacgcacgcatacacaattattacataaaatcaggaatctgagagaaaggtgactagatcacaacaaagaaactctccatcctctcccctactctattgctgtgggtatgcagagaaggatttgctgcccttaccctaagaagctggagactatgttaggctccatgggaataaacaaggaaattgcaacaaagtgaattacatacaactaccaaaaaatctcagtaaaggaaagcatttgctcattaaatatctggacatgtaaatctcagaaattttatcttggcctgatgtgggcaataaattaaactatattagttcactttctttctttctttctttctttctttctttctttctttctttctttctttctttctttctttctttcttttttttttttttgcctagttacaactctctacccccaagctgagcccacccagggtgattcttcaagagaatataattggggaattttggtctcagtgtgaggccttcagaacttaatcacaggagtccagaatcaaacagcccttaaaaagcagttctttcagtttttatacaaagaacttcctggaacacaaggaagcatcatactggctcagcccagcatctactccccctcacagaactagactgactatccttgtctcaggtggctcctcaggcagtgggcgagtcctttctatcagtcctttctctcatggttccctctgttcctacctttgaaagagaagccaagctgagtgattaagagtctgcccttgtaagaaaaggagttgggaattacaagatgatgtagctggcaacttccctagctgaaaagagaaacacgcaagtctaatttttatgctcttctgcttttgaatcacagttttttaaaaaatcaaataataataatatgtcaaggaaaaagcaaggtcccaccagactcctggaaaggagcctttgtgttgagtagggaaatgtatgtgaacacatgaattagagaagccaagaatttagaaagggaaggaatgtggagggatccagaggggaatactgtgtctaggagggaaaagaagttgaaaccagcaagatggggaggcaatggaaaggaggattgggagagagagagacagtgtgtgtctggcgcttagacagaaaaaaaaaatagaaaaagaacagaaataagaaaagtagatttctcgaagtttggacatatatttgagatgttcatgtatttgtaaaagaaacgaatcagccttcaagctgctgtagggtgggcagagacagctaggggatcccgtccattagggttatagttctttttttatttaatgctttgaaaaggcaaaatagatcaatttacctgtctaaattcagtaccttggacttctttagcaaataagctatttagtgagctttctttcctgttctgatggcagattttttcttctgctggagtgacaggggagaataggggatatgagatagaattattctttcctcaactagtctttctatcatgactggatttcagttcagctatactttaataaacccatattttgagcttagcatgttcagatgtttatgatttctttttctatatgtaaaagaacaaagattaagaggtttagaaacttaccccaagttccatggccaaaatgtgaagacatgttttgattcctggatgggagttctttccaccacagctgtcacctgtgtatttctcaaagtgtggtccgcagatcaacagcatccacatcctcagagagcacagtaggaatacagcatcctaagtcctaccccagacctcctgaatcagaatctgcatgttaagcaggcccccaggtggttcataagcacgttttggtttgggaagctggcattccatcatactgccttctccagctagagggcattcctctctagccacagctttattctggctatgaaatagctgagaaaagctctgtgtgaacttgaaaaaaatctatgccattaagacactatagaggatacaaagcaagccagagaacagagggtacagaataattctattttaaaatatatatttttgagacgggatctcattctgtcacccaggctggagtgcagtggcacaatcatggctcactgcagcctcaaccttcaaggctcaatcaatcctcttacctcagcctcccgggtagctgggaccacagatgtgcaccaccatgcccggctaatttttgtatttttttagagaccaggttttgccatgttgcccgagttagtctcaaattcctagacccaagtgatccacctgcctcagcttcccaaagtgttacaataaattatatatataataggtatatatatccatgcagaaaataaaggctagaaagatttaggagaaaatgttgtctctggtgatgcgatgataggcaatcttgtctccttactttttttttcattgttctagttttcttttagaaacacctgttaattttgaaaagttaggttttctacagtaatctttactaaatttggcttgctaaggggtgagaaaagtaatgcatgagaaatctgggaattggcatgagtgatcccaatagaatgccactactgaggttttcttggatattaatgggcacatagggttcaccgtgtttatcagcctcctgcacctactctactcatgtccagggaggggttcattcttctggcccccagggggcagtcctccataagtttacaaaagcctactctttttcccccacagtgtgaataatcaggcatcatattggccacaactcagctacaccaaggtctgagagattctgggcactttaacaacaacagcaaaatactatagacaccgagagataatattttataaacagaggcaaaatccccaaataaacagaaaagaaacagaacacaaaccacccacattgctcagccatagcaccaaaagatttccatctacaagaacattcttgtgtttggggagggagggcaaaggtgggaaggatatacacaacaaagacattagacacaaggttcagattgctaaggtccgcttctattaatacctcctactatctgttaaaccttgggcaagtcacttaactgttctgctcctctatttcatccattgtcactttctcaatctgcagccttgaagattttctgagtgctttaaaaactgtgaagtgtgcaaagataagcttctttgctgtgctggttgctcaacattttccctctggatccattctaaccccttctctgagttagtctgtgccttgagatgctgatgtttttggattgtgtcatacaggctctctggcccattggcatctgttgggaagtaacaattaagagattagagaacaggagaagacagaggtagacacttccttgccagatacctatgttatcttaaagaagccccagaagaatagcactaccaacttattacgcaacgctgacggctaaaaggcatgcttgagattttacagttgttttgtgctaattattaaatgtcaggttttcttattcaccttgttgccaaacactgaataaacctcagaatgttagaatagggtgcaatttggggtattagcttagtagtttccaaactacagtgacagtcatctggtatccaaagaacggtggaacagaacaccaagtgtgtgtgcttgtctgcggcattgcctgcaggtggaataaatcatgtgtcacatacagaaactccctattattttccaagtatatgtaaatggacttacaacaaaatgcaaggtc

SEQ ID NO: 1881829 - DNA, 4001 bp, Homo sapiens; identical to SEQ ID NO: 318120

SEQ ID NO: 1881830 - DNA, 4001 bp, Homo sapiens; identical to SEQ ID NO: 318126

SEQ ID NO: 1881831 - DNA, 4001 bp, Homo sapiens
ctcacgcgatctgacggttttgtgtttggcaagttcctccgctcacaattctttccgcttccttgtgaagaaggtacttgcttctccttccaccacgattgttaagtttcctgaggtctccccagccatgtggaactgtgagtcaattaaacctctttcctttataaattacccagtctcgcgcagttctttatagcagtgtgagaacggactaatacacagtatttgctttttctttaagaggaccacccaaattgcataaattgcaggccccacaaaacctgcattaccccctaagtgtgagaatagtacctatttcacaggtgtgctgtgaggattaagaggtaatggacacatggtgtgtatcaggtggatgttagccattatcactactctgaatctccatctttctattatagcaaggccacagaaatgagcattttatgtaatattcttaaaactaaattcttctcatggaatgggatttttcaaccccaggcaacagggccacatcatgtttttcttgggctctaggcctttttgccttcgttgagccccttactccattaaaatatatatacatatacacacacacatatatacatacattttaagattgtattagcacaaaaacaaatatattaatatatattaaaatactttcttaaacctaaattttttttccttctgatttgaaaagaaattaaaatattttttgtgggcctctaaaaatattgtggaccttaggcactgtgcctaatggaaaagacagtgacaggattgtgcaatatgaataatgataaatttcccaaaccatcaaggactcaagaataagggtaaacatcttaaatggggttggtttcgagtacttataatagaaaaatgttatccaaacaaggtcttaggggtaacaggaggcgtttttagtgttcaaaatacgcacatggatggagttggccattaggacgctaatagcgaccgtatctagctgtgaaatacatatttttgttttgggagtctacttttcagtaaatgtcctttcaggtgttttgttgcccatttaattacatgatcaacaaggaagagttattttacaaaacaagcttcattttgccaatttataaattgctttggagtttcatcgaaaggtctttaaaaaacacgttggccttggtgctggtgcatcacataaatcacagatgaaacaaacaagcctgtttcctactcaaggtgtgtctgtagagtcctgactgcgtgccaggggctctgtctggcacatttctgaactttgcaaaattaattgtgccgaagagaacaccatcaaacgcgtccggcatacagcgtaaacatcttcagaccgtgattctgcgccatcaaacgctctccagctaatttcatttggtgattactctgctagaaaaccgaggccaagtgaaactgcggaaatgggaacaatgtacggaggaaaaatctcaccccattaagagatccgtttcttctccgcacaaataagcccaccccgcctccgaggcaagactagatggctccaggatactctcggcgcgcccgctggccatctcgggcaggggagccccacacccggcaggaggaccaggacgcgagcggcggcgcctcggccctgggctgtttaggtaattcgcaaagtcccaacaatcatccccctctcccagaagctggttttcttgtgtgcagtggttacagaggcggcgaaaacacggttccccgctttcctctcctcaaggcactgtttgcagcggcagcagcggccgcattcggggaggcgcggtcctccccgcagagccgtcgcgcactcggcctttctcgaggatttgcctgggctcggccgcctcgctctcccctgcgcttccatgaccttctgagagcggcctcaccaccggaggctcggaggaagcaccaccctcggcgtccggggcccgtcgcgcggccgcgttcctccgactccttggagcacccgcgcgcgcgggcgcgcggccggggatcggcgggggcgcgcgggttggggcggggccggggccgggggcaggggcgggtcaggggcggggccgggcccgctgcgcccccagccgagcggcgtgcaggcgccgcccccgcgcgccgcagtcccggctggagcgactcggccgtggcggtggccgttaccgttgcctctgggaggctctggcggcggcggcggcccgcggggttcgcggagcgcagcgggccgcccttcgcccgtggccgcctcaagcagcctcgcgccgacacaggggaggcgagacggcggctgcggaggcggcggcgcattgtgcccggccccctccttggcggctcctgcccccgggcggctgtgggatctgggcagccccggggcggcggccgaggctacagagccggcggcaggggatggcaagatagcggcgcgggagcgtaccgtgagtcctgggggcgggtgggcgcggcgcggagcaggggagccgcggagccccgagcggggtccccaggggcggcccgggcggggtggggcagcgctcccagctctgcggagcgtcctaggggagtgaccccggagagcgccgctccgggtcccgccgctctccgcgcgcccttgggtcaccctcgtgtcctgggggacgcggactccagcgcccagaacttctgccccacgcagggcagtgagttctgaggccagaggttacctgggggatgggagggagcttgaaatgtttttccttcggagaggtgacctgccaggtgatttcgtgcccctctgcttcaactcccctttaaacctgttcctcgtcctttctgtatccgtagtgcatttgacttacctgtatttttatgtgctaacttccgaaggtggtgtactggttaaacccaaagttaaagtgttggaggtcaaagttaggctttgtgaaagatgccatttctgttatgttgtgtaaaagcacaaagctggattcaggagttctgagcgacacaaaactgcacatcacgtgttctgaatttacatgattaatctgaattaatgtgatttttgccccccaccccccacattccgctaccaaaaatatatgaggtcttttatttgcagttgggtatctttgtgttcctttttgaatgtttaatgcagtcaaatattgttataacctgtattgttattgagtggcatttatatggaaatcggttctttgcatttctttttatgtgtctttaaaagatacattctttcaacagaaaagtttcagtttaaagtttgtcttccgattcctgttcagtttcagattagtttttaattttaaaaagtatttgcttgaagtaagattaatgtgatatagtagtatcgtttaggcaggggtccagaaatggtacagaaattaaatttaaggcaaacctttccttttcacaagtggaaaaaccaaggagttttttcagcgcgaatgctacttgcccttccccttacatgattattttgtcacagatctgaaattacatttcactgttaccagagagtttcttgtctaagcctggcagagaaaaggaagcctaagtataatgtgttttttaaaaacacgagaccattcttttagttgtcttctacgttgactttatgctttatagtcgggggcaactgttcatttggaaacttcattagggagttagttgcaagctcaatttaaatatatgatgtgttcccaaggtgatcggagcagctatttcctcttcaagaattgaattgagacttctttgctttgtaataggtgagtgagatcactagcaagcctcttgattagtggagacttgtattctcttctggggaatgagaatcagggactctgctgttgaaggagcaaaacttttgtgatttttgaaaaatttgcttctgaatggtcatccttgacaaatatgttggtaatagtgtgcatttttcttacattaattgtgcagcaggtaatctattcacactggagaagattcaa

SEQ ID NO: 1881832 - DNA, 4001 bp, Homo sapiens
gtttgagaaattaatttttctttcttcttttcttttatttttagcttggaaggaagagggactcttaaaaaaacattagggacttgaaccttgtaacctgccatacaaaagaggagagtccttccatgtaaggattttaagtctggaacaaagtcttattttctaaatgtttaaggaactgaatttccaggcctttcgaacaatggcaatccctggataaatatctactccattagaaagatgcaaatagtttactgtaaggccacagcaccgtgagatgtgcattcatatctatggctcctgattggctctttcctccagtaaatcaatgaataatgtaaaacctgattgctgtaaagtggtggatttttgaaaatttcccttcccccattccctctcgatccaacattcaggaattcaatactccccaaaataggttgtttttcttttatgattttttaatgcttattgttattttggactggaggggtggggctattggttttgcaaaatgaaagtattgccctggtttaattatgctgactgtgggagctcgcttcctgagacagcgccctaattaccggtgccaaggtggagaaaggagggtggtagacagaggtggacaccaagaaagggaggaaacggaacccgactctgcggtgctgggcccaaggcagccacagctccaaaggggcccccggccgtggccgtgacttgacagagcctccggtctaacttctgatcaattccactgctctcctgacccctcaagacagtcccccattcaagcaccgcgggtacatttgcaagataaaacgccgcagacactaatgcaaatacattgcccgagttcccatcaccctgggttcctgcagataattccaggccacagaaaggagttcttgccttcctcagccgggtctagactctaagcaaaccgcaaagacctagctccgtttggataccagaagcgtcttaagctgaaccgctccaagtaccaataactaaccatgatggttgcatcttgatgaatctgaacttgggataaccctgtaaagcggcctctcacctcccaaaattcaaaaggcaaagagaaaagggaagtggaaagccaccagatctacttagctactgtactaagttttccaccaaaatctaatcagaccctcgcttccttgccaggtaattgcaactttggggcggttaaagggaggcgaattcttcaaaatgcgaattcgaatacagaagtgcaaaatacaagtgcattttgctctaggtttaaaagggaaaagcccccccaaacacaccaccaccaccaccaccacaaaattacatacaaaaattcccttttccaacgcgaagatttcctggcatctctctgcgattgggggtcaagccgctggataattaacagtactggctaagaaaactcacgagatcaacaggtttaacatccgaggcacacaatcaattagctgaagcaaagccccggactggccctcggagcggcccgcagcgggactctgcgggcaccggctagcgggcgaggtgaggagtgcgggcgcggggccgcggcgggcactgctggcctcgcgccgcgggcgagctgcagcctgagggccgccacgatactcacttgatctccctgcgccaggcaatgctgccccccaaatccagctgggcaggaaccgaggcgccggctgaaagacaagatccaaagtcacagcacggccgcagcacacaaacaggcttctttcggcgtctccaaaaaaaaaaaaaaaaatgtttttctcatcattcctctcccctgctcaacacatttaaaactgccgctcaattccacatggtgattcttggttgattgcgtctaaaatagtttaaatgggtcttcccttctggggagagggagaagggcgcaaaagaccaaggagtaaaaaaaaagccaacttttaccccccatgccaggcacttgctccctgagcctcggagtggagagtgaagtggtgtgtgcgaggcttggcaagtttttgggggggctgtccaaggtctagtccagccccctctgccgaggaggacgtgctctgaaactcaaccaatttccccactgcttttgttactgatgaactgaagccctattgttcatccattgccacggtctttttcagtccccacactacgttctgcgttgccagagataatgaatttgcacccaaacctctcatagtcccctcctgacagacggaacaaattagaaatgtctcgtctgaaggaaggcaatggctacattttcctattgtaggatgcaaagcacacatttctttggaaacttcttttgcttttttcttttttttaaaatccttttcttctctttttcttttttcctccagtttttttttctctctcttggtttcttaagattcttcttttttttttattacagaatctccctgtcgtttttccaatgcactgttttatgtaacttgtgagtcttcctaaccttcttccccttctttcctctcctttcttaaggactccctttgcaattttatttacaaacttggagaatgaccttttgactcgcagacttttttttttttaaaggtcttttggttcaagtcccccttcttcactcctccccgtttgtgtcgtggttgttaaatgtgtttagctaaagacaagcaatgcattctaaagaattttattctctaaactctagaggtattctaaatgtaccagggacgcgccataggggtcatctatttgaggaggaagaaaaagcgggtgtgtgtgtgtgtgtgtgtgtgtgtgtgtgtgcgcgcgcgcgcgcgcgtctgccttccacggaaagagagacggagagatgtgggagggtgggggtggaagtatgcagacagagaagggtgggggcttcgaggggaaggtgggcttcctgcaacacaagcggagaggctgtcaggggtgtgggcacgggggtgcggggaggcggtgcaggaatccgtcccgccgagtgccgtcggcccctgtgggcctgtttgcgcgcctggggctggccgcattctgggcgcgggtgtctgcgtgccggggtggtagttccgagcctgcgcgcgtgcgaccgggtacgggagggggaagagtgccgtaaaaattcagacgagtggcccgtatgtaaatgcagcccgcggggagcagggaggcggtaatgacagccgctggcgctcagccccgccggcggcccctagctttcccgccaagtgcagccggaggacagacagccatgcgtgtccttggcgggagagcccccacccgccgcgcgcgcccgacccccgcgcacacgcacacactcccctcgcaggcgtggggcccaatggccacgaacatgtcaggaaaacaaagctggggctgcgaggtggaacgatgaaacggcacacttggcggccgagggcagagcggagaagtcgccaccacagccaccggcgcccctttcttgcctgctcgtagatctgccctccggcccagaagaggccgaggaccatttcttagctgccccagaggagggggcgagcagaggagggggcggatgtgcacagggaggtgccagcggtccggtgcgcgggcacgcacacgccggcgcgcagggctgccgcgggcggaaggaggggaatgacaaggcctcggccgcgtctcggagaggcactacctccgcgctgaggccgctgagtttcaagtgcaaaacaccaggccaaatccggcaaggcggcggctacagaatggctcacacttcaagcctccttcctcaaacaatccgatgggaaggacctggctgttcaggggaagcctttgctggcctctctttttacatggggtgaagtcgaaccccaatctaggagccctggcctagatggctccgcagatgagtcccagacgtggccatggaaagactgatctctctctgctcagagcgcctgcctcggtgctcactagcgcaagcacctcccaacaca

SEQ ID NO: 1881833 - DNA, 4001 bp, Homo sapiens
tcgctcctgttggttccagcgtgtattatttttaatactgatgcatatgtaaaggtatatttgcattttttaatttgcgagaatttcagattttgtcattttattggttccctttccctctttttttttttggaggatttttattgttgttattttattatgtctatgtgtctctcttgtccctttctgtcttttttggcgagtgtctgctgctgtctcttgctagataatatacacagttacctccctgcttctgtttatttaaggttacaaatatgcacatctgtcatgtatgcaatgccagctgtataacctcctggtttggtcataaaggaaaatacacatttttttttctttcttgacataccttgatgggctgtagtgcccatcgctcaaggctcaaagtttgattgtctaattaacttcatattagcagaaacacagttcggggccagtgctttcgagataatgtatgtataagtgaagtgattccaaagatttctaaataatttttgtgctgattgcctgagaggtgcggcattccccgccctattgctttctagcatttcttattgaaaaaaatatatatattttaaaatgggtagacacagcaatggacagccttctgcaaggaagacattttcaaccatgttgtatgttgtaccttattggctgcattcaaaatttactgagtttcatttttatcttaatatggctggaaacaaggcacattatcttgactgaaaagcatccttgattcctgactttgaaatgaaagcaaatacacaaataaaacaattggctatattaaaccagttgatgtggcttaaaatatacaggccttgagttagatttcaagcaatggtaatcttgtttataggatcggattctctttcttggcaatatagctatgcagcacgatggcttttttccaccttttaattcccccaagctatcatttaaaaaagactcaatctataattgcaaaccctgaaagaacagcaagtatgcacacatgcagcttattcaattaaacaagtccaagtacatgcacaggtaattagttttcttatgaatgacttacctgcacagatactcaggccaagactcagccctccccaatggccttcatgtataaatattcacatgtatttccccctatttcaaacctaaagcggtatgccatctttcatgctggactatccagcatccattttcagcacccttaactcttatggaatttccagccttacctctggctgtagtttttccaagcctacaccaaagtgctcatatgatatgtcacccaataaaaagtggtcagatggctacacgtatgacattaaaaagcagaaacacattcatccttcaggttcgcctttaccttgccatatatagcaagattacgtttcctaaaatacattttcagcacattttatgaataattgcaggattccacaactgattgcagaatagccggtttctggggggcacctggctgagtgaaacaattcggcaggctcaaggtctctttgagtttggctgcagttaaattgcgcgtggctgtttgttcctgcctggactctcccacatacctgcctacctttatgtaggatcaggacaaacacaccggccacgttgcagggcatagagtgtcggtgcatatatttagatggcagtagcaaggaacgcgtgcgtgtacggctgagcatgcatgtgtgtacagatgcgtgtgtatgtgcgcgcgcgcgctatgtgacaaggaacacagagaggtacacctcttatctctgatctctctgtaatctccttttctgtttctaatctcccttattggcgcatggtagtaacccaaagcgtgtgaaccgtcaccgtcgctgccgtgtgcgcgctgtggcttaccccgagggccggtggctcggtgactcgctggctaggtgggtgttggggaagagggtgggtagcgtcgctgccgctgccgccgcgggtccgggtgctctgtcccagcccggcagccgagcgcgcagtgtcggagccccctcccaccccgccctcacccccatcctcccctcccctcccttctgcgcctcccccaaccccccgccccgcattaccatatggaggccgagtccctgcgaatcacagcagcagcgggaggtatttgaataagccccgcaaccccgcgcagaccccaactcctccgagagcagcatgccctgcaccaagagccaccactctggccggtaacctggcagcgacagacaactccccaaagtgccctgcgcgcggtggagagagggtctgctgagggtactgggtctcccacttgctacttttatattaacttgacatagaatcagacaataaatgagaggagagagaagagaagaggaaagaagagacagaaaaagggagaggcgctgtaaaggggagagagaaaacagaagcgagaatgggagagaaaaaggagaaagagaacccaaagggttgagttaaagagagagtaaaatggggaccgggtggggaaacggtgggagggggagaaatacccaaatatctgaatttggacttctcaagctaaaaataccacctcactgaacttcacaacctccaatgagacacgtgtttctcccctcaccaccacgtcaccgaatgattaatttgccgtctcaatcagaaataattatttagaattgtataacagatataggacttagcagaaagaagctcattttatgaaacatagcgaaaaatatatgacatttaaagatgatgttggctacctcacggtaaaaattaaggcttgccttaacgactcggcagttgtccaaccatgtcctctgaaatggtgagatggcggcccagggccagcaacaagaggtgttccgaaatattttggactttaagtgaaaattttttttcttcctgtctcaaattttattgttacgtttttcttcttcacgaatttattccttttacctaaattttacagataatatgtgaatcttttaaaaaattttactgcaaaatgtcacattttgactgaagatatgattttagacgttaatttaaacacatagccagttccattttgcaaactaactctgaatagcacctgattctgaatttagccaattcaactcactctccctctccctatcctcaaatcagagcagtgatttccctgtacaaaacaatcagaatcatactaaaatctccagtcacctagaggatgtacccattgtaaatgtccctttaggtattcataagccaaacgcccttcttttgaaacacatacaaaaagaacgcctctgattaataatctctttcgcggcacactgaggccgaaggcagggagccgcaggacgccagagaagggcgcagaattctcaatacctagcatttcaatgcagattccaaagattcgctaactgctaggttttccaagaggaaataatatttggcaagcaacgcttttgggaaagacaaccacattccaaatactggctccttcctgggcctggggaggggactgcgatcgcggttacccggcacttctgtgttcatgtgtgtacaaggtggtatgtagcccacgcatgtagccaggcctaggtttctttcttttctttttcttcttctttttcttttttctttttcttttttttttttttttttttttttgaggcaagaatattgaaaccaatccactctttctgtagctagctcccacgaagctgggattttcaacctcttgtttattcgtaaagcccatatggaaccccggttgaatctcccctcttcggattttaccaggaggccctcagtgccccaccgccgcccatggcacgtgaagagaaaggagggagagttgggagccacgagagaagccggctcggagccgcttccgtcggggcccatgtttcgccccaacagacccgtctctcctttctctccccgaaggtacttccttaggccggcagtgtcgctacggtggtagccag

SEQ ID NO: 1881834 - DNA, 4001 bp, Homo sapiens
gggtgttatcgtgatgactgtgtgaagtaagggaggagacaaggcttacaaggctttctgtttaggtctccctcaatatatttttcttttcattcctcttatttaacaagaaagtcaaggaatagaagacaggctaaattgtcattagactgtgtctgtgttctttgtcacgcctgcctttcctctggactgcctgggaggatgtgtgtgctcctttcttgcttcttgagtagcagggaggaaggaatggatgcaaggatgtgaagattgatcagaaaggcacattattgcacgtgaaaatgagatggatacatttgacacctggctaaatttcagccaggtggttgtcttgcgagaggggcttgtgtgtggaagctagcaggccgactgaaaaaagtggggggagacaagaggcttccttcatctggaaatccgcaggatcttactgacatttggcttcagggagtagagctccaaggacacctgtgtgcatctgcctggagataggtgtgtgtgtgttgtgtgtgtgtgtgtgtgtgtgtgtgtagggagaagtaggcatttcatcaaaaatacatttgaaaaatgttggttctaaaattcagtcgttatcaattcgggccaggtaccaaagtcactaacgtgtccaggttaactcctggaaggcagcaacattcttgcttttgatggtacgaatatggcttctttcatttctttggctctttatggtacttcttttgagtggggcgaggctctagctttcccctcctcctttcttgatctcggcaaacaaaaccattctaccacttgagccatctgccgcaggtgtaatggatggcagggggccgacctaaccacactccagtctcttctaggtcgtcaccgctctgcaccaaacaaatgagtcctgtttcaccactagggtgccgaggtggatggtggatgctggcccccgcccctggcagcgctcagcccttagaaaccagagccagctgacaacacgcgaaacacacaggcacagcgaaaacgccgagccgacgctcattccctctgccccctccctctgctctctgtaacaaggaggacacgtacacagcctttacacacttaaaagcccttgcgactccctctgaattcttagttacttatgacggccttcctcactgcacatagcccctggggtgtgtgtgtgtgtgtgtgtgtgtgtgtgtgtgtatgcgcgcgtgtgtgtgtgtacgcgcgcgcgcgcacgcgtgaatgtgcatgtgtgtttaaaacgcttattggtaggtcatcagcagctgatcagacatggtaatccaataatttttttgaatacacacaatttttcgttgaagttaatttttttaaagaaaaatggaaaactattaattttctgcgcaagtctagggttcccagtttaggttccagagaacagcagatctgcgcagcccccgccttaccaaactttccttttctagggtttgaaagaggctcacattctcacttcatgacagagcagcggctcatttgcacgcgggtgtgtaaaggagggagctgtcgaacgcgcgacttaggaagggaaatcggatagctggagccccacgcagtcgctcggaaccttggctggaggcacaaggtgcccaggggcaagagcccggggtccaagcttccaggcgcacatcatcctctgggccccgggccctccggctggagcactccctcacccgcatcccatccccgttccattttgatcattatttgaatagcccaggtaagggtgcccatctctcggctatgggcgggggctggaccctgacaggtacggactccgcgggaccccagtgtgcttacctcgagcgaggccctggcaaatggtggcccagaagcatcaagtttcctctcccagccgttgtgccagatttcccctcctgccttctgctcctctccgccagctcgtttctctctctctctctctctctctctctctctctctctctgtcacacacgaggattacttgtgacttttagaggcaaaagcttgcttattcagaggagagagggagggggagagggagaaaggaggcgggagggaggagagacgggggagagagaagtaaaagggggatggaggatgaagaggaggtggagaatcagaaggtagtgcgggcgttgttagagaaggaggaggaagaggaggaggaggaggagggatgggaggggtagggtggagtaaccaaagatgggctgggatgggacggcgaggaataaattgctccccacccagctgcggtgcgacgcccccagcgtcccaggggagccggtgcgtcagctcacggctggccaaggcggggccgtacaaaagctagcgccgcgggacccccttcatgggcttctaccctagcagaccgagcgctggaggccgctccacgcgcgagctcgaaccacggagggctctcagctcggacaagcgtcgctgtctaagagctccaagctccacggaactttgattttatgcccgggagcccggtcatccacttctgcatctcagacaagcgccggaggctcgtgcagcttcctcgcgtcctcttcctggacgcggggcgcccaccttagtcatagcccctggtcccggcactgctcacgccgtcggtttccccactgcccaggctccctcagcccgaaccctgcgtctctgttcacattggaacaccccctcacctcatctcagcttgcttttaccgaggtgtgtgtgtgtgtgtgtgtgtgtgtgtgtgtgtgtgtgtgtgtgtacatagcgcgcgcgctctaggctagaaagaaggtaacgaaaaagtagcttcggtctcctgcagcttggatcccactaccaagtccgaccatattcagtatttgagattacagtttgcagcaaggaccaaggcaggggttcaccggatcatttcaactgagtttcaatgcagcaaggattgtttatcattattgctaagactgacaaaaataggccaaaaataaagaacagttgcatagaaagaagggacagcattttagcagtgatcaggaactaaaagtgtttggaatggatttctcgaacaagagcatccacgatggataaaggtgaaagccgcagactctcacaaaaccgtttcagtacgtgatgggattaaaaaataggaccatgcttttcaacatagactacccattagttctccgttaaatgcactaaaccagccccatggaatgattacatggcagccttttaatgtacaaacacgaggattctaaaacggatgcacacaacccgtttatagaactccctctgtacacacacacacacacacacacacattcataaagagacaaagttttaataccgataccccacacttgtaaatacatattttctcaaacaactacccctaaatacagtaattttcttctccatttccttgctgacctgtgcgacattatatttagagagtaggctcccaggatcgacataattctacttacattcattgtggatggcacgtcataaaatgccaggggggagggaaccttgaggggcgtggagaagaagccttttattaacaattatattctcccttagcagtttaaataataacaatgatgtcacggtaaccatctcccttctcccactccagtgaaaccactagatgggttggtgaactgtacatttgtatacttaattaagggattactgttgctacacagttacaaaggtggcataaggaatctctgaacggtagattgcgggacatttggcatgttgtaggactcacttacctgccaaatcttatttcagaataagaatgataaaatgttgttagtttgtgcccagcatagttttgaaggaaaatggaacaaaaagaagttgctccttgaaaattatgttagttgtaggaaaaaaaaatcctctcagcggaacgagccggttacgcactgtattaaatgaggatcatattttaccaacccaggtg

SEQ ID NO: 1881835 - DNA, 4001 bp, Homo sapiens
actgagtctcacactgtcacccgggctggagtgcagtagtgtgatcttggttcactgcaaccaccgcctcccaggttcaagcaattcttctgcctcagcttcctgagtagctgggattacaggagccagccaccacacccaggtaattttttgtatttttagtagagatggggtttcactatgttgaccaggctggtctcgaactcctgacctcgtgattcacctgcttcggcctcccaaagtgctgggattacaggcgtgagccaccatgcccagcccaggccttttgttttaatctccctacagccccctctccagaatcttggtgcactactttatgtataatatatgtttataatattacataaataatattcactaaaggtaagactgtatttaattgaggggaaagaaaaataaaattaattaaaattggtttttaaaagtatgaaaaatatccaaactcactagtagacgacaaaaaaagtcgtcttcttttatagtagacaaaaaagttatatacaacttttcccctacatacttggcaaagatttttaaatttcttttttccttctttttaaatttattttttattttgtaatgtgacttctcagtagtacatgcaagagtaccatgacccaggactgcaaaagtcactttataagtaaattgccagaagttattcaatcttgatcaaattcttaacggcatgctcttcttggtttcatcaccagatacctgccccagaaatctcacatcttatcctggactttgtcacaacagctttctaattttcacctgttccagtctcttttgattctggtggtgatttattcctctctactggagttctcagccatctagtccatacaaactgcaccaaaacacaagagagatcagagccccgctttgtacatggcccgctcccccgtccattccagtttcctgccctctactggccatgacggtcatcacagtgccctcctcattcctaacttttaaatacacttgagaccgcctgattaatcttgcactaagaaaaacaaaacaaaacaaacaaaaaacaaaaacaaaacactcacatacaatgtttttaatgcttgaaaagtaccggaacaattattttttcaaccaatgtaacccaggtgtgggatattttggggatgggggtggcagggagaggaggggtgaaaatcctcctgtatccgcaaataagttattggcagaaaggcattaacgtgacttacaaagacttcaattagttctcaaaatacctctttcttacactgccttctctgcaattttttttcaatgaagaatacattgtgttcttccttggaaggccacggaagcaagaaatgagatgaaagccgcacacgtagtgtgcatccatgttaccttggaaattattgaatgtgcttctccccgagtttcctttcctttgagtttcaagttgttataaatgttactttccatagactactaaggatctctttaaagtgacctgtccattttcaaatcatcaaacctattttttaaagatggcaggaatattttgtcacagcatttaaaaatacatcttaatagaactattacagtagcgtgcatggctgagttttctaaattgcattctgcaagtctcatttttatttatgtcaaattgaaaatacaaattgtaaatacaaatgaaacttctgtggtctgaatgtttgtgtctttccaacactcttaagttgaaattctaacccccaaaaaaacttaccacgggaggagacaagatggccgaataggaacagctccggtctacagctcccagcgtgagcgacgcagaagactggtgatttctgcatttccatctgaggtaccgggttcatctcactagggagtgccagacagtgggcgcaggtcagtgcgtgcgcgcaccatgcgcgagtcgaagcagggcgaggcattgcctcactcgggaagcgcaaggggtcagggagttccctttccgagtcaaagaaaggggtgatggacggcacctggaaagtcgggtcactcccacccgaatactgcgcttttctgatgggcttaaaaaacggcgcaccacgagattatatcctacacctggctcggagggtcctacacccacggagtctcgctgattgctagcacagcagtctgagatcaaactgcaagcggcagctaggctgggggaggggcgcccgccattgcccaggcttgcttaggtaaacaaagcagcagggaagctccaactgggtggagcccaccacagctcaaggaggcctgcctgcctctgtaggctccacctctgggggcagggcacagacaaacaaaaagcagtaacctctacagacttaaatgtccctgtctgacagctttgaagagagcagtggttctcccagcacgcagctggagatctgagaacctgcagactgcctcctcaagtgggtccctgacccctgacccctgagcagcctaactgggaggcaccccccagcaggggcacactgacacctcacacggcagggtattccaacagacctgcagctgagggtcatgtctgttagaaggaaaattaacaaacagaaaggacatccacaccaaaaacccatttgtacatcaccatcatcaaagaccaaaagtagataaaaccacaaagatggggaaaaaacagaacagaaaaactggaaactctagaaagcagagcgcctctcctcctccaaaggaacgcagttcctcaccagcaacggaacaaagctggatggagaatgactttgacgagctgagagaagaaggcttcagacgatcaaattactctgagctacgggaggacattcaaaccaaaggcaaagaagttgaaaactttgaaaaaaatttagaagaatgtacaactagaataaccaatacagagaagtgcttaaaggagctgatggagctgaaaaccaaggcttgagaactacgtgaagaatgcagaagcctcaggagccgatgcgatcaactggaagaaagggtatcagcgatggaagatgaaatgaatgaaatgaagagagaagggaagtttagagaaaaaagaataaaagaaatgagcaaagcctccaagaaatatgggactatgtgaaaagaccaaatctacgtctgattggtgtacctgaaagtgatggggagaatggaaccaagttggaaaacactctgcaggatattatccaggagaacttccccaatctagcaaggcaggccaacgttcagattcaggaaatacagagaacgccacaaagttactccttgagaagagcaactccaagacacataattgtcagattcaccaaagttgaaatgaaggaaaaaatgttaagggcagccagagagaaaggtcgggttaccctcaaagggaagtgcatcagactaacagcggttctctcggcagaaaccctacaagccagaagagagtgagggccaatattcaacattcttaaagacaagaattttcaacccagaatttcatatccagccaaactaagcttcataagcgaaggaaaaatacaatcctttacagacaagcaaatgctgagagattttgtcaccaccaggcctgccctaaaagagctcctgaaggaagcactaaacatggaaaggaacaactggtaccagccactgcaaaatcatgccaaaatgtaaagaccatcaagactaggaagaaactgcatcaactaacgagcaaaatcaccagctaacatcataatgacaggatcaaattcacacataacaatattaactttaaatgtaaatggactaaatgctccaattaaaagacacagactggcaaattggataaagagtcaagacccatcagtgtgctgtattcaggaaacccatatcacgtgcagagacacacataggctcaaaataaaaggatggaggaagatctaccaagcaaatggaaaacaaaaaaaggcaggggttgcaatactagtctctgataaaacacactttaaacc

SEQ ID NO: 1881836 - DNA, 4001 bp, Homo sapiens
gggtgatagaccaacttcctgataagatatgatgcttttattgattccctctcaattttgctcacctttggaattcaggtcatgtctgaaacctagaggggtatacttgctggaagattttgttttgtttttgtttgtttgtttacatgagaacctgatgagtctgctatgataactcaatggggctgaaactggagacctgtataagtgaaagattatattttacttaggatccactctctctcaccctttctgtcctctaaagactagggtatgtcccaagagagaatttgtcacacagggaaatgtcttcagacaacaaatttcactgaaagttggctttttctagggtaacaaggaggaaatagggctggcacaaagacagtgttcaataaatatttgttgaattacatcaaaatgaagaatatttcttccctcgaagcccttgtaagagaagacttcaaccaaaatgaaatttctgaaatgccaatgaaccacatctctctgttgcttaaagtcttgcaatggcttcataatccactccaaattcctcacaaggccacccataatacggtccttgtataccttttgactcatattctgtcattcatcattccccccactcgacttctctgctttaacacaaacatatatccatgtgcatgcatgtacacacacacacacactgaaatagatctatcccaccccccaaagccagtgttctgtttagcctttgctgaccaaagcactctttcttactttacctagtaaacttttaatcattttgaaagattcagttcaaacactgcactacttccactaggaatcttttcttgagtttctcatgtggacagtagtgctttatcctccatgctcggagaacctcatatacatactccaaaaaaatacagttactttgctaaaattgtttccatggacatcttcactataccatgtgtttctcaagagcaagggctacattctatttgtttaaaatcatttttaaatgttttgagtggtaattgacccccattaggtacttattaaatgcaagctaaaggcatgaataattggtagcagatattgctaatcaagctccaacatccagtctttcttcttatttaatagaactccaacccacttcaacctctccgtagctacccacctagggaaggtcctatgacaaagctctcaccgtgagatataactggataagatatgtgatgcttcctccttgcaacgtccttattaagaaactgctgttcttaaattcttttgtcttttctgcttctcacagactgaaaacaggtgacaactggcagtttccttggacttagtgatggaaatgaatgttgatgttggctgagctctcctgacagcctgggaacctgcagaaacttggtgaccagaccaccctactttgggttatgttagagaaaaatacatcctgtcatatttaagccactgtattttggggtccctttattacagcaattcaggtgatgccctaattagtacacggttgaaatggaaactattttctatgatattgaagctttattttctcagcattgtaccatagaaaatatttccatttctattatgtatcaggatataacctagaaatacgtcatggaaaacaattaaatattacttttacagataagcttcaaaacactatcaaatttctatttattgcctgtagaacttaaattatcattaaaaattaaaaggcaactatttccaagagtagaaactttatttacaatctttaaaaatatcctctagtcttaagaccctaccttgtttttagcttctgtgtcttcttccctcattgaagaatcagtcattcactttaggcacagccttgtgttatatgttaggaaaatcttgaccttggatggaagagagaaaaggaactccagaatgacagccaggtattaattgctagcattaccttcagcagcacttaacactgttgtgctttttcttctgaaacctaatattcattcttctttctggccctggtatctgaaaccatgttttagaaacctgaatagcaactgaaatgctgtaaggctggaattgcattcttgcaattgccagtgacctgattcaggatacattcccttgatctagatcatatgacttatttcttgaccaacctgttagaaatttccactctggtgattttcctccagtatgtaccactgggtatctgttactatactctgtacatttgtcttttgcttatcaggaggctattatcatacctaaaatctgtgtttgtcccctatttcacttgagtgcctgacactttcagatgaaaaagtcttggttcctcttagtattcctttgtttccactggagttaagggtcagtaatgagaatgtcctgagatataatgatattggtgagtagcttccaatttgtcattaatatatcattaatatatatatatttattaaagaatttcattgcaaaacattaggcttttgggcaatattgtctttagcaattgccttcaatctaaggttgaaggtatgcaaaaccatcatagtgaacactgtaatttatccctgccctatactttccttttctctcataaattatgtggactttttggccttttgttaattgcttctctctcatctagctagtctagcaatcaaatgtccctccttcttcttttatagaggtaggcatgtgagcagggctgagcagtgagtggcctggaatgttgattgatccaaggataggaaaatggcttaagcaaggcctcaatatcctttcaagaactgatgtagttgctagaagacagagagttttttttctcaccttctgagatcatgtgtcataagagcattcaacctggagaggcaaatgaccaagaaatagagagaaaataggttcctgccaacatcttctgaacatccggactacgattatttttcctgctccttccaataaatatgcaacaagtttgagctcttttacttgcaaggaaggtagtctaaaccagaggtgataaactatggccccatcatctgtttttttttgtaaataaagtttcatatgaacacaggtacatgcatttgtttacatattgtcaatggcttatttcccactcctactgcagagtagagtggttgtaatggagattgtatggccaaaaaaaacccctaaagtatctaatatatggccctttacaaaaaagttttgccaaaccctgcttacttttgaaataggctttaaaaaaagaaattttaatatttaaacaatttgaagcgttttcaaatataacttttcttttctttccgtaacttctatgtctttttaatgtggacaaattaaattatgactgaaggagtgattctaagggtggcaccaaatgtcaggcaatttttgttttgttggtttatgcttcaatatactttgttgatttctaggctgacttatattcagtaaaattgtatgccttactacaaggtgacgtaccgggtgcagtttatttttgagataatattggcaccttctgtacctcataattcgcagaacttattcatagtctgtataatgcataatgatctgcctcatctagagttatccagtatagtacccactagccacatgacatgtgactattggcaagtgaaacgggctagtctgaattgacatatgttgaatatgtaaaatacacaccagatttcagtgagcaagcatgacaaatacaacacaaaaagtctcagtgataatttttgaatatttattaaatgttaaaatgatatttttaatatattggattaataaaaatatattattggaattattttttatgtttcttttaaacttttgaaaatgaatattaaaaaattaattacctttaattttttaatatttctattatatttctattaaacattatatttctatttctattaaacaacagtgatccagaaatcatagaaaaatgtagtatgactgaagattaaagtaaactt

SEQ ID NO: 1881837 - DNA, 4001 bp, Homo sapiens
tgcaggaaaggagataatagattttggaagaccaggcaatgcaaggaatgagtctgcacattctgggtcagatgcctggaataatgtgttacaggcttctagggaatgagggggaatccacagcattgatggctcctttgttgatgctgaagaatctgaggattacaatgaacaggtttgggaagaaagtcaggaattttaagtggcacaaaaaagtctggttataaaaatgggcactgattaggtcacgggcagggcagaatagaagaaaccaggaatggaaactggacttagcgaaaagtacaaaatcagctatgaggcactcagacaggaactcacagacagaagctggcctggaaagaagtagtgtataaacagtagacactctgaagaatctagattctttccaacccggaggatgaagacagcaagtaggttgggcagatcagtgtcaagagattcaggacagatggacagatctaaatggaaacagattgaatctatggcaggggtcaaatatcagaaactcaagctaaattcacagggaacaaataagaagggctcttgtttttcatcccctcacaaagttctgggtttctggtaaaaagtaagggggtattttacatgttcaagggttctctgcagagtgacagaaagcttaatcccaggccctccctccccattacagaaattttgttttatttatatgacacttaatatatatgtgcagtttatagatgtcttaaatttcctgccagaaggtatgctcctcttggtgttaacggatattatttttgagcacctactgtgtcccaggtattctttgtcagtgcttcacatacattataatgccattgtttcttttgaatgcacacaatcctgaaaagtttaagatgtagagagataagtaactcatttatggtcacacagctagaaagagacagaactataaattaaactcaggtagtcaaatttcacattcagtttttattgtcattgatggtgttttccctcctatttcccatggcttatttattgctaccaattcacagtccttacagcaacagcaagttagatgatctgatgaggattactttgtttccacacaggagtatagtgtgtactgcttcctagagcttgatctttctggttgcagattttggtaacggtggaagactacatcttctaggggagctcatggtaagaatgaagtagaagaggcaggagtccaatgagtcattctatatcatcaggtgcccagactgcaatcgcgaaggaagaattgtttgccttgaggcttatcatacttcccacaagggcagggcttggtgtcagagtgtaatctacacaaaacagagaatcagaatctatttagagagggagtgcttcacagaggataaaataactaagatttcagaactatcttgactttttcttccgtaaaactttacctagtaaactcctattcaatgaaatggtgaagccctgtctctactaaaaatacaaaaatttgatgggtgtggtggtgtgtgcctgcaatcccagctactcaggaggctgaggcatgagtatcacttgaacccaggaggcagaggttgcagtgagccaagatcacaccactgcactccaacgtggcaacagagtgagactctctcaaaaaaaaaaaaaaaaaaaaaaacagctctgctactttagcagtgtggggtagttggagaaccaaatgcatgtgtagccacttaacaggcatctaaaacttgaacaaattacttcttttgaaactcagttttttcctctgtgaagtgagataatacttacctcgttgtctgtgtgagagagttaagtttccacgctggcccacggaaagcatttggaaaattgttgttctcttatcttgattacataggattccaaactgtgtgcatttctttccaactaaaatacgagttctcaatgttggaattgatggtggtcctcatttttttctattcgttttagcaagtgcctaaagaatttataaaataagttattttataaagaagagtaactttgtttattatgattagttaattcatacatgggtaagctgacttgatgagctccacaccacttaggactaacagcagtgatttggaattgaatttctcatgtagtggctgtggagaagacagtgagaagtgttggttcattttctgttgctttaacaaaatgccacaaacagggtaatttataaagaaaagaagtttattaagttcaatgttctggaggctggaaagtccaaagtcgagggggctacatctggtgaagacttgcttgttgcctcgtaacagggtggagagcatcacacggttaggaggcaagagaagagagtcagagagagcttgcttttataacaaagccactcctgtaataacaaacacactcccctgataatgacattaatctattcatgaggatggagagattatgttttcaacatgtgaaaatttggagaatacattcaaactgtaacaacagggaaggaactcttatattctcacctattcaatccagatatttagttaacttggaatgtgatactgtttggggaatgatgtacctatggataaaaaccagatgcagtccattgtgaaggtgattcatgcaagtattacaagctactttaggattacaacttaccctattgcaagtgttgagaatttggggttctgtgacttaggtgatgagagtggcccccctccatgagctatgcagtcacccaacaagtatacatatagttctctgtgtgtttgtataataagtatgtgggtagttaaggctaaccatctattaaaaaatataaactatttgtgtttttgttttaccaatttacttaggaacaaatatgtattaagtattttttgtatgctgggctcctggcaaatgtaaacatgaaagcatgatcttgcattaaatcaatctaacttttcaaatccatatgttaaggcaatacacaccttggttgaattttggattaaagaaggctgttattttattatttgaaatgacaacatacttgaaatgtcattttagaagatgaccctagttattcctgattgtctcaggctttttatattcgactagtttattatcattttacctgagctctctgctttacttctaatttcctaaagcctctataaatcttggtctcccttctttgatttgttgctgtctttgagaagacaattacagatccctgcttctcagtttctctggaattttgctcatccattttcctgatgttttttcaatgtcttctgtcacttcttctctgctggtttctccactgctgacaaaagtgttcaaagcttttcctattctaaagaagagaaaacttcatcccaatccaattcccttttgaattataccctcttttcctctttgattcaataccaaagttcttgaaacttgggcagactttcgactccatcttgttgactctcactgctttgtctccttcaacctggctttcattcttgtcacattcctgaaaatgttcccacaaagatcaactccaagctctagacatcaacaacaaatctttatccttgacttatttgggaaatttgatatagtttatatattttttctgaaatcattttttcttagcttctgttcagtctctcttctcccaactttccctaatcatttactaagattttcctctatctcctttatttctttgtgaactcattttctttgtattattgaccattcaattaccataagtgtgatttaattaagtctctgcatctttattatttaattaaaaatatgaatatttagacttgacttttcctctaagttccaaccattcttttgcaactaggtctagttgtaacttaacatctcaagtttatgacatctgaaatcaaacttattgctctcctcccatctgccatcctcatattttccctttctcacctctattctgttaaggaaactgtcattttctcaactaa

SEQ ID NO: 1881838 - DNA, 4001 bp, Homo sapiens
ccagccacactggaacctgaactgagaggccaccctttccctgcaggaccagctcctagaacagcggttctcaaacttgagcaagtgtcagaatcacctgaagggctttgttaaaacacaggctgctgggccccagagtttctgatgcaggaagtctgggtggctgagaatttgcatggttacaagttcctgggtgatgcagattctgtgtgtctggaggtaacattttgagaactgctgtttcagaagttctccacattaaagtctaccagtcctgactggtacctaaggggtcatgaggtagtcagtgcacaagatagaaagtgaaaacactgtcttagaatttaaaacaatacttcctaacaccaataggtagcttttgataaaggaattatcaagcatggctgtattcatttcttattgctgctgtaacagattactacaatttggtggcttaaaacaatgtaaatttattatcctagagttttggaaatcagaaatggaagcccaggcgcagtggctcatgcctgtaatctcagaactttgggagaccaaggcaggaggactgctggggcacaggagtttcagaccagcctgggcaacatagtgaaaccccatctctacaaaaaatgcaaaaattagccaggcatgctggtgcacccctgtagtcccggctacctgggaggctgaggtggaaggttcacttgagtccaggaaggttgaggctgcagtgagccatgattacgccactgcactccagcctgggtgacagaacagactgtctcaaagaaaaaaagaaattagaagtgaatctcactgggctaaaatcaaggagccagcaagagttgtgttttttgttttttgttttgagatggagtctcgctcttgtcacccaggctggagtgcaatggtgcgatctcagctcactgcaacgtctgcctcccaggttcaagcgattctggggaggggaggaggagggaagcaaggagagaggaacgcagggagcagagcctgacctggtcacaggggtctgggaaagacagaggctttgttagagccggcagctgagggccgaggccgagcaggggttaggccagcacaggacgaaaaggaagaaagttccaggtggagtctggtggagaaagaccgacctggaaggcaccagcatgtgcacgtggcaactgaggtcgaggacgtgcctgagagagaggaggaaggtgccctgcggaccgggtagggtgcggaggtcgggaatggagaacggtcgttgggcaggtccgggtacccgtagccagaaccacccgggtgtgcgcagctcggccaggccccgcctcccggcgtccccgccccctgctgggcctctctccgcagccgcgagacccgcgcttggcgcataggccggttctaatttacaagaacaccgcggcctgaggccggagagtcccttcaacccgggaggcggcggctgcagggagccgagacggcgccattgccctccagcctgggcaaaaagagcgaaactccgtctcaaaaaaaaaaaaacatggccgaaaccaggaagctgcgcgatggcgccacggcccctcttctcccggcctgtgtccggaaggtttccctccgaggcgccccggctcccgcaagcggaggagagggcgggacgtgccggggccggagctcagaggccctggggccgctctgctctcccgccatcgcaagggcggcgctgacctgaggcctccccgcaaaggtccccgaggcggcggcggcggcgggctgtgagaaccgcagaagaacgctgggcgcgcagcgacccgtccacccccgcgaggagagacttccacagaggcagcgtttccacagcccaaagccacgtttctagggtgatgcagccccagtaagttcctggcggggaagctcacggctgtcaaaagaactcttcgctccagccggcgcacgaaggggaggagggcaggaggctgccgcccgcacaggtcatctgatcacgtcgcccgccctagtctgcttttgtgaatctccactttgttcaacccccacccgccgtctctccctccctgcgccttccctctaaccttaaagacccagctacctctacgcaaatggtagctacctctgcgcaggtggaagttgagttcggttcacgcgggaccctcttccctgtggcaagctgctgaaggagacctgctgttactgctttagctgctgttctgcttaatctcagacagctggaaggtagtattccgccctcgcccagccacccgagtaaatgagaatgatgactgactgagaccctgatggtggtggcttaggcttaatctcagacagctggaaggtagtattccgccctcacccagccacccgagtaaatgagaatgatgactgactgagaccctgatggtggtggcttaggcaagatgaacgtctgaaatggaggcccagggctgccacgatggctctgtagtcatcagggagggagctccttttatcttgttacctactcccctcttgtgcccctttcttcccttgatctaagaaggttgctccggatctcgccatctggcctgcgttcaatcagcagaagcttcctggaggagcaggaggaggcactgtgctcgcatcacataccagtggccagaagttggcttcagggaagctcaggaaataggatgcgagaagccatgagacctccccaaactctgcagtaacagagtcaacaagacaatggcttaaagatggagagaccagttgatcggtcacacaagctgttccacgataattcttgtgtcagaaggggaggctgactaccaggaccactggccccacttccagcccctccattctgagtacacttcagagggctctggcagggtgagggggtcttggtggtgccacagagagtaaaggtctagcacacccattgtggagatatttcatggggacaacccagtgacttcacttgaagtaaagtgggattttccaaccttgagattcttattttctttggtatgcgtgtggaagaagtatgaaggtgggggttgggagggagagcaaatgagctgtgtgtatgaggagctggggcctggctcttgacaatatcacccacccccaccccaggctttccttggggcagaaagactatggccggggctttcagtgtcggctccgaggtatagaggtataaccagtgcttttggctaagtcacgtcactgatgagcttctctttccaccttggcaaaccaattcttctgtaaaatggtcttcaaagtttcttttttaaagcagagaaacttatttttcagataaaaatttagatagaactatcgggggaacccgataggggccagatatcgggggaacccacccccaatatttcaacataggttctttctattttccataaatgttggccggctgagaaataaagagtacaaagagcggaattttacagctgggccaccgggggtgacatcacatattggtaggaccgtgatgctcacctgagccgtaaaaccagcaggtttttattaaggatttcaaaaggggagggagtgtacgaacagggagtaggaacaaagatcatatgcttcaaagggcaaaaggcagaacaaagatcacatgcttctgaggaaacaggacaaagggcaaaaggcagaacaaagatcacatgcctctgaggaaacaggacaaagggcaaaaggcagaacaaagatcacatgcctctgaggaaacaggacaaagggcaaaaggcagaacaaagatcacatgcttctgaggaaacaggacaaggggcaaaaggcagaactcctgataagggtctatgttcagtggtgcacgtagtgtcttgataaacaccttaacagaaaacagggtctaagagcagagaaccggtctgaccaaaaatttaccaggatggagtttcccaatcctaataaggctgagggtactgcaggagaccaggacgtatctcagtccttatcgctac

SEQ ID NO: 1881839 - DNA, 4001 bp, Homo sapiens
ttttccaggatgtttattttaggatgtgaaggttaatctccacttgctgttcagataaaatttctctctataattaaaatcagcatatgcccccacataaatcaagagaggtttgttttaataaaattaaattgaatttgagaattttttcctcaatgataacaattagcaacaagcgaaatgaacatttaaacgaaatacctgagcaaatctaaataatatgtaagtgaagctatgagctagattgttcactgttgcaaatattttgaaaatttaaagaaaaatagacactaagaaataagtaattttcaatctaataggtactactttttggcttaagcatctaagttaggaaagtggaacttaaaccacactaaattatgtactaatcaatgaacagatttgttacatttttttcctttttattcattcatgctgtgccataaatgcagtatcatagacactgattaaaagcattttataaaatgacttcatgcatggcatttatgtgaattcgaaatgagagaaagtagtttcaaagcgtgttactcatttaactctatatttcagaacctattttcacagatgtttgaagaaatagcacatgtgctggatttaattgtagatagcttatttggagaaccagaaatgcacaactgtctttcatgagtttctagagaaattctagagaattcaggtgaagctcagccagattgcctgcctgttctcttcgtaaatggagctgtaagtggtatgcctgccattaagcgacctcgccttaatcctcctgctagacccctagaacatttgacttgctgaattttaatagtcagacaatctgtttggattgtaatttgataatgtttttttgattagctaaaattgtgcatttaaacattcacatcatattttctgaataaaaattagcatgtaaataaataagttgccattttcataattattatgacttatgagcaaaatattgagaccgtgctacttcataaatgataattttaagacagtggaataggtgtttatttatgaattttagaacaatgatcatgaatgaaagattctcacctctaggggattttatgaattaatgtacatgaaagcatttcatctactatatgctttattgctattacaatgatttgaggatttgaagcactgtctgtattttataaaatgtattttctgcatcatttcttttaggaatcaaaaaaggcaacaaacccatactctaactagaaatgaagagggataaacaaacctatttaaaataccattatatgttatttttaaaatgttgtcctagttccatgctccactgaaacagctcttactaaagtcaacagtaatctcatttgtactaaatataacagtccttattttacctgaatttgcagcgccatctaacattattgaccaatttttataatactctcttttcttggcttttattaggcaatactccctgattttgcttctacatcccttctctatcactccttttaaattgcaagcactttgtttacatagaaaaacattttaagttttaactctaaagcctcttcttctgttgtcattctttcttcttccaccatctcatttataaacactatattacaccatatacaaaaaatttacaagtgtatatccaagtccagatttctactttgagtttcagacttctctatctaattagcatcttgacatctacttgatgtctcaaaggtgactcaaagtcaacgtgtccaaaaatacacttacctcttcattcaaaactggttttctgccaatgtttcctctcagtgaaaggtattgccatcaattcagccattctatcagaaacctgggagtcaagcttgatacctctctctaattcacctatacattgcatctattaccatgtcctgtcacttttgtttaatataaatatagatagatgtagatataaataagtagatatctaaactctctagagttggcagagatgctttcagaatagaaactaagcaacattctggacctaactctctcaaaaacaattgcatcagcatacaggattccgtagaacttagcttaaatgccaggctactgaatgggctgcttaatacagaagttcctaacaactctaaaattctcaaatagtttaccaattttagaccatagccctttaatttgtaaagaaaaatatttttagaaattcaaaaactttcttttatcaagtcatgattggctagattgtggttgttcaaaccacgtcagaatctccatgatttgaaatggtatggcttattttaaatctctgctttgtgtctatcttggatggctaagaattctggtatgcattgttcacaacaaagcattgttcatatcctggagccaagcagatatagcagccatgactgggtatattgtcagagacacagataactctagatcagtaatcaaaagaatattctgtctcagctgtcaaatattatggctcagaagtcacacacatcattcctgttcagaactcattggccagccacattcagtcacatgtctatccctctcataagagggccagggagtgcctaataggcaaaaagatgagaacatctgatgagccatattaatgacttccacattacccaaaagaattgttatattaaaacatgatttactaagcaaaagctaaagtgttaaattatttggatggctaatcctattgtttcccaaatcagttttggatttgcaatattgtataaggaagtcagtattttcccacattttcaataaaattattattttaataatacttctattttcttagctcttcaaatagtaaatgttcattgggacaccccattccttagtgaaactttatgaaaagcagagattatccaaaagtgacacatctttcttcacttctgatctttaactatctcctttagaacagagaaagtcttacttctttggaaataaggtccgttgaaatgtccttaattctcaccagtctctgatagcatattctcacttcgtagtggtagaaagaaatgtgacaaattttgaaggtctattggagctctctagtgctaactatgctaactactttgctttacattcactcttggttggttgttgttgttgttgttaatttcaattgccctttttagtgagtagctacaagcaaaataactgtatttcctcaaagaaatatgattttcttagaaatccaacacatctgaaagaagaaatggtgcacaaaatttcaaaagtagttctgctgtcatgaaatttctcatccccttctcaggctaacaaggagcaactaagtcaaatatatcttgcttctggcaaaatctttatgtgatactatggatgccgtcatctggaacttgatttccaaactgtctcagaaaaatatttcctttccattcaacatcaaagacccttctttccagccatgggagtctcctgacaagaaaatttttaatgctgtctttaaatggaacatcgagtgactgcaattctattattggagggtaatatgcctgattggccaaggctacaggaactttatttaaattcttcaatagggtaaaagaggcactcagatcgcttttttcacagctatggctaagtcatataatatgatttggcaagtgtagatgacatcccattagagtatctctaggtggcaagtcccgtaagaaactgtcatgagcccgtatatcaacctgttaaagtgacttacacgttcgcattctttttaatgaaaagaacaaattagaattcaaagtgtaaaataataggtgctcaactttgtgaactccatgatcacatttagctttataaaaagcacccatctgattttcaggccctgcaaactatcactgaggttatcagaaacttttataaaatgaacatggatatattttctttttgtgttgcatgtccccaagatgtgtcatatatatagctcttaagttttgactgataaccctaac

SEQ ID NO: 1881840 - DNA, 4001 bp, Homo sapiens
tcaatcagtggctgctttgcgctggggctgaaggatggggattgactggaaaggggccccaggaaaccctctgcgatgacgagaattttctatatcatgaagtggagtagtttcagcagtgtacacatttttcagactcatcaaaatgtacacttaatatgtgtgtattgtattgtttgcaaaattatactttcacaaaatttatttttttttttttttatttttttttttttttgagacggagtctcgctctgtcgcccaggccggactgcggagtgcagtggcgcaatctcggctcactgcaagctccgcttcccgggttcacgccattctcctgcctcagcctcccgagtagctgggactacaggcgcccgccaccgcgcccggctaattttttgtatttttagtagagacggggtttcaccttgttagccaggatggtctcgatctcttgacctcatgatccacccgcctcggcctcccaaagtgctgggattacaggcgtgagccaccgcgcccggcccaaaatttatttttaaaaagcaggacccaagagcaattctagaaggtaagtagaggatacattccaccagaactcagagcaaaccctaggcagaggctgggagagggaaccagccatgtggcagtcagcagagagtggggaaaggatcctcggtactgggccagcgcctggtgagtgactgataaggtgattcctttgggctgcagctcctagaagcagtgttgtaagcttgggaaaccatgcagcaatgcacaggggagctttgggcatacacagataggaagaagagtgatgagcagataggcacacagtgacttctcctacacattgtggatcagtgtcgatgcctttaaataaggttgcccattcttcttgagacaggaaaacttaagctactcagagattactgaaaacattaaaacactgatatgtttggtttgggggtactctgacttcatgttaagcgtaatatggtatgggttgattcagaaaaatcaagatgaaatctcagaaccaactgtcaaataaaataactcctgcttgagaggcagccctcagtaaaacacacaaggaccctgtcagtaaatacggaagtatctgctgtacgtgcccccatcttcaaataaaaacttgaaacgatggcaaagttaacatcagttgcacacacacaaacacaccacatgcacataaatgtgaggtttacaagacagggcagagtgagaaagaccacaatcccaggctgcgtgacacgaggtttctaactcaagccaccccttagggacagaggccgggaaagctgtggtgaaagtccccagcatggatgggaagaatgactctgtgctccactcagttgccagtttgtattgccatggaaccatccaacagccatttcaacctggaaaccattctgtgtgttcaatcaatgaacatgggtactggacacggattttgaacaacacgatctaaggcccagagaagcgtaagagctttgaatggcagtgttctaacatgtgtctgactgatgggaggtctgtggaccagagtgttctgagctctcccaggtgagctaggccttgctctggacatagtggggctggagggatggcttcggccccgcgttcttcttggactgctctgccgtctgccttctgatacatggcagtctcctgtctctgggaaacacatgggtgtcgtgcacccaaatgtgtgggacctcagccttccccacttcttcatcaactaagcactaaacaagtgtgtggatctgctcacgaacgtgctcacaaactcacacacacaccaagtggaactccacactgcatttttttctttccttcatggccaaacttctgggggggaaaaaaaaaaaatatatatatatatatacacatatatatacctttttcctgaattttttatgggtatctcctctcttgaaaatgcacctgctctcctccgcaggcccagcaagagcccctctctcatccctcagcccccacccaagctgtgacccaacagacgttgccaatgccttctggtggccaccccctcattgttgctatggcactgttgtgccctgctttctcacaagacctttgccagaaactcctccctgatcctgccttaaatgcagagtcccctgccagcccccacccttcttcttctctgaccccaggcacttcaccccaccctggcttcagcctactttcctcacctgcccgcgctcagccggctgcctcttcccagtgggccgggactgaagggtagggattgagcaggtgctcacacgcaccttcctacttgctcaccttacttccacttggatgtgctatcatcactcaggccagacgcatcaccgcgaagcccacccagctgccctctcagaatgcccttctgcctggccccattgtccctgttctgaataatgccacagccactcagaaacgcgttggaaaggagagcaagtcctggagcctcccttccacagccactgggaaatgattctgataggtgacgtttttccagttcccactgtggtccaatccccacagagaagctgggaacatggggctggcatggccaggggagggtctcagggtagcctgcccattttactgatatgtttctgtaacagaatccttgtagtgggaagtcagccattcccagcacaggctgggcactgcactggcatagcagggtcacctgtggggtggtggcgtggactgaaatctctctacaaacatccagtgtgagctgcgctccaaacatttcatgtgatgatggcctgtgttcgttctctctctctctttccctcttttgagttatgtgtgtgtgtgtgtgtgtgtgtgtgtgtgtatgtatttgtgttggggtgggcaggtgtgagtgtatgacaaatatacacatacaaatatatatgaaaagtttatatatgtgtgtacctatatgtccacatattttcattcaatactcatctattcaatcaactatttgagtgtcaactaaatgtgtatataaatataggaccatattgatattgtaattcctctcttggattcaacattctatgatgtccaactgaaagtgatggtgctctttatgacaagaataatctttatttaaatggtttagacatgagcagacttgataattgtactaataacatacttgtatcggtggtatccttgagaactaactctaattcattaacagtttgaaaacaccaggtggaacttcttcagtgaaaactgcaaaaatgcactgcacatgtggaggggctaaggcaagatctgtattctcattccgtagttacagccttcatttttgctttcttagcactgaagattgccagccagcctgagcaggagcctcacccatggccccagtcctgcgggcagctggagtggggcagagtgctatttggtaacccacacacacacagggagggcagatatatctggtgtcccctacacagtgtttaaattttaaaaaatcacacaaaaatgatggtcactgtcttttcttgaaaacatgtgagtccagctacaccaagcttcccacgggattgccatcggctgaagcaggctgagctgggtgggctctccgcgccactgtgggctcaccatgctgtactggactccactggcctttgcaaatgtttaaattcatgatcccagctctactgaaccaggagttggcaagtgtcttctgcagaggatcatgcagtaaacatttcaggcatccgagccccttctgtctctgtggcagctactcagctctgcatttctgctgcaacacagcctcagataatacctaagccaatgtgcattgttgagtttaataaaactttattcatggacactgaaaactgaattctctagaatttttacatggcaaaaaatatatttgtttttttttgttgttgttcaaccattaaaaaatttatacaagtgattattagctccagggccttaaaaaa

SEQ ID NO: 1881841 - DNA, 4001 bp, Homo sapiens
aatgatatcatggaaagacaagtccctcactccctgctgaaattttcagctgcgatgtgacctcggagtgggggctgtgcggcggggtcgaattcctcaggggagagactgcctcgtgcttttattagggggtagagtttaaaagcatatgtatttagcattatgagtataaattctgcattaagaatataaattctagttctatgaatataaattctacgtttggaagaggaaactacaaacttagaaaaaataacataaactgcagaaaattaacagattttttgccttgtggagcatagaaaatccacctcctgcggtgacggcacccttaccctcatttactcccatccggagtctatgggggaggtcagcgtggggaaagagatgctcagcttcgtccaaagcggtttccaaaggtcccagaacccagggctgtagacgcagaaggcggggcggtgtccacactcgcgcaccgcagcccggtggctctcaggcccccaccaggcgcgacccttccctctcctctgccacctggaagggacggagcacctgacgcgcgcatcgggggcaaacgccgcaagtttctgtgacgtgaggtctttgcaggttgccggggccttcctcccacagggacacgcggcctgcgccctcctaggcgtgcaggtgcggctgggaactggcgcccttcaaagccccagtgtcccggagccgacagcgcgcgggtggaggagctgcagaaaggggcccacgccgcaaaggcgctgttgtcgaggtcccccatggggttccagggctggtgctggcgagccccggccgcgccgccccatctttaccgcgcaccccggccgctccgccccctctaccgcgcaccccggccgcgccgccccctctaccgcgcactccggcccgcccagcccccgcggccccgcgttccccgcctcccgcggctcctcagcccagcggccagcaggggatgctgccgggctccgaggcccgggtcctgcgcggcgccgcggggagacacgcgagtcccgggccggcgccgccctaggccgggagggtgtgcagcgtgactgcggcgagccccgacgcccgagaagcggggacctgctctcggggggattctttggagacagcctgggcgctggggaatccggcgggtggggaggacccagctcggcccttgaggcgctcaggcctagtccaggccatacaggtgtgcaggacagggaccagccacaggccgcacgcaccttaatatgcagtgaataaaaaagaccagacggacctggggttgatgacgccatctgaacaaagcgtccccgccccacataccgttcgcccctcctgagtccgtctcgtcggtgggagcagagccagggaaaatcactaaggactctcccctccaaggcgaggacttgcctgacccgcttaggcagcgccagcctcccaggtgcaggtggcttcgccctcccctagctggagttagggtgtgtccatgctctgagtcctggactccaggaggtactcaccgtgtcagcagaaggacgcatgaatctatttgaggtcacgtaccaaagagctgcagcgcctggctccttaatgcagaggcattaggaagcgagttgtctacttgcgatgaatgatgaaggactccactttacagaggaagagagaaaaccttgccgcaaatcagtcaccttcggactccaacctaattgaccaaagttaggttattgatgaggttattgatgggctggacaccagtgagctgagaacgagcagtagttaatccccagtgtccacaaagagcctgatggccactgtccctccatgtcccctcccggcccaggagtcagccaggcacctgggcaccgttcactgggttttcctgcagggctgtgtgggggtgagcacagggtggcccctctccttcccgaacccttaatttcttattgttatatgtgtccttctcacaggggaagctgaacccaggatgagcttattcaaaaatatgtttttctattcccctcaaaaggaattggcagtaaacgtgtttctcttttttactctctggaattttatctgtatcttgaaattcctgccaaaacccacaatctaaggcgatgcattatttaaaaatcaactgaatttcaactagaaatggaatgtgaacattataaagcagaagctactcttcagctcttttcctggttccccagagaaaccaggcaaggagatgatgtgggggttggtcagaatctgggggagacaaagggtgggcttcctggggcctgtgcttcttggggccagttagctgggtgacctcaggagacacccgacggtgtctcaattctctcactgctgaaagaggcgggtgggacctatggattgtccgtatcccttccagcttggatctgtcattccacggctaggtgctgagagcctacaggtcccacttggcagccttccgagttacctgcttggggaaggtttcatgatgcatggtttgcatcctgtcccctgagtaaagggtcttctcgtgaatccctcagatcttctcgtacccttctccaactgtcaacatacagatcaatgtgaaaaaagacactgatttatttctgttttacttatttattttttggaaatggggctttgagctgtggcccaggttggaatgcagtggcaccatcatagctcactgtaacctcaaacttctggcctcaagggatcccccacctcagcctcgaaaaactctgggattacaagcatgaaccagtgcaccaggccctgatttgtctctgaatcatgaagttttgccagttgtcttgcagatagaatgctttagcatgtgtttgtgttgtaatctgaagctaatgattgtaacctctttgggacaccctggtaccctccaatggaaaggacaactccaatgtaaggagtgccctcccctccctgctcctaaactttctcatagaactattctgaccctggaacaatcctcacatttggcttccagtaaacctttctcaaattatttctgcctcaatagccttaattttggctgacagtatttagcagtttaactgcaatagagttaaattttatacattgtgtgtgtgagagggggaagtgtggggatttcaagtcagcagacttgcagtcttggagtgaggaaggcttttaaaattttgaacccaaacccagatacattaaaaaaacaataaaatcaaccacacaaaaatcttctgaatgaaaaaagacccataaaatagtcatgacaaaaaaaaaaaaaaaacaccaaacaaacaaacaaaaggaaaggcatcccaaatcaagggactaatttattctttaataaacaaagagtgcctccaaatcaaacagaaaaagatcaacagagaaagaggtaaaaatatctatctatctatatatatatatatacactaatggccaataaacatgttgatatatgccccatttcattagagggtgcaaagttgaaccatgagctttctcccatagctgtattgaccaggtaccttcatatattgcagatgagggtatgcattgattaaacctactggctggtaataattatcaaattaaaaacactcataccttttgacttaggaattgtacttccaggaatttatccaacatatcttttggtaagtgttcgaggcagatgtgcaaagttaatcacacagcatcgcaagagtgaaagatgggaaaccacctgctaatagggaactgattgaataaattaccatgtatccacaaaagggaatggcatcgcacacttgctgaaagcgtcaggcagctctgtatttgctgatgcatgtttctaatatatcttggtgaatgcagaaaagcaaggcgcggatgggcagaatctctggcgtctgtctactttacatggatctctctggaaagacatgcagggagcctgatccagggctcatctctcgagaggagactgagtgcctcatggatgg

SEQ ID NO: 1881842 - DNA, 4001 bp, Homo sapiens
gtggggaggacaggttccaggcctctctccttggcttgtccatgaccatgttcatggtcacactgtgttctccttgtgtgtgtgtgtgtgtctgtcgccacatttccctttttctgtagggacaccagtcatatgggctgatgcctcaccctgataactcgatttaacttggtaaagaccctccctccacataagctcccattctgaggtacttaggattaggacttcagcacatgcatttcaagagggacacagtttagcccattgcacgcatcctggggccaggtgcagggagcacacagcgtcagatggaagatggtcatggccatcctgagcagctgggtggggcgctgtggaggagagcccgaaggccaggctgatgggctctggtccagcacaactgcaactgcacggggctgatgggggtttgtgatgctgactgttgtgatgctttgttcacaggaggctgggtgacggcagtgaggggaaaagacaaggttagctatgagcccagcacctcaagaaggaactgagcccgggatttttttttttttcatcatcccgaagcagaaattgcataccatgagggccaggtgctgggctaccttgtctcttgaccttccaggtcctcactgcaacctggaaacagagacactcactgttgccatacccttggccttcccatcaccaaggctgggcagagtggtttggactaaagatttgataattaggaaaaaattaaagccccagctcatcttctcatcttccccttccagggagaacacagagaggactgggcctggagagaagaagccgaccgagcatgttccggggaaccggccatggccccccagggctcaccaaccaaggggaactgcagggaaacagcttcgtggaaaaactccctgcctcttccttttccccttcttccctccctcggtccttccctctagtctaccacagccctcccctgcagcacacacagtctggatactggccacatccttaaatacaggccttgccctggagtggctccctgggtagtcaaactaattctcaaatcaatatgtcatgtatcatgggcatactatatcacatatgacatatgtgatgtatatgtatatgtgttaggtaacatccaatgatatcatggaaagacaagtccctcactccctgctgaaattttcagctgcgatgtgacctcggagtgggggctgtgcggcggggtcgaattcctcaggggagagactgcctcgtgcttttattagggggtagagtttaaaagcatatgtatttagcattatgagtataaattctgcattaagaatataaattctagttctatgaatataaattctacgtttggaagaggaaactacaaacttagaaaaaataacataaactgcagaaaattaacagattttttgccttgtggagcatagaaaatccacctcctgcggtgacggcacccttaccctcatttactcccatccggagtctatgggggaggtcagcgtggggaaagagatgctcagcttcgtccaaagcggtttccaaaggtcccagaacccagggctgtagacgcagaaggcggggcggtgtccacactcgcgcaccgcagcccggtggctctcaggcccccaccaggcgcgacccttccctctcctctgccacctggaagggacggagcacctgacgcgcgcatcgggggcaaacgccgcaagtttctgtgacgtgaggtctttgcaggttgccggggccttcctcccacagggacacgcggcctgcgccctcctaggcgtgcaggtgcggctgggaactggcgcccttcaaagccccagtgtcccggagccgacagcgcgcgggtggaggagctgcagaaaggggcccacgccgcaaaggcgctgttgtcgaggtcccccatggggttccagggctggtgctggcgagccccggccgcgccgccccatctttaccgcgcaccccggccgctccgccccctctaccgcgcaccccggccgcgccgccccctctaccgcgcactccggcccgcccagcccccgcggccccgcgttccccgcctcccgcggctcctcagcccagcggccagcaggggatgctgccgggctccgaggcccgggtcctgcgcggcgccgcggggagacacgcgagtcccgggccggcgccgccctaggccgggagggtgtgcagcgtgactgcggcgagccccgacgcccgagaagcggggacctgctctcggggggattctttggagacagcctgggcgctggggaatccggcgggtggggaggacccagctcggcccttgaggcgctcaggcctagtccaggccatacaggtgtgcaggacagggaccagccacaggccgcacgcaccttaatatgcagtgaataaaaaagaccagacggacctggggttgatgacgccatctgaacaaagcgtccccgccccacataccgttcgcccctcctgagtccgtctcgtcggtgggagcagagccagggaaaatcactaaggactctcccctccaaggcgaggacttgcctgacccgcttaggcagcgccagcctcccaggtgcaggtggcttcgccctcccctagctggagttagggtgtgtccatgctctgagtcctggactccaggaggtactcaccgtgtcagcagaaggacgcatgaatctatttgaggtcacgtaccaaagagctgcagcgcctggctccttaatgcagaggcattaggaagcgagttgtctacttgcgatgaatgatgaaggactccactttacagaggaagagagaaaaccttgccgcaaatcagtcaccttcggactccaacctaattgaccaaagttaggttattgatgaggttattgatgggctggacaccagtgagctgagaacgagcagtagttaatccccagtgtccacaaagagcctgatggccactgtccctccatgtcccctcccggcccaggagtcagccaggcacctgggcaccgttcactgggttttcctgcagggctgtgtgggggtgagcacagggtggcccctctccttcccgaacccttaatttcttattgttatatgtgtccttctcacaggggaagctgaacccaggatgagcttattcaaaaatatgtttttctattcccctcaaaaggaattggcagtaaacgtgtttctcttttttactctctggaattttatctgtatcttgaaattcctgccaaaacccacaatctaaggcgatgcattatttaaaaatcaactgaatttcaactagaaatggaatgtgaacattataaagcagaagctactcttcagctcttttcctggttccccagagaaaccaggcaaggagatgatgtgggggttggtcagaatctgggggagacaaagggtgggcttcctggggcctgtgcttcttggggccagttagctgggtgacctcaggagacacccgacggtgtctcaattctctcactgctgaaagaggcgggtgggacctatggattgtccgtatcccttccagcttggatctgtcattccacggctaggtgctgagagcctacaggtcccacttggcagccttccgagttacctgcttggggaaggtttcatgatgcatggtttgcatcctgtcccctgagtaaagggtcttctcgtgaatccctcagatcttctcgtacccttctccaactgtcaacatacagatcaatgtgaaaaaagacactgatttatttctgttttacttatttattttttggaaatggggctttgagctgtggcccaggttggaatgcagtggcaccatcatagctcactgtaacctcaaacttctggcctcaagggatcccccacctcagcctcgaaaaactctgggattacaagcatgaaccagtgcaccaggccctgatttgtctctgaatcatgaagttttgccagttgtcttgcagatagaatgctttagcatgtgtttg

SEQ ID NO: 1881843 - DNA, 4001 bp, Homo sapiens
gtctgtgggctggggactggataaatccctgtctgatcacctcattagactgttacaaccatctatggaaacatggaaattatctcacattttggctctcgatccttctcacattgttttaaaatgtgaacagagtactccaagctcaccatcagcaaaaggacagcttcccctggcagggctgtgctatctccagccagatccaaggattggaacaccatacggctgagctcagttccaaagaaaacttaactgtgttgggtgtaacctgtccgagtcaaattctgcatgtgaccaaaacgaataaaggccaaagacacatgcacacgtatgtttattgtggcactattcacaatagcaaagacttggaaccaacccaaatgtccatcaatgatagactggattaagaaaatgtggcacacatacaccatggaatactatgcagccataaaaaggatgagttcatgtcctttgcagggacatggatgaagccggaaaccatcattctcagcaaactatcacaaagacagaaaaccaaacaccgcatgttctcactcataggtggaaattgaacaatgagaacacttggacacggaggcgggagggggcggggagggctgcgaacatcacacacgggggcctgtggggctgggggaggggatagcattaggagaaatacctaatgtaaatgagttgacgggtgcagcaaaccaacattgcacatgtatacctatgtaacaaacctgcatgttgtgcacatgtaccctagaacttgaagtataataaaataaataaataattcaataaagggagttgctcaaaaaaaacagcggctaagcttttcaaaacccaggtttcccaacaccacagagattaagggaaattgagccttccttactgaatccttatctcctgcttgatggtgtcataacaagtcttggctcctggtttggacctgacatttactgcccatcaagcgcgtcctgaggcaaggtccacacaatgtagacatgtgacctgactcaaaatctccatgaatcgctgagtcactcgaccactgccttcctagcggcttctcaggaacacctgtgggctaagaatgaacctggacgaggagatcagaaggcactgccatctccttattttaataggatccccagaaagcgaacccttcaaggcctgggcacccaacattcccgtctgcacagaccttgcaaggaaggcctggccggccaagcgccggcctcacagctgcatgttgttacaaatctctcagtgggaccttcctcccggaagagcgttcgcgtgtaaaatgtgttgtgtaccattcttcaccacgatactaaggcagagaatgcagtgagtggaagagagcgtgcaataagcataggcatgcacgtgtctcccctaatgcacatgcagcgacttctctcccgcgagcttatgggaaacgccctgcgcagctgaccagtcatccgacgttgcggagagcagcgtgggtccgagggaaggctgcggccggggacgcccagactggaggccttgtctgccccacccagcctcggacttctcaggcttctcggcccgagggagaaacattttgaaattctttaagaagcaagttttccgtgggctgagtggacttctagggccctgaccacactgacctgggcttgtcgagctctgcccgcaggcccctcgaggtctgggtttcggccccatggccgtggctgtgcttggaaggccccgggagcagccagggagcgcggtgcctgccctccacggcggccgcctgcggggaacagggcagcgtccagcaggcggaaggcgagtgaggcagagtgaagcacacagagccaaaccatatcaccgccaccccgtgtgactgaggtcagggcttgcctttgaggcccagggtcagctggggactagcaggagctctaatctcgcgctgcgtcagggcgggaactgcaagaggccgcccccggcaggccgcgcatgcgcactcccgcgcgcacgctcacccgcgctgacccggctacgctggacccaggtgcggggacccaggtgcgctggacccaggcgtgcgccaccgccacctcctgcgcctacaccccgagagcggccgccgccagcagtggcatccgggctgtcccaagtcatccttcgtctgtttcagtgtctttatgaagcactagctttgagggatgaaaacgtccacatggatgcagggtctgatgtttatggaaggtttgtgcccaatgcaatcagctgttggctcagcctgaagatcgctgggataatattcctggggtccgagtataatacgcccggcatacactttcccatgcattagggtttggaagttggataacaaatatattgttaatctaacagaaaaacaggactttaaaaatataagtgagtaatttgagagcactctcaaaacataatgttatctaaaacaaggaaatattgctttctcccagctgacctcatccttcccttgcaaaagaatatctgtctaggctcacactgcggaatccaagaaaaagtaaatatggcaagtactttccactcgggagcctgtgggagtgtggacgggaggggtgggctgtaggccacagagggcagctgcttctacttgaggggtacatggggcccctcggcaaacaagctgctgttagggcaaagaggactttcctcggcttcttggctaagcactaaaaacccgaatcagaaatgaaatgaatatgttttaactttaacttatgattatatttgagcttgcttggtatagtgatatgaagtgcaagcaaaagtccccaactcgcaagactgttccctcctaaatgtttctactagacttcgggatgctttgatgccagagtccccactcaggaatgcctgctccacagggaaaagcctcctgctctaccgtgaaccccaccggtccccttacccagtaggttcatgcgcagtaagtgctcagagctgcatggtgaacgagacagaaagacatgacaccctggaaggataatcctggaaggataaccctgtttagtttcccctatagaggacataacttagattcccgcaatgcaaggatcagaagaggctttcctattgacccagctcaaactcctcttttcccaagtaagggaaaggaggctcagacattttgagccactcacccagtttcacagagggaaacaaaggcaggccctgaactccgtcacacagtgggtctgatatggtttggctctgtgtccccacccaaatctcatcaagaattgtggaaggtgattggatcatgggggcggttgcccctgtgctgctcctgtgattatgagtgagttttcacaagagctgatggttttaaacggtggcacttctttgctctctgtctcacctgccaccatgtaagacctgccttgcttccccttcgccttctgccatgattgtaagtttcctgaggccttcccggccatgtggaactgtgaatcagttaaacctgttttgtttataaatgatccagtctcaagtagttctttaaagcagtgtcgaaacagatgaatccaggggcccagctgttctggggcctgtggattttgttcttactccctctcctatacagcataactcctgtcccttagggaaagccgtacacgcccaccagtctccctgatatactttagcatttggctactaatagtggagcaaggctcagggcaaggatcacatttagcttgactcaaagaaagcagatgccggagaagcccgtgcccgctttggctggggactctgaggaagtggagggagcgtttcacgggaatccggcaaattccatcacctcattcacattatctgtggctcactctgtgattatgaagttaaaccgattaaaccatttccaggtagcccactgcgtatatgtttacctatgcatgtaggtcccttatactctgtgcaaatgcccttacctacatgacacaggtgtc

SEQ ID NO: 1881844 - DNA, 4001 bp, Homo sapiens
cctcccaaagtgctgggattacaggcatgagccacttcgtctggcctgtaatcattttttataaggtgacgagaaattaggacttcatcctgagggagaggtagcaaaggtttattaagcaggagcctgacataaagtgagttgcatttttggaagataattctgtgggaagagagcaggattgggtggcaggtcatccaacgggtgaaggcaaagtgactgcctcacaggacatgtgacagccccgtggtggtggaagagagggaggtgagctaaatatttttgaaggtagactcaaaaggattttatgatctagaaaggaagtcataataaagaatcacaatgtatttttttctattatagatccctttaaaattaaacttagcatctactcatagatataattaagtagccaaaatattagtgttcttgattcactagaactaatttcatatcttgacaaataaggaaatatgagggttttattttttattattttacttgtatgaatttattgacattcgatcagaatgataaaaataggagaagctgaaaattcccataaactcttggggctacaagacagcactgttcactccaatccttgctgctgtacaaagagagcagacactgttccagtatctcactccatcaccagcaccagcccaacctccacacctgccatccctccagtggtgcaggtggagggctgggtgatgctgtgtaagcaaaaagaaactaggttcctttataaactcttattctttataatctataaatacagaatcttgttaatttgactcctattgacttgtgattatataagatgacttcacaatctacattttacttttttagtaaatatcaagtgtgttttatatttacaataaagctggaattaagaaacttgatctataattattttcagattaactgattaaatagcctggcaatctgtatgcatcagctaaaaactaccatgataaatttattaaagtagttaacttaaaaaatgtaaaaaaagtatttcatatatttattatgttaaaatataatagagcatgtattaaataattttatacatgtaaaaatttaaccttttgaaatccatatggcaacatatggggaaagctctaaagacagtcaaaacttgaatcattcaaaacatctcttaggcatttataaaaaggatctgttctcccagatgtgatgaaccaagcttccctggtggcattaccaatgagagcaaacaatttaaaaaattctaaacatctaacgtcagaggaaagaaagataaagaagttcatgaatttatgtataatatgtatataacacctctttccatgaaatgtttgacactgcttataacaaatatccatcaagataggaaaatatgtttacaattacaacatttttaccaaaaaacggtatacatcatgcatcgaccataaaagttagcattatttctgtgaatgagttgtgaacaggtatttatttatttatttatttatttatttacttactgagacagcgtctccttgtgtcacccaggctggagtgcagtggtgcaatctcagctcactgcaacctccactttccaggctcaagcaatcctcccacatcagcccctagtagctgggaccacaggcgtgcaccaccacaccaggctaatttttatattgtttgtagagatagcgttttgtcatgttgctcacggtggtctcaaactctgagttcaagccgtccacccaccttggcctccagagtgctgggattacaagtgtgagccactgtgcccagcctggagacagtgtgaacataccataaggatcgggttcctaatggccaatgagcagagaatgaaaataagtctgagttgtggctcaaggctgctccaacttggtcacaattggagtcctcctgtcctgtaaggggcagcaattctttttgataaggaaaaggcacattctggtggtgagctttcctttctgttttggggcctcagcacagtattctgttgctctgggggtttacagaatgtttggtgcataataaggcatttcatgtgacatcacgtcatacccagggacccactttataaaaacggagacgtgacggtggggacgtgaccacagcactaatctcaccacacatcacaccatcagaagcgtccagtccagaataatgggacagcctacgaagatacatctgctgggccagctcagaggtgatgtcctgtgaggatgaggggtcattttttaaaattcagtgtaggtgctaagtcaatgaccatttcatgtgctacatttccaacatataaaatcattaggtttcagcagaagtggcctcttcagtcatcatatccacttgtgaatgtgtgattttcatctagacagttgagatttctgtggattttagaagtcctgatttccaaaggatacactcagaattccactgaatgcaaaactccagtcaccacgtgggcagttcagactgcttgtgccaaaggaagggaaccctcttacagaatgactgattcccagtatggcatttcttgtgacaccacatcagactaaatggcccacttgatagaaagggaggtgctgcagtgcacatggcatgccaggccacctagaagaggtcctactgctgcagcaaggtagctgcccctgccttcagtagggtgtgccgtcacctctccatggagccggggagaaataagcttgacacatggtatccacgtgggtatttcttaggactttcttctccagttttagcagtgaatggaaccattccctgataagagcatgataaacacagactcagacctccagggacaggagctggttcatggcccaggcaaaccagaagagatgctgtccaagtgtgatgacagccttgtatggaaagaagggaaagatatgagcatcatttgaagatttgaggctggctgtagtggcagagactgtagttcattccaggaaatttcctctgctaagtttttccaggaggacatgctagcagcctcctgggtgagctgctcccaggtctcacatgtagtgaccctatcagagaggccacaacagtgggctttcaagggtgttgggctccacctcccagatccccttccagaacagaaggactccatttccctggctgccgaaaacattttgggctggtagatcttcaggaattgccttggctgagagtcaccttgcccaaggtcctgctgccttctgggcagccttgacaatgactggttaatgcagtagtatataggctctgtctcctcacaccaactctagaacgctcttagggggcattttagatataaggtctgctccctgtagggttagcagagatctcactggggctgcacctcaacccgtttcttcctctgcccgattctcctctcttcccctccattcataggtattggtcctgtgatcactccctaaaaaacttccaggatgttcatctgtatttcagaggctgcttcccagtgaatccaacctgtacattaggatttttaaaaacatctgacacaaatgaaaatgtgaaatctttatttttttaatcaaatgaatctatggctatgacataaccttttcaaaatgtataaaagaatatgttttctaaaacataattataaaattcatctctcttttagagagaaaaaaaagaactgagcctagccaggcagattagaatctaggggatggaaagaaaataagtcaaactctccatctcctccccacacgcccacacacaatttgcagagggattagctatttaaatgttaaatccagaaaaagaacaaaaagtagtttatttattagaacttggagttgcaaaaggccaagttaagtatgcaacaaaaacctaaaccagaaactatagaataaaagatttagagtcgtgtctacagaaatttgaaatcattatatgatgatattatccaaaatcaaataaaaaacaataaatgtgactcataaatgtta

SEQ ID NO: 1881845 - DNA, 4001 bp, Homo sapiens
tattttactgttctcacataactcaaatgtaaatatatttttagtggtctcaattacatgttataatggtaactcctagcaatttttacctttaaagtaaaacctggtaagttgttttaattatgtgctaggggcagccaaggtttgactccttccagcacaactaagggcgtggttagtaacatatgtctccgggccttaccagttgtgaagccagcaaattgaatcattctcaaaaagcattttatagccttaaaacatttagcaaacctagtatctgacgtgcataatttagtccacctatttaaattttgatgacatatgcatttcaccaaataatctttaaggctgtttttatttctcaaagattaaagtcatgagaactaaaagctaccacagcttttatctttccattaaaaaatatttgatccaagtgcttatttttctttaggccaattaattagagctgtttttataaacatcacaaatacaacacatatataactacacagccaggcagaagaaaactcagcagccacaaggtttttcatttgccagtctcctaataggattattgtcctccaggcggatccctttaagagacagggctaggaaaacatgctgcttctagggcgtaataaacaggcataattgggaagcaaaaacagattttgagagggatctatctgcttttaattcctggggttccatgaggaaaacagatttcttcccaaaaaggggtcagtggtgccttctgtttttctcaaggagtcccatgcaccccagagttaccttagagcctcacgtgcatgcatcaagagtggcaagacaaaatggagaaaaagaattcggccaactgagaaaaaaccctttttccagcaaaacaaaatccaagggggaaaaaaattaaataaataaaggcctttcaaatatgcctataacttggatatacacttttaattaagctgtgtgctctttaagaaaattgttttaaatcccttgttatctggttttagttatgccgagcagccaatatttctggctttcaaactttactaaaggctcagggaaagaaaaatccaaggctgttgaggggaaaagaatcaacaaattgcaaaggtcatccagatatcaaatcagaaggagtttattccttaagccaggattgaacccagctgccactgtaaaatggtggaggctaaacgaaacattgccatgaggttacaggtcacacttgaaagacgtaaaactagatggagacctgcggcaaagttgctactgaccatacagaaagccatgcaaagcacactagattggctacagattaaaatcaacctcatgaatcatttttaataattaaaactttacagagaatataaacagtgatccttataattcctggcctagtaaaatgtcttctaaaaggaaaaaaaaaaaacaaaactctcacttaaaagttaactgctggcagggtagagaaaggcagaaaagtttaaagtgcagagttggaaagatgcctgcaggaagaaaatcttattcttatggaaatgggttcctccagcagggcgaggaacttaagaggggagcagggagcctctggttcacctgtctatcccttaaaaacaggaaaaggctgatattcccgaccgctggaagagacaggagtggaggggagggaggtacaatttcccctactctcagaaaaagtccgacgacacaaaggcttagaaggtaaaggaaaaaaaggggcgtttttgttcgcatcttactcaccatttctcaagccccgtgtttgggtgccaaaatgttgcagaattgtgctccttagttcagctaatacctgggttcttttcacacgaccaggaatatttaggcacacgggcacattgaagggtcagtagagcagggctctattgggcaaaaaggaaaacaaacaaaaaactatttgcaaagcaagaggggttcctgctacatagcaccacctcacacattgattcccaggtcaccacaagagctcaagagggcaggctcctcccctttgcaaggcatgaattcctcatggctccacccacttgccccagtgagcatgtcaggctccagtccactgtgggcatgcccagacaagccctgggcaggttccctcatctgcacaaaagcatctaatgtaaacacttgtgaagaaggccagaaattctctagggacccctttttatctgcctaggcattttgctcccacttacactatttggaatttgctgagcttctttcattcgtaaatgtatgtcattgactgtactgcagattttgaaagtctttgggtatttagaagtatgccccaattttaactttgggtaccgaaattacaaatacgttagaccttttaatattgtccttcacgttttgaggtttccttatttttctgtttcaaagtatctctttagtctcattcattgttctgtgttctttatattggggaatggctattgatctattaatttgtaccattttctttatattcaaagttgattccttgtaggcaataagaagttagatctggctttttggacatactattttatgttcaacatattttcctactattattctttttttgctgttgaacttaataaatgtttaatttcagatattttatttttcatttaaaaaatttccatttgcttcctttgtaacattcctttgtctctgctaatatttactgaatgtccattacttgtttttgtttttgcttttttcctagccaaattgacagcagagtgtctagcaagacttgtagtcacctatgcttttccactctgtgaatgggaaaaaatatcccaaggaaaaaaaaaataatgcaaatcactttaataacagttgctttttcaaattttggcatctcttaaaaaaaactaacttgtttattttcagagttttcaattagggtatttttaatttactttttttactctaaaaaatgtatccaaagttccccgtctctacttagaaaaactacaaaaattagccaggcgcggtggcaagcgcctgtaatcccagctactcaggaggctgaggcaggagaatcacttgaacccaggcagcagaggttgaagtgagccgagatcttgccactgcactccaacctgggcgacagagtgagacaccgtctcaaaaaaaaaaaaagtattcaaagtttatagttacaattagtaggatggatggactatggggagctttcactgccaaagatgaaccagaatttcagggttgtatttttgcttttgtttttattttttgagattaactttaaaataactttattaagtctgctttctgatattccacttactataaaaaagaattttatccaaacaataaattaattttaatagacaggtttagaatatttgttatttagtgttcatataaagaaaacaaatatagattttatttagtcttcttgtcctattatacacatataaatatataattaaaataaagctctttaattttgttccatttgatcgtgtatttgtcttatagaaccctttctatttattgttttcttccttccattttgttgcaataatgaaacattgttatctatcatttactctctaagtactttgctggtataaggacaggttataaactttgtataaatacttatacttaactgatttcttaaactttaatttttttcgaagacatagaattatgtcatttaaattattttgtatcaggctttccaattttttacaacttagttgcttttatttaatttcatgatcaagttaataaaaattgagacatttcatacaattttatctttacatattatactgggctttgtagcatccattgaaataattaatgacattatcttaacatttttggaggtaatattaatacaatagatttctcctcattgatgcactgtctcacatgaagagagaatgctctatctctattactgatgcttcctcactgtaacactttgttac

SEQ ID NO: 1881846 - DNA, 4001 bp, Homo sapiens
atcctcaaagaagtctaattaataagtggagaatgacacaaacaacaagtcataatgcaatgtattaaatactatcatagacatattcacaaaatattatgggaacaaagaggaggaactgagtttcttactagtatcctatagcataatactatgctcatgttattataatttgatctcttctttggttctaaaatagattggtgaagcacctttctaaccataaacaggaaagaggagaaaaaaagtaatgaatatgaatgtacagaaggtgcctaaagtagaatcacagtgctgtgagcagtaacaagcagaagaacttaaaggataagctatgtacaaaatctccctgaaggcaggaaggcaggtggtggagtgaagttgagtcagcctccatcctgttaccatcagatggttctcaaatgcctggctggcatctggactgggagaacagcagatgaaaggacccagagtgggaggaaaatgaatcagtatgcgatcagcaaattgtaccttggattgggataggattcttataatttaaaaatgtgcctatattcaataactgcaactatttagagtaatggtagcctactgtattatcaggaagtggttaaagagtaaacatgttctggaggcagggagatacttgggatacagaaatgagcgtgctgagtaagaacacaattgcttcagaatgtgcaattcaacgctgaatacagggttccaaatgcagttaacatcaactaaagaatttagcgaaagggtgtagcagagtgtaagttggaattaaatatgggtccttggtctgatagagaacatttcaagcaagttcgttgtttatatctgacttagaaggcaatgagaaaccatacaagatacgatactgctttcttcacattttcaaaaatatctattttgatcaaaaggagttaggaagaacctgcatggtggactataacagataataatggaaggactattcggaccaaaaatagttaccagtttcattgtcctactatgtggaggggacagagctgagagaaggggaagagaataaggcattgagtggcgttctactactggtgtgtgccaaataccaatttcagcataaggactcaacccggaaggagccagctggagtccttatgctattcccgaggcctgaaacacgagtctagctggttcggcctcatctgtcaggtcacagctgcaatattacttcctcagggaagccctttctttcttcctcttctccatctccacccccttcccaaaagggcctcccgctataagctctcaaagttgtaattacatgtgtcttgtagttaactatttagagtctgtctccacgtccaggctccaaccaacctctcatcctcaaatgtcttcacaaggtcggtgatcttggcagttttactgaccaaagagtgggggctcatctccagcaccttgcagtattgacaggaaagtcactgagtagcaaatgaatgcatgaatgagctcgtgttgttaatattgccaggcccacaggaagcacccaacaaagagcaatgattggtgttcgcgttcattatctcatttaattcttacaaaaccacggcaaggattcaaccccacaactgctgtctagaaaaccgaggaaagtgacgcaacccgcgggaggtctgacggcccgagagccgcagcgccaggcccgggagccagccccgtccacttccccggtggattcttctccgttccccgccggccgccccaggtgaagctcctttccgccgtcagaaggaggctcccagcgggaagcagcatcgagggcgacccagggccagcacgggaaatgccagggaccgcgtcagccgagcctgctggaaccccgctcctcgctgcagacgccgttccgcctgaggacagtactcgggcatggggagtcaggtgcccgccacaggaacgcaagagaccgcgccggaccagcgaaaaagctccatgctctcctggttttccaacccgacgccgcggcctgcggccactctaggacgccggagggtcctcctctcagtggttggggctgggccgccctgcgccgggagccgcccaccttcgggctgggccgggcctggccagagtctgggctaagcgcagggcctgcatgaatcttcagcctgggaggtggggcaggagcacggagaagtctcgaagaagtggaggaagcacgcactggctgccgcgggaaaagctcagccagcaactgtatcagctttacattcgaccctcctttgctgcatggcaaaaagaaaataaactaccatttcttagttcgtgttttattttcagctatttcttgtttccttggtttcgattctaattattgctgtagacgccttcaggtggtggaagccaaggcaaggaacccctgaccgcaatttcctaacctttgggcagagtgtggggtgtggggactccccgcctgcctttccccgcccccccttcatagagacctaaaaacctttaaaaaggatctaacactagctctattatctaccctgtagcctactcaactaattaattcagacatttataattacacaccaaaaaaaaaagagagagagaaaaaaagttaaaccgttggaactacaaacattaaacatgagcagttcttagggccaaaatctctgaatgtgactgcgacagatcgcacttgaaacgcctgtatgaggtaaacggaaatggccagagaaaatgaactgacgggtatgtgtatttccaaatgtactactatcagctaaaaaagaaacttcaatgattaggtttattgaggtgacatgcaataattcttaaatgttctgcaattagaagtttctacgtcatgaaggcagtttagaagattacagcaaaatggtgaagcatgacttcttcatatgcttattcttcattcaaaagccgtttgcaggttccccagcttaaaaagaagcctaatttcacttattttgaagagtactctgataaatatgaataccgaaatcaaatgttgctttgtgtttagacagttatagatagaaaattctcgcatgggccagcaaagaggtatgggtaatttaagaagaaaaaaaaaaaagttgatgcccctggctggtgaaaaaccccaaggaattcactttcagctggaaattttagagctatttcgcaatacttattaacgagcttattgtattattcattttagaaatctgatttcgcaatcttttattcgtagtggctccctctaataacgtcctcattttatcgctatgtgcataatgatgttctttagtatatccaagagagtttttgatgttggaatttgcaatgactcaagtttcactccagcagcttgaaagagtgataatgaggtgctctcctttttttgtatctatactccccttccaggcatataatttcatttgaaagttgatattgttcttctagattttctattcagtaacgaaatggaaagcaatgattgttcccctaagaacaactaagttttctaaaagctatcataaggactttgtagcaaactctgaaggtatcatttgggaattttaacacaatatgcttgaaaaccagataaaagggaaggttctaaattaaaatgtgtggatgaaaatctataatctggcactaaatcagtagtgatatagtgggtggcaaatagaattgcaggaagaaagtgaagatctggttgcctggagcttgtaagattcaaccctagttcaacacagctctgtacttggaccacaaagacagaaagaaaaagggtgtctgaagctgagaagcccaagaagaataaaatactgaaaatagtaataacagtaagcaacacttatacagtgtttattaaatgccagccaccttgatagacattttacatgcattatgccatttaatcctcacaaccaccttgtgaacttggtgctgtcattgcccttgttttaaaactagattactaagacttagttaagtaa

SEQ ID NO: 1881847 - DNA, 4001 bp, Homo sapiens
gtattttattaatgtgtctgatagcctttgtttttcctcctctagaacctccaagttttctaattctcagctatgattttagatcattaaatcaccagtttctaatctccacaatacagttggaaacatttaggacagaatatcctttaggatattaagatgcagaagactgtacttcgaaggatatttatatagtagtgctgccacctaaagatgaggtgaatataaagaagcaattcaaaggaaatgacccatcacccttaagccagtctcattttctcacctccagctaggaattaataagcgtgttgctgttgttgttgtcattaacagggaagttgaactgtttcgcaatcacttatttctgagctttaatcctctgtgccagataatttcagactcaaaccttttctagtcctctgcgattcttctcagccatcaggcactgcctacaatacgtaagaggcagcaaaagatacttggaaaaaaacaattgagagatttctggtttagtgaataaagcaggcaataatagaccttagagttttccctttatcagtgatagactcctcacaatgctgaacaactgacttacattttgataactaaattttcatctgtaaaatgggagtaattataccttagtcctacttgcctcgcaggctcaactagatatgcttctgggaaagattctctaacaagtgagtttaaaagtctaccactgcctaacaaagagggattttgtggtatatttgcaaagtaacttcaaaacaaaatagttaaataggttgaggcaatgattaagttttcctaaatcacagtttgacttctcggaggtctatttaaataatgataaagatgataaatgcagtttttattttgctgcagttattagctgatccacgttccatctacgtattcagtgttgcaggatggagacgtgacagcgtagaaagcgagcaaaagcgttaccgtgcaccaaaaatcttgtcaaacttgatacgatttcaagaagactgtcttaaaggacattttataatttcacatttagcccttgcatagcattttatgaaaattaacttttaccctttccccctcggcccaaggaagtcgcattccctcaaaggggcccggcttcaacatattacactgcgtgggaggctgggcagcaaccccacgcttcctgtcaaggattcctggggccagagcctgaaaagtgctctagccactcttctctatgctaattctgtccttccgacccctcttggcgggtgtctgagggccaaggtgagactttccccggagatgaaaggcctattgcctcttcagagacccgggcggagttggggcgggggtgccgcgtgatagggtggtagcagaagtcgcaacgacgcacagggccctaagttggagctggcgcaggcccttcagggttctatccccgccagagcctggcttcggccttcagaagccaaacgagtaataggtccttctggggcgctgtgggcggtgggtggaggaagtgtgggcggagaggccacagacatccccctcctcagacgcgccccaaggcctggcccgcggaatgttgacgcgccaggagccgatagggcgcgctcacgcgcgagaagggggcggaaagagcgcgctcggcggccgccgcggcggcagctaaaacggagggacgcgagagcgaagggcgcgagccacggagttgggaggaggggtggggaacgcggagcgcgcgctgacgtcgcctggagtcacgcacggagcgccgggttacgcgccgacgtctggctgccacgacttgccgtctgcggcggcggcggcggcggcgagcggatcccgcaggggaaggaggaggaggagggagagccaagggggctgtgagtgagcgggagaagcagggtgtgagccggacttgcccatgggagggagagcgagcgagagccgagccagccatccgagccgcctcctcctcctcccctcggcgtcccgcccccgcccgccagcccgccctccttcctcctcagcccgcagagcctaagtgaggcgcagctcggctagcgccgctgtccaggacaggtgtgcgcgcgcgcgccctcctcccctccccccttcctcgcgcctgtctcgcgcgcgccctccctcccgccagcctgcgccctccctcacctgcggcaggacagcgcccgcccgcccgggtaagcccctcgcgaccttccctgctgccactgccacagctccaggtgacgctcgccccgtcccctttacttgctctctcagcccaggaataattatagtaccattgcagacatccccgcaccctccctcttggagacccaggcggtgcagcaacgttctctcccaccccccgcagcgagaaacgaatgaaccccctcctactttcaaaagagaacaaaataacacgccccttaagaaaagaggcgatcctacctccgcaggcgctggagaccaccagtgatgcgtttgcttagcaatccctgagccccatttcccctggccgccttcgccctggggcctgggactgtgcgctagacgtggctgacactccctgcacggcaaccctggaaggagggagaggaaggagagttctataacccaggcttcactgccaacccctcctctgttcggttccccccaccccactaccaccaaatgcatacacccgcccaggatgcgttgtaaaaacaaaacaaaaccaggaaaaaaaaaaaaaaaacctttggtgctgacatcgcagatgaagccgggcccaaagatgggtggcccgaacaaggcatttttactgccccacagcgctgggtcagctccacagctcctctgcctttgtccgagggcaaaaggaacggatgtgaagctgaggggtcttctctgtgagcggcggtgggccccggaggcgggctgtgatgtttgtaggggaaggcacccaaccaatatatctgccataaacctgaacttgggttggagagcccccagagactggctggggtaactggttcgtagctgtctaccccggaataaatgccaccttcttttccgcggtgtctgcgggaccctctgttgggggttctaattcgttttggcctgggctccttacatttctgtccggccaggcgcttttggacagcttttcgcagcggtgtctaagcttgtgttcggtgtccttggaagggaggtcccagagctttacaataggctggatttggtttgacatcttttggtggactgtcaaaggggaaaggaaatttttggattacttcaagatcccccaccgcccccgcccaactgacgtttgcgaattgcggctttggaaattggagtgttgactagagtgtggagagagagttgctgatttcattgctttgagtactagtaaaaccatttaagtatcagccggaagggagacagctattgacatttacatcggttctgtttggacctttggggtacataaaatgtcgggttctctgaattttttatcgaatttagaatgtctgctacatttatttaacttctgcaaatgcttaaaatgaaaacattttggaaatgcgaggatttttatcaagtggattgttctcttcatatattaaatgtttacttcatatctttaatccgaaacattaaaatagcattgaagaggcatgattttcaagattaagtgagctatggaaaaggaatacgcttttaaagaacgatctgggaaatgctgttactattagtcattgttgttgttaaatgttaagatttatttgagagtttctcaatttttttggtagacagtcatgagaagaaatggctaattcctccactttgaacatttacagtacaacatcccagttagttttaatgatttgggtattgaagatagttgtctggtttaagactggtatttaatctaagtatcacttgaaaacacaagctctaatgttctttattttggaaatttgtgattttgtaaaatattaatcaacata

SEQ ID NO: 1881848 - DNA, 4001 bp, Homo sapiens
atttaatgattgatcactcactttagttgcagcagagggtctcctacggatgcatcttatggcttccatataggtaatacaaaatatagagcttagtggcacacaaagccagcttactattcctggattgcccatcttaccatttcttctgattctgagttatgctgcagagaagaatcaacaaagccatcatctctctgctgccctttaattttcccttttgcttactttgctttatttcatcaacattttaaagatgatactgtaactccaaagtggaataattttcctgagatccttaaaagtcaatggtggaagcaggattcttctacttctccagactaagtcaaaggcactgtctataaaaacacaattcctccaacaaggctttcagtacataggatagccagcacttcagtgttcagtatatttgtttttgttttattattttttaaaaagtattttatttatttattttttttaagatggagtctcgctctgtcacccaggctggagtgcagtggtgcaatcttggttcactgcaacctctgcctcccaggttcaagcgattctcctgcctcagctttccaagtaactgggattacaagtgagccaccatgcccagctaattttgcatttttagtacagatggagtttcaccatgttggccaggctggtcttgaactcctgacctcaagtgatccacccacctcggcctcccagagtgttgggattacaggcatgagccacctcaccaggccatatttgtttttaatccttacaacaaccttgaagaaattacctatattgtttttaatttccattttaaagatgagataactgagtttcagaggttaagtatccttcttaaggtcacacagctaataaagcacctgggattgaaatttagctctgtcttctgacaaagcttgatcttaacccttgagctaactggatcagaattatatgaaatagctgtgccaccgcatgtgattatggtgtggtaagttagccattactctttagaccatttgaaatctcatgaagtcacatgccttggtccattgcttctttcatttcctattaagaaaactagccaaacctcttagtctgtaacattatgatgccctttgtaatgccaaaatgatttctaccaattccaaattgcttctgttctctgaactattaccttggaggcagcctgagaagtaggaagatatggtataatatctagcatgctgttcttccttgatgtcttccagcaggtctaatagtaccacaggcacaccatcagtcagccataacgtgtaccagaacatacacacacacaaagggaataaagagaggccttggtggaataagcacgtccagaacacgtccattcactgatgtactttggcagcaagcatacagtactgtcttctctagctctcatttgcccagagaattcaacactactcaggtacataaaaaaccacaattatgttagagattcctatttgaagaaaagcttctcaaggacaaagcattacaatgaatcagtctacatggcatggcattaaacacaagatgcaggcaaagacttcaaggtcatggcaaggagacagggaaagcattggaaaagcttggctctcatgaatgtgttagtgtctttcatgaacccattagttaattaattattaagataatagttaattcttatgcaattttttttttcttaaatgccctcttttctttctaagaagagtaacgtcaggtttaagcaattgatttaaaagtaaactgtctctgggccaggcacggtggctcatgcctataatcccagcactttgggaagcagaggcaggaagatcgcttgaggccaggagtttgagactagcctaggcaacatagtgagatcctgtattaacaaaaaatttaaacattatgtggtcccagctacttacaaggctgatgtgggaggcccaggagatcgagactatagtgagctgtgatcacaccactgcattccagcctgggtgaagtgagaccctgtgtcaaaaaataaaaaaatgaaattaattaattaattaattaaactgcttctggagtattaaactttaaaataatttattttgaaagcaaaattaaatcacaaggatttcctcctttgtttcattataggctttgcagactagtactgaatggaaaggcacatttgaaggaatgagcagaaaaggagaacagtagtatgccacgattaatgcattcaggaaggaacacagttactggtgtgggtgcgcacagactcctccagtctcctgccaaagagaaccctgaacttagaaactcaatgctttgccttttgcttccaaaaattatttcttgcagtattgacaatgaagccaatatacataaaaggaattgtggtcaggttagagagaaaagaaaaaaacagactgatgtgttccgtattgtcacagaataaacagatcaataaaacagaggagagctcagaggcagagtcatgtatagaaggcattttatgtaggttaagggttggctccacctcactggagaaaagaatgaattgtttagcagatgtttttggaaacctggttaaacagatggacataatctcaatttaaccccacatacaaaagatagactaacaatgggtaaaagacccaaacatgaaagggaatgctataaagtttactgaagctgtggcttcttgattttgtggtaggaaaggacttttttaacttcagcagcaccagcccttaggtttaaagttggtggaagagattacatcaaatccaaggatttttgttcaaccagggacatcatggacaacgttgacaggtagcaaagtaggaaaagcacatcaggcatattgggatgatttcctgttagaggaaggaacaggaattagttaagagggattaaaagaaataattaaatagagagaggaacgctgttgtggaccaatgatgataatacagggtaccgtgaactgaggaatcaggtccattcaacccttgtaccttgagtaccatgataataagttgggagaatctcaggcatttggtgaaaaaaggcttctaaacagcgaagaagtgaaggataaataattatatgggtacttttacaagtgttatggatcatgctttggacatttagtattcaaaataagtagaaaatggactcccttttcaaatactttatgccactgaatcaggcttctttaaatatgacacttcaggacagtggctcatccccagcccccactgacaatgtattttgtgttatttaacagacactgaagtaggctccaaaggtgcacaatccaatgagacagtttccttccttcaaggaactccgactagtgggagagagaatgaaaacagcagcagcagcagcagccaacacttacataatgcttactatgtgcccagcactgttctaatgtacgacattaactattaatctcaataatccagaaggttgatgatgtagctatttgtttcctacctataaaatggggtaaataagttactgagatgttaagtagcatgcctaaggtcacagaactagaaagagggaaagccaagattcaagcccaggcagactggcatctgtgctcttaaccactatacacaaaacagtatggtaaatgccaacagaaatatgcagaagactggcacttcactcacaaaaaggagggcactcccctcaaattaagaacagttaagaaatgtttctatacagtgtgctctgtgatttcaaacgttattgtttgttttaaatctataagttaagttggggagaattcacatctctacagtctttccatccatgaacatcatatctctgtatttttctaggtttttaacttctctcaaaatcttaaagttataacaattattcttaggtgcttttaaagtttctactttaaaggtcatttaaaaaaacatattcaaaaacacatttcctaactttgttgctaagtaactagaaat

SEQ ID NO: 1881849 - DNA, 4001 bp, Homo sapiens
attattcaaagggtacaaactttctttttttttttttttaaagagccaaggtcttgctgtgtcacccaggctggagtgcagtggggtaatcatagttcacttcagccttgaactcctggggtcaagagatcttcctacctcagcctcctgagtagctgagactactggtgcacaccaccatacctggatagtttttttaatttttgtaaggatgggatgtcattgttacccacgctggtctcaaactcctggtctcaagtgaccctcccacctcagcctcccaaagtgccgggattacaggcatgagccaccacactcagccaaactttaagttctcaaataaataagttcaggtttaatgtccagcttggtgaccataattagtaataatgtattgtgtacttgaaatttgctaagagagtagatcttaagtgttctcaccagggaaacagaggtaaccacgtgaggtgatggatgttagcttgattgtggtaataatttcacagtatatatcaaaatatcatgttgtaaaaaatatatacaatttttatgtgttaatcatacctcaataaagggtgcgggggaggatattgcctccaaatcagggtctattcacacatttcccctgaggagattccctccagcctggccagctcactgttcagccccgggtgctgcccctgaggatgcagcttctggggatggctgaggatggctggctacactggaggcaggaggctgatggttcagtgatgtctttgatccctacatctatattactgcattgttccactcactggaataagaactttgattcctatttaaaccagggctttagaggatatttaaaagaaataatgggaattcccaacatggaaacattactttttactgaaagcacagttcacagacagggggataaaaggaagttagatctgattcctgagtgtcctacctatttacattttggaatccagtaatgtaagtacatttatgcttgtgtttaaaatatgagcatagaaacaacacctagaaaacacatgtatttaaatctaagttgaagataagatggaatttattggagggcaacagcagtgaccaaaaaaaaaaaagcaagagaccaattcaacacattagacctggtcaaataactacctcacgcgcagctacaattacctgaacgccaacaacaaaatgctgtgacgattcagtcttcatcataattactcatcttctatagacgatacagtcttaaagcataggaaagaatgtatgtacaaagaagcacggaaaatgacacggtgtagaagatgatgactactccagtgaatgccataggtggagccaattttctaactggagtaaaatgaactaaattcagaatcaaattgaaatgtagaggaatatttatttttctcaccttaatgctttcctttaagcaggtttagttttcattcatttcactgatctaaggttaataaattcattatttcagcaccctatgaagaagaaacacatctttttttttaattattcttcctcaataaaagcatatctggaatcctattttctgagtgagctggcacacggggtgggggaggggaaaactgggagtgtgttggggaaagcgagggcaggagggatgacaaatctgaccctacccgacagtgctgcctgtcctgtagcatcccaacccttacagtggtcacccatgtgtagttaatcagattaaaagcctctgagaaacccctttgaatctctgtcaaacaaagacatggaataaacaagaaaaagcaggaaggttataatgctgcacgtgggttagtaatagaagcaaatgcaaacgcccaggtacctcagagacttacccgtacctgtcaggggtctgaaagatttcctgtggccctggcagtctggatttaaggcaggcttaggggaattagtaaacaaaacacagctgagggtcttttgccataaactgaacaaccaaggaaatgaaagtaaggccacggcaaagttgtctcagcggtgtcactggctgccatggggcagccctgcggtggaagggcctgaccggcccgggccagggtgacatctcgggatgtgatctgagccgtccttgtgtgcagatccatgtgtttggagaacagggtctgtctgttatgtgaacacagagggcattgagcccaaagcctcatatacattaaaaatataatgagagagatttttatcttccatgaatatttaattcttctgaaagccaaccatctgcatatcacaatgccccgatgcatgtgtgtgattttctctgttgtctttcaaaataaagcagaccatttcactcttcctgtgatgccttgaaagttgcttaaatgtgcattgatcactttgatctaatgagtgtgtgtattttaaaacaaagtcagcactgttgctctaatctatttgtgtgaaggaaacagaacaatggggggaaaccaggtcgggtttcatcgttttcctggtggcctgtatcacaattcactgccgttttgaatgctgtttaatttttgctgatgtctttttatcttaggcttcatgtgaatttaaaaagagtttcattgatatgcaacctactgtgtattatgatatcctgcctgccctgttgcactgtggaagcctgcagctgcctgaagcctaattatgcatgcatgcatgccaagcccagatgctcggccaagagtgcctcaaccgactacagtttctcacttgtttttgtttgaattataattgggcagatctatatttctcaacccatcttgtagcttcagcatgctcctctttgcctctgttgctacctctgcttgagtcagcttcttcatgaaggagtcccttgccaatctgaagtgcctctgagatctgagaagggtcattcatgggtttgacaaatccttttacctacaccgcattttaaaaggtacaaaaatgaccctagccccaatcagatttcctccagatggttggtagcttaaaaaaaaaaaaaaaagaatagttaactagaagctggcatctgggtagaaacaaagaaggcttagagccaggcatctacaatggagaggaatatcagaactaaagctttacacctgctgaaggaaggtaatggagactagcaaaaacagatttgttaagcatgtgcattcactattcagagagccttttgtgaactgttttccaggctacctacgggacctcagtcttcaagaataacaaagcctcatctgagagtgtgaaactgggtatggcatcgcactaaatgtggtgttactctgagtcacccttcatctggagatgtacacatagagtaaccctctcatataggatggcagctgctagttatagtacttatttcttttttttacaactttaaaaaatttcttgagatgtgatttcactatgctgcccaggctggcctcaaactcctggcctcgggagctcccaagtaactggaactacaggcacacaccaccatgccaggccatacggtatttatttctgaggtactatcagagacactgtattgttttttaaatggagcatcaaattaagcacacagattaatttcattgaaaatcgtgggatattttttgatcctgaagcttaaaaaaaagtggtgaaattatattgaagcttcaagagtaagcaggaatttataataagataattctccatgacaatcttaagacataaaatcattgggtgagcatttgtcattcaattagactacttctgtttgaagagtaattcttaacaactaacattttcatccaacatgctggtaaagaaacaatttttctgacatttgttaaaatggctaggtagactttattcagggctattgtgataaaagtagatactgctgcaatacagttttgtagtaggggagagagattgggctcaacattgaatataaggaaaagtgaagatttatagtgaggtgggacactgaatggaaaattgctaag

SEQ ID NO: 1881850 - DNA, 4001 bp, Homo sapiens
ggcagaactgtgagaaaatatatttctactgtttgagccacccaatctatgtattttgttatggcagcctgagctgactaacacactattctactaaaaaagtcaagtatgtctaacagccaaaaaaggtcctaaacattctgatctactacatcccatatcctaagctctctgatgtaattgcctttgattcttcacatctcttaagcaagttccagccaaactggcttacatgcaattccgtgagcatgctaagcatgctcctgcctttgggtctttggtttccctctgcttcagacactttttttcccaagaactcatatcactcacttccttactcaaatatcaccttctcagtgaggccatcctatggaaaattttatgatcctcatttcacacaaatatcccatttccctttccttagtactcactgcttggatgctatgtattttacctatttatcttgtctattgtttctctttctcactagaaagaactccatgagagatgggattgtccgttttgctcactgctatatcccgtaaatacagagtagctcatagtacctgttcagtatttattcaactaaatgaatgttgaattccaatagtggcagaattcgttgtggagctgaaaggtactgcacggatcaactactaatgcagcaattccctagtagaaaactgcactgcttaaaggaccacctcatttttctggcctcctctggttattactaaagctcaaaaggagctttaaaaatcctgatgcaacagctgttttcccctctcaccgtctttaaaaatagagataataaaatagcctgaaaagttgtcaagttcaagtaagatcatgtttatgacaattttttgaaaattgcctggttgcagcttttacttacagcattttcaaacagttctgccaactctgtggctctttcatcatgtttcaagtgttcagcaaacgatggtgttcgtctccataaagtcaaagtttaaaaatacaagggccgggcgcggtggctcatgcctgtaatcccagcacttggagaggcggaggtgggcggatcacgaggtcaggagatcgagaccatcctggctaacacggtgaaaccccgactctactaaaaatacaaaaaattagcagggcgtgatggcgggcgcctgtagtcccaactactcaggaggctgaggcaggaggagaatggcgtgaacccaggaggcggagtttgcagtgagccaagatcgcacccctgcactacagcttgggcgacagagcgagactccgtctcaaaaaaaaaaaaaaaaagtacataaataaaaaccaagtaattggaggacgccattcattgattttacttaggactttgggcataatctataggtttaaaaatttctgctgctaagaaagtgggaacacagttatattcccttacattttaccgaagagaaactagacctgcagaggagtacctttctgtttctatataagcagaggaattctgcacaacccaaatcacgcagaaacctcctggtaaggactccacgggtagttattgccggcattgtattctgagagatgagctgcatatcacttttggaaatgccttaaattaaaactcgtcttgaaacaacatgacgtctcaaagaagctcccttctcaccttggaacatcagcttttaaaataaaggtgtcatcagaagtgtgtagacacccactgcatcacaactggaactgatctctggttatgccaatctaggtctgcctggcagggtgagtctaccgctcgaaagctgcacagaggaaatcctccctcctccaggttcaggcccggagttacgagcggagattcgcggcggcgggtcagagcccagagcaaaccaggctggggaacgcacctcgcccgcggctccggaagcggctgcggccccgaccggaaagcccccagcatcgcccgaaggaatcgcggctggcctgcggctccggcccggcctcgggtaccacgcgcctagtgggaagccgcactgacgcctgcagcatctcgcgagatttcgggctcagcccaagtactgcgagttcaccaaagcggggggaaaaaaaaaaagccagcgtgcgagagcctctgaagccgtggctggggcgctggggtggcagctgccgcgggagcatcagctaccggcgtgaggcgaggcagggcacgcgcgccgtccgcagccccgttgcctgggctgcaggtccactgacgcgcggcccctgggtggagagaggggaggtggcctgggagcccgctccttttcgccgcagagcgcggcgggggagggaggtgaaggcgtgggaggaaggcggcggaagaggaggtagccgcgcggagatcctcccggcgacatcactgaggcggagcgtagccgcgcctgctccccgatcgcgccgttcgtgctgcccgcactgcccgaggccctttgcggactggctggccgcgctcttcgcacggggcgcttttgcgtggggtcgcgcaggagccgcggagggccggatcgctgagggagcgtcagccgcgcgccgctgcgggaccgcgggtgggcgggctgaggggcggaggagcctccggccccgcctcccgcgtgctgctgccggagccgccgccgccgcagccccgccgaggctttaaacagcggggcccgccccgcgcccgccacactcgcgcgctcgctcggctgccggtggcctctgtggccgtccaggctagcggcggcccgcaggcggcggggagaaagactctctcacctggtcttgcggctgtggccaccgccggccaggggtgtggagggcgtgctgccggagacgtccgccgggctctgcagttccgccgggggtcgggcagctatggagccgcggcccacggcgccctcctccggcgccccgggactggccggggtcggggagacgccgtcagccgctgcgctggccgcagccagggtggaactgcccggcacggctgtgccctcggtgccggaggatgctgcgcccgcgagccgggacggcggcggggtccgcgatgagggccccgcggcggccggggacgggctgggcagacccttggggcccaccccgagccagagccgtttccaggtggacctggtttccgagaacgccgggcgggccgctgctgcggcggcggcggcggcggcggcagcggcggcggctggtgctggggcgggggccaagcagacccccgcggacggggaagccagcggcgagagcgagccggctaaaggcagcgaggaagccaagggccgcttccgcgtgaacttcgtggacccagctgcctcctcgtcggctgaagacagcctgtcagatgctgccggggtcggagtcgacgggcccaacgtgagcttccagaacggcggggacacggtgctgagcgagggcagcagcctgcactccggcggcggcggcggcagtgggcaccaccagcactactattatgatacccacaccaacacctactacctgcgcaccttcggccacaacaccatggacgctgtgcccaggatcgatcactaccggcacacagccgcgcagctgggcgagaagctgctccggcctagcctggcggagctccacgacgagctggaaaaggtgagctcgcccagccctcccttcttccccagcccctggtgcatgccgaccgcgggatgtggctgcagactcttcccgagttgaggtggcgggagtagtagacgtgcacgacttgctggcatctctggattcagctgtcaagggtggaattgccgaggaatgttaacttaatctctcaaaagtttgtagcgggtttggctagttacgtgataccggagggctgcctctaacaaccttccccatccagttaggtatctcgtgtgcactttctttcccacccacgctcaacagtcaccatccctctgaatgacagtagtgtttgtgggccctttagaggagaatgtgcagtgaggatctctcgagag

SEQ ID NO: 1881851 - DNA, 4001 bp, Homo sapiens
ttctaaagccctaggagtaaggcttgatctgcctgactttaaaaaacagagatgagaagatagttcgaccacaacagcaccaaactgagactttgtccctaacataatcggaaagaccgaaaaagagttgggaggacattgtgttgctccgtgatacagtgttatttaaagtcgtgtccaggtgtcagctaaaatcgactctcctttgtccaacattttcacggacactgatccaaaccaatttagcacaggtttccagggacctctgggtaataatgcccctcagctgccctacagatgacaagattctggacagaaacccagctcccctaacccacagccctggcccaaggacaagatatgggcattcctttggtgtttcaaataaaaacacagtgaaatcaatatgttctccaagaccggctggtggaggctgttcacctgcggagaaggggcctggtcatccggttcctgaatgcctttgccacactagaatgttttatggttctaaagttcccaccttagaaaatcacccactaagaagccaagctctgaaaacgttttgatttttctagagggaaatggaaagtgaaaaatggaattcaattaccttgaaaaggggcaatttcactcacaactgttacacttaaaagctccatatgaaacaggcattcaaataagtctcagcctaagttaaaagaaaaaggggaaaaagaaaatcatgtattaatcctcttccctctactccttctgacctagtgagtcttccttagactcaaaaaagatagatggacttgaaacacgattaaataagcatgttaggactttaataatccaagccgcaggagtttctattaaaagttgggtatttagaagaaccatttggttaaccagtctagtgacacagaaaccaccatgtgagggaggctcttctgagcagagctgaagcagggactccctgcttttctctcagagatttgggggtaaagttaccatcagacccttcagttcagctgaaaactctgagatgcccaatacactcccattttctacttcaaggaaacttcactaaaacagaggaaaagataatagccttgattgaaatagaaaggcgttacagaaactgacaccaaacaacacaacagacatcatcatcccatcataaccatgacgcgctcattctttctttacatcttcattcctgctaggtcaaggcaagccgtagaagtggttttgtgaccaccatgatggtttcccaaggcaaatttagacagcatattttctcctaccacaaaaaactccagccagactctccagtggttgaattcctattcctcaagttaccagctgtggaactctgtgcctcagtttccccatctgtaaaatggagataacagtagcatctacctcataagattgctgtaaatattaaatgagatagtgcttagcacaatgcatggcacatagcaagcacttggtggccgatcaatggcaaatacgaacactggctcgagcttactgccatggtttatcttagcagctcctgacttgcctgttgagaaaaaatgctcctaaactcagaagtattcagaaaacctacagcaaggtggtgagagactagactcttcaaacctctgaggtgcttttctgtcctcattccagttttctgcccatcacattggccaaagagctctagccagagttgaagccagtgctgatcactttcctgacaacctggctggcagagatgggaccgtatgtagcacagggaagaggtgtgttttcagacagcttcctctcggaaatccattttgactgtagatccaaagaaaatccttccaggcttcttgtgcacacgccaaaacctgcacacatgtatgcatttcttcctctctgtgcatctctcctgcacatctgggcaaaaaccaatctctgcaggtagcatcttgtgcatatagctgtccggccctatgataaaatgcattgtttctctctgagtgaagcttaatgcacctcagcctggggatttatactaagcaataaaatccacaggatagagaaatgcaaatagattgtagaatataatattatcattgtcaacataaaagacttttatttactgccccccaaaagaaaatacaccatagtgtcgtttgtttcagggaatgcaaaaaaggtttcaacaactaacagggcatgtttctgagcaaaatataccccgtatataatgttggaacacatattgtcagtggccactcgtgtgtctgtgttcttgcaaacaaacctgtggaattgagtcatggaaggtcacttccagccacctctctgagccacacggcacctacctggctctgttcacaaacaaaccagacaatatagacctatttgaagggagagaccctctgaggcaggccacactccatcagcacatcttagaatgaggcatttgagtagttgctgacttggcttactggggaatggagttgtggtggaggttgattaaacagatggtccatgttgctttgggcaaagggaaaagttaaagagaagatgtagcagagcacatgggaggtgacaactccatcttttctctagaagatatccctacaactcccccttaatgctcaaggtcattccaccaatgcttttgttgcacagggtattgacaacttacaagaccaattattttcactgatttgtttgaatgataagtctgttgttttgtgtaggggtttggctatgatatcagacccagtcacagcaattgtttcatttctgtctacaagggcaagatctaagtttataaggctttaaacagccataattacctgaatgacattttatgtgaaaaatatattctaactggttctcccaatagccctaggaaatataccctaggtgttattacggccaatttacaggtgagaaaaccgagacttcagagaggtgaagcacattatccatggccacccagcctgtaggagggtggctccagaggcctcagtcctgagcccgagcctgtcctgcttaagcttacatcaggaaagcccttacgtggcctgtgctgggtgctctgtcatggggacatctcacaggtttggtaggttttatcactcctattttacaggtgaggaaactgatacttaaaagaggaaaagtgtctgcccaagtcacacagatgtatatagcttgactggattcgaacctaagtcctgactccaccggctgtgtggtataaaaggagagcttgaaggtgtcatcattatcccctttacaggccaccacaacccctatcactgagggagttttataagtttcagcaaccacatcagtaatctcattttgcatccacaaatttctattttgtccttgcagctcacttggacagggaatgtcccgcatgtttgaaaagatggttcagaaaggagcctttggcaatccccagggtttctgcacccaagatggactggagggatcatgacaaccagttgcaatcaaagaaaagaggaaaccatatccgagagtggaagctgttttcttgctttcagggatcaaatgtcatgaccccccaactcagtcctaatgcatcctccacagacatactcttgagctctcacaatccacccttcaagtcatgatggggctcaagaccttcactgggcttcattatcacagagcaaacagggtgaagaggactcatttattgaagcaacagatattggtgaccaatgaaattgatgaccaccatgacctaggctgggcattcagtggagagtaacacaggcaacttccctgacatctggggcttacagataatggaggaaacacaaaagaatcagataaacagataggccagaccagagagtgctaagcagacattaaaacaaggaagtcaacatcaaatgcagagcccagagaagccttccttggagaggtgacactgagctgaggcccgacttgccctggaaagaccttgggacacattccaggagggagggtgc

SEQ ID NO: 1881852 - DNA, 4001 bp, Homo sapiens
caccaacagtgtaaaagtgttcctatttctccacatcctctccagcacctgttgtttcctgactttttaatgatcaccattctaactggcatgagatggtacctcattgtggttttgatttgcatttctctgatggccagtgatgatgagcatttttttcatgtgtctgttggctgcataaatgtattcttttgagaagtgtctgttcatatactttgcccactttttaatggggttgactttttcttgtaaatttgtttaagttcttcgtagattctggatattagccttttgtcagatggacagattgccaaaattttctcccattctgtaggttgcctgttcattctgatggtagtttcttttgctatgcagaagctctttagtttaattagatcccatttgtcaattttggcttctgttgccattgcttttggtgttttagacatgaagtccttgcccaagcctatgtcctgaatggtattgcctaggttttcttctagggtttttatggttttagttctaacatttaagtctttaatccatcttgaattaatttttgtataagatgtaaggaagggatccagtttcagctttctacatatggctaggcagttttccaagcaccatttattaaatagggaatcgtttccccatttcttgtttttgtcaggtttgtcaaagatcagatggttgtagatgtgtggtattatttctgagggctctgttctgttccattggtctatatctgtgttttgcttactgtagccttgcagtatagtttgaagtcaggtagcgtgatgcctccagctttgctcttttggcttaggattgtcttggcaatgtgggctcttttttgaactttaaagtagttttttcccattctgtgaaaaaagtcatcagtagcttgatggggatggcattgaatctataaattaccttgggcaatatggccattttcatgatattgattcttcctatccatgagcataaaatgttcttccctttgttagttgcatacatttctaaagtattttttgtttaaagacttaatgaaattatattagatcagtttgattttccaaaggatacagacaaatgcatttttcaatgtaaaaacaaccctacagtacttttggtaaacatgtataatgtacctctgttttagcatgtgttcctttaagaacaatgtattattttgttggttttgccgataaaatcataaagaattataacaaaatgaaagttcaaaataaaatgcatgtttgtatgcttacagacggaaaactctgtcattttggctagttatcaatcaaaaaatattcattggtttttctatatggagcccagctttctaattaggtcctacatggatacagagcaaatgcagtaggtgttcttacattcaggaatcattgtaaataaaataggacttaagttagttcttgaatcattagttataattcttaaataaaagtacctcatacagattggaattggtggtagcagcttacttttcccatgatcagtataagacaattgttaatatttaattttgaagaaaataaaatgcctcacttttattcctctaagacacatcattctctgtaagaagaggtttataaattacgtaataggtcacaggtaacttctcttcatccttatgaattgagaattacaccactggatgcaatagagttactctggaaaattaaataacctttgtattaaaaagaaaatattctctattgttgtagtacactaagcaaaatgacttgatttcattttttattcttactgcttacctcaagagcagtctattgctgagacgtgacagcgtgctggcaggcagccctcgctcgctctcggcgcctcctctgcctgggctcccactttggtggcacttgaggagtccttcagcccgccgctgcactgtgggagccccttcctgggctggcagaggccggagccggctccctcagcttgcaaggcggtgtggagggagaggcgcaggcgggaaccagggctgcgcgcggcgcttccgggccagcgtgagttccgggtgggcgtggactcggcgggcccggcactcagagcggcctgctggccccgcctgccctgggcagtgaagggcttagcacctggtccagcagctgctgtgctcgagttctcgcggggccttagctgcctccccgcggggcagggcttgggacctgcagcccgccatgcctgagcttccccccgcccccgccgtgggctcctgtgcggcccgagcctccccgacgagcgccgccccctgctccacgatgcccagtcccatcgaccacccaagggctgaggagtgcgggctcacggtgagtggtgacagcgtgctggcagtcctcacagccctcgctcggcgcctcctctgcctgggctcccactttggcggcacttgaggagcccttcagcccaccgctgcactatgggagcccctttctgggctggccaaggccagagccggctccctcagcttgcagggaggtgtggagggagaggcgcgagcgggaaccggggctgcgcccggcgcttgcgggccagctggagttccgggtgggcgtgggcttggtgggccccgcactcggagcggccggctggccctgctggccccgggcaatgaggggcttagcacccgggccagtggctgcggagggtgtactgggtcccccagcagtgccagcccaccggcgctgcactcgatttctcgccaggccttagctgccttcccgcggggcagggttcgggacctgcagcccgccatgcctgagcgtcccaccccctccatgggcttctgtgctgccggagccgccccggcgagcgccaccccctgctccacggcgcccagtcccgtcgaccacccaagggctgaggagtgtcctctcttagcacataaaaaaatcaaacaattttagtttcttagggacggctgatggttgtacattgcacttacattggagagaaaaacaataaaccatttcaagagaactcagaaccagattatttttaatcacataaataagctctgaggaagttcactgaagcaggaaaaaaaacacttgatgtgaacacccacctatgaattgcagcaaataattatggctaacaaggattccaattgtacatgtgcccagatagaggtatttatataaataatggaaattagcataaaccatctgaaatttgtaatcattgctaactattagttactctacagtctttccactttgtaagcaattcataacaagctggaattcatgggatttacatgtcctctgtggatttattttctacgaaaaataatgcaacccccatattctctctttaaaatgattttgactcatcacaatttagttagaattagcagagtaggaaaacaattatattcacgattaaaatttcaaactaggcaaatatcagctgtttttcacgcaagaactcataggaagatggtaagcaatagaaacaaacagtagtttatttcattgaacataagtgctcaagagagaaacaaaatgtcaatttcttaaaatatttctcttgactttagaacgtaaaagaatgtcctataaaaataggtcatctgcctatgtggagctccttgtccttaaagatgccttacaggctttgctctagcaatatccaatgaatagccacaatgagagtgtcaccatgctcactctcaaatcgatcttaattacttaaatgcagagagaagttaaaggatcacatgattttcatacagcttggtaactctttcttttaagggaagaaatgctatgtacaggagctatgctagactcttgagtctagtgcatgtatattactctgaatactaggcaatgcttattacttagagccctaggtacttttcagaaactataaccatgttgaatttgtaaaatatggacaacttcaacaattaagaacattttagattttctctcatattgtgtttgaatact

SEQ ID NO: 1881853 - DNA, 4001 bp, Homo sapiens
tctgaagctgtcagttcagcagccagtaaaaaacctgaagcctaataatcatgtgtgtgaccttagtggatcctttggactcacttaagtcttggtatgtctgcagctctcgctaacagcttatgtgaaacctcattagagactttgagtcacagaaatccaggcaaaccacttccaaatttctgaccacagaaagtgtgagaatataaatcttggttgttttcagtcgttaagttttggagtaatttgttattcagcaaaacatggtttaattgtattacatagaggtataagtatctcctcatatatatttattttaataaaacagcttgaaccctggtattcaaggctgcagtgagccaagattgcaccactacactccaggctggatgacagagtgagatcctccctcttaaaaaatacatatataaaaagaaaaagaagcaaaaatgtttttattaaaaataattaacagaaaattatttctgggaattttatctctcatttgcagagcatactcctctttccactttaatttctagataaagactactaaaatgtcttatttatcttttttataagtcttatgttagtgtatcatggtcttaatatagagtaggcataacaaaagttgcttcactatgggccatgctttaggtaagagtttttaacctcagcactactgacattttaggccagaaaactggctaattatttgttgtaggagagttgtatggaggattgtaggatatttagctgcaatgctggcatttacacactagatatcaacaccatccctccctccaaggtctgacaatcaaaattgtctccagaagtggtcaaatgtttccaagaggagcagacaaaattgcacctgtttaatgttttaatgtcctgtattatgggcaaaaagagggattttatttgcaagtaataatttgaacagggttgagtgatgttcttggcagatggcacatcctttctgctgaacctgttaatgtcagcctgagatggactatgacctccacaaaggtagcactcagtgatatgtctgtgattgtgccatagctcccactcactctttgaggcaatcaatcattgctgatcatggtcctggacagtctatatgtgtgtgtgtgtgtgtgagtgtgtgtgtgtgtgtgtgtgtattttttgtttgtttctttgtttgttttccccagggtctcacaaaactttctaatcttttgggacctgtttctagtctataatagcggagtcagatttatctgtttttattttctttcaaatgtattctttctaatataagcttctccttttggggcttagccatttaaattctgagttaacaagcttgtacaagccaaaaccttatgctttcaagcttaaattctctccaaaaagttaaagaagtttgtttttatttttacttctgttctgtgcatatgatttatcactctgatctattttaatgtgaatagcaatgtaaaataagtggtagtagttgacagggaaataaatccctagtagttagtatatcaaaatattccctcactacaaatttaaacagattatttcaaagtattggaaaaaatataatatttcagtgttgtatgtctgtgaaatctgggtcacattattatgaagccatgactcataagatttagtctctaaggatggttgctattttgcagcatgatttacaactgaaaattaattaaaaggagattctattcttttatatgttacggaggccactacagatggtccaaatcattaactgtctagcaaattttctaatatttccttttaattttcaagcatggagagagatacatatctcttcctcaatttggtttaataacttcttttccttttcccctcattctttcttatagaatttttaagaacaaaagggcttacctccaaaaaggggcaacactttcctatatgttgtgaagaaaaagaaacagcttcagcgagattgccatcctctttcagtccaggttgaagggaaaggctcagcacataaaagcactagcaatctgtgctgagtgctgagagaacaccagaaaggaagttctccatctgtgtaaggggaggagggaaatgggtgggccaggaaagcatatatggaggacgtggggtcttaaaaatgaaaaatgtgccagaaggagaaaaaaagagctgcagaagtgtgatcttgcacttctctcttctcaatctctctctctctctctctgagacaggatcttactctgtcgcccaggctggagtgcagtggcatgatcatagttcactgcagccttggacttctgggctcaagtaatcctcctacctctccctcctgagtagctgggactacagctccacactactacagctgggtaatatttatttatttatttctgtagagatagagtcttactatgttagcctagctggactctaactcttggcctcaagcgatcctgctgccttggcctcccaaagcacagactataggtatgagccaccactcttgactttttgcttctcttcactcttctaaccctgacttatctcccatgcaactattatttattacaacttgtgtttgtgtgtggtgtctgagtgtacacggtctcttcccttatattacacatttcttgaaggtaaaattatgtatcacatttacttattattcctaagaaagcaatttaatagattgtagatacttaacaaaggctatttttttgcctgttgctgaacctaattcctttatgcaaaatgtgaatcacatgtggctacagagaggccttcaaaatcttcagcccatagaaggaaagcacagtaactataactcacaagacacttcttaactcatgtggagcttggaatagaagtctggaggagggaaattccacaaaagatcacagatgtattatttgcagattagtcaacatatggcatgtttaactgcagctctgaaaaaacaagactaaaactgatggttcatttttaaagtcacaagctatcgaggcttctaaacatcatttgaaaatgccagtgttggcctggcgcagtggctcacgcctgtaatcccagcactttgggaggccgaggtgggtggatctcttgaggccgggagttcgagaccagcctggcaaacttggtgaaacctcgtctctactaaaaatacaaaaattagctgggcgtggtggcgggtgcctgtaatcccagctacttgtgaggctgaggcaagagaatctcttgaacctgggaggcggggactgcagtgagccgagatgacaccattgcactccatcctgggccacaagagtgaaactccatctcaaaaaaaaaaaaaaagaaagaaagaaaatgccagagttttgttgactcaaacgaaattacctaaagcatttttcacattttaaaaattgaattggaaattccaaagtagttgaaagtttggagggaaaaatgattttttaaggaggccaactgttcgtttcatcataaagtcacaatctactccccctctttctcccacaggaaaaaaaaaaacacaagatatgaaataaaaccattttagtattacacgaaatttataatcttcctcttcattcatcttgaacagtaaaaagaagcatggaaatttaaaaaataaaagattaacattaaatcccaggaaaacattcagaattcacttttattattgagataatttaacaatgaggaggcctccttgctctaaattagatcatacattgatcattcattttaatcacagagagacagaaattttaggactccatatgacagagtggacaaaaggtttacgtgactcctacaccttatcaattgcaatgcccacttcatttccactgattactgttagaggttttaaatctctacttgaaggtggacagcttcaattttctggaagattaagaacctcacaggtgcactgcatttgtgcatgggaagaacagattgccaaagcctctcatctgaga

SEQ ID NO: 1881854 - DNA, 4001 bp, Homo sapiens
ggggaactaccactggaaccaccacaacctttgtctctgcaaactaagtgtctctctgtcaccctcatcagaattcctccactccgcactctttcttccacaaggctctcctacaatcaaagtctggcatggtctatctgaggaggccagggccatgcttgtgtccagctatagacaacttaggaaagtgagtttctggtttcttcctggagaagtgggattcataaatctggaaatcttcaaaccagggaagggtactgagaaagtgctggcagctggatgactagggttcatatgagtacatttttttctggataactttgcagggtcccacatataattgtgcaagtggtacaatatatacaggccccattgtagtggggtggtttctgccagctcaggcagcatcatgggcatgtgtgcaaatatgaggacaagggactaaatgtacacgtggagaatcattctcctcttccctgaaatcacattcatacttcaagccacccctttcccctgcccctcctgggagaaagttggaagcaaaagtgtttgtgaagattcaggctgagatacttacttctggtgtccccatcgctcacttgaacccatagatatcccccatttccttaccgtaatctgctaataacatgactgtcctgccccacgggatgctctctggtctcattaagtctgaaaatgcttgggaaatgcatctgccaaggactacagccaactgtcattattatcatctgcttacagacactctcccaggcagcaaaatattttcaagctctaaaatcccggccctagcccgtccctttattttcatcttacctagcctgcgtagattatctgaaggacacacagactcaaaatcaatgtcccatctgtctcttgtttacagcttatcaggtgttgtgaaatgaaacagtgaaatccctgggagcatttcctcttctgaactgatttaactttagctctctgaagctttctcctcctttggcttctgagaatggtgtgctggtctgagaagcaagaacttttcattggcatagctattaatagtgactaatatggacttcttgtgccttgctccagtttgaaatttataaggatggctgcctcattgcgtgtgtgtgtgtgtgtgtgtctgtgtgtgtgtgtttgtgtgtaattgctttgctccttcttttgcatgtgagtagatcaatcttaaggatcaggactcatctctgtctccccacaacaatgcctccaaaagggggggggttcatgactgtttcaaaaataacttatattttttatgcatgaatcttctttgctccttccttccttccttccttccttccttccttccttccttctttccttccttcctttctcttccctctctccaatctgtttcctctttgtctccctttgcctcatccatgccccattctttctctcccaactccaggattgtgtgacttttttctctgaccttttatcctcactgcttctttggctatgatttgaatctgggtcactagaataagcgtgtccttcctttctctgtagactatacaggttgactgctttgtagattttggcattttgtaggacatcatatgaatgcaatttttctggataacttagcaggggcccacatatagttgtgcaaattgtacactgcacacagacctctaccgagtgagcgaatggggcaaaactctaacccatgctactgtccccaagctgtgtatcctgggaaagtgctacatccactgaaggaaaagtcatgcttttgtaatttggtgactaatgctcagtcctagcaaccaattatgcacacacaaataggcactgcataattgtttactacaccacattccctccagtcatctgaatttacatactctcaaaactcacatggcttccagcagtgcacatccccacattcccttccaaggcaagttggtgtttgaaaatcacactgccatgatttcaccccatcacatttcatcctatgtgagttggtttttctacagaaacgatgtgacaagcagtgattatatcctaagggtgacatcacaatcacctatttaagctattatactgttgaaaattgtttattgcaaaggaaagaaataagaaaaccctatttttctatattactatttaaacaatcataaaaacaataatcctaagtaagatgttattttggaaagattacataatttgaaagaggctggccttcgaaagaatagcaggattattaggagagcagaaggaggcaatcgaaacctctgtggggatgctgatatacgctatagaagtaagattctgaaaaacttcagaggatgccaactaggttctttgtttaatctaatttcattgcaaaccccagggtagttaaatctctaaaattattcctaggttcattaggcttaatacagcttatttcttggatcacaaaagggaccaagaaaggagaggaaataacattttttgaatgaggtaaataggcaagagttagaagaaactaagaagataattgaaatgcatgtctcaccatgcgtgagaaggaaattagctagcatggaaatagctgaagttgaagcagtgagtgtacatgctcgtcatgaagttagtggagcatattagtccttctcacactgctatcaagaactacctgagactggataatttatgaagaaaagaggtttagttgactcacagttccacaggctgtacaagagacatggctggggaggcctcgggaaacttacaatcatggtggaaggtgaaggagaagcaagcaccttcttcacatggcaaagaaggagagagagagcaagtaaatgaggaagtgctacacactttcaaacaacaagatctcgtgagagctcactcactatcatgagagcagcaagggggaaatccacctccatgatccaataacctcccaccaggtccctcccccaacactggggactacattcaacatgagatttgggtgttaacacagagctaaaccatatcacagaggagaccatgtaaggccctggagaacatgtggggctgggaagggcataggtgtaatgtgctgggactgatgttcctgaaaggaccatgctggctgctgtgtttgtcagggatcaaggtggaatgtaagcaatgaacttggttgtagcagaatccagaatatgaactgggttatattctgtataaattttaaaggtagaaccatcaacattagctgatggttagtggtacctttgacccaatggattgcttaactacagaggagtagaagggaaagtaaggaggaagctctctggctggggttcatggaaaatgctgaggactagagttctttgctcagggctctgtctccctgtcttgacataactgcagcagtgtgggcagaacggagtggttgggctctgaactagacttatccactcgtctctcttgtctttcattcacaagtacttagtgagggcctactatgtaccaggcacaatgctgaattctgggaagagagacagctagtgaacaggttcctcacccacggaactcacaatctaaccagagtcatgcacccaaaatgacattttggtcaatgacagatcacttatacagtggtggccccataagattacaatactgtatttggactgtaccttttctatgtttagacatgtttatatacatgcaaatatttatattgtgttacagttgcctacggtattcagtacagtaacctgctgcacaggtttgcagcctgggagcaagaggctaccctatatagcctgggtgtgtagtaggctataccatctaggtttgtgtaagtgcactctatgatgttcacacaatgtcaaaatagcctaaggacaaatttctcagggcatatatccatcattaagtgatgcacaccgtatactggattgctttatggatgcaagtaggatttccccacgtgccctatacctttttacttccattcaattcttctc

SEQ ID NO: 1881855 - DNA, 4001 bp, Homo sapiens
cagcagagtaaaataaatcattttcaagaaaaaagactgagtgtgttatcactcacatgctaagccccaaaattgagaaatcattgataaatatgattaactatttactttaagtaactaatgtgtgtttttaaaaggtaaatctaaaaacctagatagcaatactatgggagtggcattcaatgaatagaaaatgcatggtaagttccttaaccctttcaggaatatagagatagttaatcattctacattttgttagaaattttacaataaatatgcatgaaaatttagaggtaatctcagaaagtaaaaactataaaatagaaggcagagtcttataatgaacagtcttgaaaaatctgtagaacaggacttgagttgtggagataacggttcagtaaaggctgcccatggcctgaaaaaataaaatttcccaatattttttctttgctactaaagaagaacttaagcactaaagaatcaaatgccatgaaattgaattcagatacaaatttaagtttttgctttttagtaactaaaggatttaaaagagaaatttaacatggcctcaactcctaagtcgctattgattatcagatacaacatttatgtaaaaaacaacttttttcctacttgaccattgatgagaaggtgccacctgatttccaaaacgttaacattttaaatcgacaaaatgtattaacttacttgactttgagccaagtaaaattgttctcaagtgccttggactcttccaaggaagcttattaaaatgcagatcctgggggcactctaagagactcggattctgaagattggaaaaggctagagatttgcatttttaacagatagttctgacacagatgatgggaagactgcaaatttctgaaatgttgactgagtaaaatcaaaatagtaataaaattagccaggcagccctgagggaatcttaacagcaaacataaaaattgagccacccattctgaaagacatccaggttggaactaggaaaattctaattaatgagttaaatacttgttgaatcctaatctagaaatcaaaagacctggtttctgttccagttctgctggtaattagctttgagactgtgggagaagtagggggattatttttcctctctgggcccaagtttcctcatctataaaataaggttaaattattctctgccagctttaatgttctttggctctgtgagttcacataatgggattgtgggccagtaattaatctaatctttatagattcttcgaaagaagccccccgccttatttccccaggagatggcagtgggaaagtacagcatagagaaaccacattaatgctgcagagaggcaggttctgagtgagacaccaaattgaccctcaatatctgacctccaccttccccgttacaaaacttattctttaaaagcttaccaaacgaatacagcaaaggatgggtaaagaaaatgcagtcaatctcttctaaatgcaaattaccttggcaattatgcaagcaatttaaaataacaacgagttgcaagcaagaacaacaaagatttgattcccaagctagaaactttcaattcagccgaaagctacaaatcctgggaaatgcaggcccccagaactgcatggatggtggtaacagagacacgtaacaaaacaaacttcagagaaaaactagacttacctagttcttctaagaaaaatagagtttttctttaaaagcggtcttttgtgaggcttggattcctccagcaatgaatgtagagccaagctgtgaacccaaagactggagccctacacacctccccagcttttactgtagaaatctttatttgttctggaatctcttttatcaacacttcacttactcctacagtgtgaactccaaacagtcctgtttaagaaactatctgcaaataccagaatggctaatcctaaaaataaggtgttaattggtctcttggtgattccaaccccaaacataataaactagtatttctttttaaatgtgggggttttgccccactgctagtctgaagtactgggtctttctttttctgctgcttttcagcttatgttttaggtaaaaataaagaaaaaagaaactagtaagaaatacagtgaatctttgtctctcttcatctgacagtaattataggatgttaaacccaaagtaaagcaggtcatactgtatcttcaggaggagccaaattaggaggcaagcttgtcattcctgaagtcttccttatggacataggaatccaacaatttaaaaaaaaatttttttagagacagaatctatgtcacctaggctggactcaaactcctgggctcaagggatactccctcagcctcccaagtagctaggacaacagtcaagcagcaccacactggacttctcaggaatccacctttttttttttttttttttttttttgagacagagtttcactcttgtcacccaggctggagtgcagtggcgtgatctcagctcactgcaacctccgcctccctggttcaagcaattcccctgccccagcctcccgagtagctgggattacaggcacaggccaccatgtccagctaaattttttgtatttttagtagagacggggtttcaccatgttggccagactggtctcgaactcctgacctcagtcaatctgcccacctctgcctcccaaagtgctgggaatacaggcgtgagccaccgtgcccagccaggaatccactactaaataataaacacctcttagtgcctctggcccaaatgcccagttaactgtggcccagtttccctgggtgttggctgagtgtttagctggggcagagagccaatcaacaaattaggggcattgatcctttttattatctttgtttttatctctcacttctgacctgcaacaacatcccattgtcagctcagattctggagcgtttaaacccttcccctgccactgagaaagcgtttttctaatgaggaagtagtgtgactgcagaacggtggtacagtaggagggatctcccccggtacccatcacgcagggacagactggctctgggttctactcctaacttctctcatcattggtactactctccacgaccatcatttcagagaaatttctctgctttggtatatacaggaatttgacctgggatttgtgtgaaatatttacattgtttttcatttgggtagatggcctcagaacaatgcagttcccaatttccttgtgctgttctcctttgcttgcaagcaggacaggagcagagaattagaggaaaggatttcactgagtggcgtacagtctttcctccaaactttccatggcaaacacagtgttgatctatacttgtgagaacctcctggggctgcatgtacttcctaatgggcctggctgccaagttgcctcttgtgggactgacctggagcctctagagcaagggtcaggagacaggatgcagggtttatgtcactgtccgaactgggagcacaggctgagctgccctacagtgggaaccgaaggctcagacattacttcacatctcagcagaatgatgcaatgatagctctgctgcaagttctgctaaacagctcaatgtttggttctccatcctcagtaatattcttgtcactgagccaatggcctcatcaaaggaactaagcaaggatcctctaacagccttttttcagttattggtaagaacagtaataattgtgggttccctataacaagcactgtgcaaaagccataaaagggaaaaatggccctgtttttccagcatcacatcttcctaaagattaagtatttctatatcaaccattcaaccattcattgagcagtcttcatgagcatggcaatatgctgggtgatgggtttgctggtgaatgagttcaactcatccctgccctcaaggaacttacaagacaccatagaggacagatggatgcagaaaaactagattgttctaagtgccattggggagaccta

SEQ ID NO: 1881856 - DNA, 4001 bp, Homo sapiens
cacttcgatcctgtcctgggtgagaggtggggcatgggaggtgtatcaatcattatctagacagaaaaacagaaactactctggatgtttcaaacagaaggaattaatggagaaagaatgttaccaaggtgttagatgggctggggaagcacacagagagggaaatgtgccccagagatcaggaagctggggtttttcaacctgggttgaaacctgcaagcccacactgtctgctgagtttctaaagatgctgctgctgttaccattgccacagtcggatctatgctgttctgactaggaaccccggacactacattttgatgctggtgaaaccaggactgacaccgctaaagctcagtgtcaccgatggagctgccagagcccatagttgctgacctcggtactactgctattggtggctctaccagtagcagacaaaaaagccttcttcctcctatattctagccttcctctagcaagtggactgcagtacagaggaaggcatggaagaatgcatggatctgggaccagcagacaatagtccactctctttcagactagctctttgctctgtctcttctcagtgtactgtcctgagagggaggtcacatagcaatggccaggaagcccctccccaagactgaggagaaaccaggtctactagctctcatccaatattctctgaaccacatcatggcatagctaaagccctgcctccctttttcctttccttctggtttctgagaggaatactgggtcaccactaaaatgtggaccacaaaagggccaataagatcaactatgctacccagccacttcagtcaatacctgtcaaactgatgtttcaactgaatttctggttggttgattgaattggtcaaataaatgttctctggacacatgtatttctctgggacattgacaaagtagcagcatctacttatcatggataaaacttcttttatttattatctattggctttttacaaataaaacttcttgcatttattatctattaacttttcaggtgattttacatttttccccattctttcagcaaccatggacatatcataaatcatccttctttcatccatttgttctttcagaaatttactggggaatcagctataaacaagggtttgtattttgtatagtggaaggaatacaaagaagtaaaagaaataaccctaccaagaaggagttgatagctactaagaaggagtacacttttacaaacaaagtaactgacctgcagaaagagaacctgcagaaagtgctagaatcagccaagaaagtgctagaatcagccaagacttctaattggcaagccgaagccctccccataaacaaccccctactggttgaatactgaggtgacacactcagttgcatcagctctaagattcaggtcaatgtctcttattattttgaatggcatctgattatagattaatacgtgttttgtctaaggttaccttgaagtgtcttcgtttgtcctcatggaagtgactgagcatgcttgatttttttccatgttgcttagctttcagatacaaattaagcaatatattgtattccttctgtctaaccatgtggttggtataatttctccacagacagctgaattcaacagcctgtgtgtagtgattcaacataagtaaggacaaaacggtaggtggtaaaggttgtcagaaggacacctgggccttcactaggtgctgccactaaagccaggccatcagatatggcaaacctcagggtgctgccaaatcttacagaccaaattcttttcacctgggaattttacccattcatcagacccaatatttctcctaagtcaggagacacgatgagaattttatcaaatcaattctgcagttagtaacttgactaccatctagcatgttattctagccatctatccatttcttcaaatcatagactatttcaggatatttccccaatcatactcggatctcaaatgataggctgaactcactctgcctcttttgagtgaccactgtgctcaacagaagcactgatgttaccatggtttccttagtgacagagatattacaaaggggagagtatggttgaggaggcaaagcatgaaagggaaaaggggccttgatattcctgtgtgcagagtgctagccagacttcactgcctcacactggggacagttgtccagctcatgaaagattgctgtcaggggataaaagcctcgtttggctcacttaagatttgtgaagtatgttctgtgcatcaggcattttaccattttaatttccagaaaagacagctaatttttcctgtgcatctgggatgttcccccaggatagcagagatgagaaggcagttttgtggtgccacagttgtatatgggcttaatttgaaatgattagtttcattagccttgatattctaattgtatctctacatttcaccatcttgcatagagaatatgcaaaacaaagggctattgagccagggttggaaggagccctgatttcgattgtttctcattttccttttggttttcaatagaaatcaatccctagtgttcagtaaggcctccgagccattggagccatttagcagagccctgctagggtgtgcgcttacctggacaggttcctgactagtcatccactgctgtcaggacttaaggatgatgcttatcaaggttcttcttatgctgctagagaaactgccacctatttctcagagattctttcctgggtagaggtacctaaatgttgccccaagttccatggagtgtgatagccaccagatttgacttcaataatattcttcatctcagaagccggggtgactgggcaacttgtaacattttgtgtttgtaaggtggtgggattttatagaataatgaatcttcacagagccctgggttgctagggaacctcgatttagttccactttggaatgaggaaaatatgaaaagaaaaagagaagtaaatttcttagaatttccccactcatgtttcagtgctgatacagaattccagaatgactgagtatcctaagcccatgtcagttatctctcaaggttgaaaggagaaacccggcgaaaggatagggcagtaaaagagaactgaggtggctgtttgaaaggggccatgtctcctcggagacacgtgtctctctaggaggatcactataccgcattgtttctccatggctctcatgtactcttttgagaccttagtgtgctgtttctagatcaacaatttatgatatttattgagcacctgcaatgtgtccagctttgtgcttggtgatgtgaaggcaagagatgtaaggacctggtttctaatcttcaaaaaagtctacactgtggttgaagtggtgaggtttattcaactaaattaatttagaaactatatcagatagataacatatagaagcttatgctacctgtttgcgggtcagaggttcctttcttgccattggaaaagagaaaggagagaaaacaccaagtgtcagagtcactgggaaaggcttctagaaggaggaaaagcttaaattgtggaaaagaataagaaagtctgataggtccctgatatttgtgagcttctaattacaccaatatcatgataatttcttccacaacagaaacacaaagagagtttttgcctccgaaatgacaagcagagaaccacaaggcaatgttgagatgcagagggtggcagtttccctcctagcagagtgactcactcatgcctccactccagggtgcagggcttagattcatgacaggtaagaacaggccataggccttacaggtggctttcgaatacatgaaaccagggatctactgtatttcaagatggggagatttagcatgaggcacagaggtgagactggtgaagaatctgttccagctaggatgaaagttcgtggaaggaagcaacaggaacagggtctgctcgtaaagggtattgaggttagacccggtgcaatgattcaagaggaa

SEQ ID NO: 1881857 - DNA, 4001 bp, Homo sapiens
taatcacaaagttaaaggccttttcctgtttctcctgctctttgattcttctgcagccaatgggctattggccactgttcattcttgaaattacactattttattgtctgacatgatgctgtgttttcctggttcccttcccaccgcttgacagcttgtttctttttcttcattagctccttctttatctaccttttaaaaatgagaaattatttagttcaatccttggctctggctttcctaggatataccctctcctcttatttccaacatctcctccatgcagatgactcctgaaactccacccaaaacctcattggcaatcaacacagcaaagcaatgaacattttacttgatcactgaaccttcaccaatacctcaacatctctaggtataagtttctcatctgagctcaaaactgtctttctctacagattcctccattattccagtcttttaggactgaaatctcaactttatatcttccctttcctctatggaaagtatctaagtagtgaccactagagtttggatatggttcgtttgtccccaccaaccctcatgattaaatttcattcccagtgtagcagtgttaggaggtgaggcataatgagaggtgtttcagtcataggggtggatccctcatgaatagattaatgccttccctggggttggcgggggttgggggtggtgaatgagtttccactctattagtttccacaagaattggttgttaaaaaggagctggcacctcctctctccctctcacttcctcttgccatgtaatctttacaggagctggctccccttcaccttttgccatgagtggaaacttctgagatcttcaccagaagacaaccacagtttggtgtcatgcttcttgtatagtctgcaaaacaatgagctaaataaactcttttcctttataaattacccagcctcaggtattcctctatagcaacacaaaatagactaagatagtgaccaagccttgttgattcttatttcacagtgctggttatattcctactgacaacaagctaaatcggactcttttacctttcctaggattgctgaaaaggctccttaatggtttcctcaatttcaacatcagttacctccattctataccccacatctatgtcaaactacctctccccaaaacactgtcagaccatgccactctgccaatcagaagccttccaggactcctcattgcttactggactgtatctaaaaccttcagctcagagttcaagagcctccataatgggcctcaatatacttttactacctccccttccctcaacttgtctacataaaataacaactccagataaacttatttccttactctcttccaaatatacttttatccttccattcatcttcctttttcttagactactttccccaccaaaactgccttcctaacctaatcctaactcccaaatgggaccaaggtcagatctcacttctttagtaatgatgttcctcattctctaagttgaactaatcgctcctttcaaaaaagtttccacaattcgtattcagataatacatttggtaattaaccacttactgcctactgacatcttttccattattgcttgctactattaagtgctttattgttatttaagttttcatatttgtaaatcttgtctctccaacttgattgtttacctcttcttttaaaaggggcaagcctatcctctttgtatctcacaaagcatttaagagtaacttgtacaatgtattaactttttgtccaaataattttagaaatgtttacctccaatagttaggaactattcacatcgctttgtattctttcagttaatatgtcttcatgatggtcctcagagctttgagaaagcatgcatctccaaaatgtgtgtgtattctgtcatggtttgtatgctggatcctttctcctggcttcacggcagatttggcctttaactatatggcagatttggcctttaactctaccattaaaccaactgagtatgatttctaaacatagagaatagacagctagattagttatgctgtagtaatgtgaaataagaattttcttccccctaccccacacagatcttactcaataaaattgtttttaaaaatgtgggcttgattactcactgttattttcatctagtattaatttaaatattcaagtgttttgaaaataaatgaatgtgatatgttcattgacctatttgtaagaagctagatatccgcaaattgtgaaatacagtcaactagcaattatcctcatacagatccaggctttaccttatgactagtgatctgtggtctgttgccaaccagctctcttcttcctccagctcacacccaacctactttacccaaccacactgaaaataaatgttcacttggtccaacatactaacatcaatctaacacaggttgaaaaataagtatcttatatgccaatctccgttgatttgtaccagctgcctggattgcagtgatgcaaagaattctaaagctatatccagattcatcaggaaaggcctattagtgagtctgctatgagcacaagacaagatgtgttggcacttgaaccatgaatttgcaatctccagccaaagcaaaacttacaatgtggagtttcttgtagggaccaaagtgaaactacccctttgccctctgaggttttgctgaaaactcagctgacaaaaaggttaataggagaaaaggcacacaaaattttattgtaatgtgcatagcacaggggatcacaggagaatgatagaagtgatatgcccttttccataggggaggaaggagatgggaagtgtagacatttcttttaaggagcagtaagtaattagggaaaaataatgcacctgggaggtgggaggcagacattatgggaaggtgaggggtggaactgcacaggaacaaaggtcatcttattatgcaaattgagtcccacaggtaatctcttggagctgctctcaggagaatagatgaaaagtctgtctgggcagggtgaagattcccagtctcttctcttctcaggtgattaatctttcctggttatttgatgaggtccctaaggaaagcatttaagataattgcatttattttggaaaggagctttcttggtcacataaagaaattccaggaagagtccttccttgtgcttaagagacaagacaaaggtagaggaaccttcattcttaggcagcttctagggctcctcagcacatcacagcaacagtctttggggcatcactttctgggccccaacattctcaaaggcaaagattctgttttattcatctctacacatcttcctctcttccccttttactaagtcatggcagatatagcctgctatgaagttggcaccattagagaaggtatggttgcttagctgtatctgtgcctaaagtgaacatgtgtactcttagtcacacccagtttctacttccacttcttgtggaaacagtccccatcttcatttagaaatccattcatctcctattttcagtctacatggttccagggagatgaccataacacaagctcattgtgacatgtgattcagaccacccaacatgattattacatttttcaataactggcttagaaaggacatttaacccaacagggacaatgagataccttagagttttcttctgaggtgtttgtgagggaaagagtcactcttattgcttgctggatttgaaactaagaactatcttgctgtcacatggagttgacacttttaagcttacaaaaaaaaaatgaccaagtcaaaatatgatgataataacagttgtgattaactaacctaagcccccaaatctatcattctgaagccctgaatacctttcattaatacattcccttttctgcttaagcctttttgagtttcctgtcacttattactgacacagactccctgagacaaagctttataaggaccttctttgactcctatcaactgcaaaaacaatatc

SEQ ID NO: 1881858 - DNA, 4001 bp, Homo sapiens
tctttcctcctccaatgttccctgtttccgtaaataccagcacccaagcttagagggagtcacgctgcactctcacaccctacacaaaactcatctgctctcacaccctacacaaaactcagccccaggtctctccagagccggccttgaatccgcccaacgtgtcatccctactggcactacctcagtctcaactgccaggcctcctgcaccctctgacccagccctgtctacttaggggctcctcaagtccattctccacggggcagctggagttttgttttgcttttaatccatatctcatctgcgtactatcaggtgtgaaactgtcctgaggatccactcgccacaatgccccttggcatcacctggcagtggtatctgctggcctccccggtgccattctccatcctcccctcaggtcatactgaacctgtcttttcttccacctctcaggctctcctctcctctggtctcagcacacaccattcccggggatgggaatactcccctttctcacctctcccctcccccatggctgcttagtttacacagctcccactcatccttgagcccaccttcagtctccccagcaaggcctcctgcctcagcacagatgcagtgagctgcagcacatctgcgcctcacagcagccaatgcgctgttcacattgggacagttcacagcctggttcacagccagtgctcaacacaggtggcctgaagaactcacttttcagccttgctttgctcatttttactgtctcactgctttcttcccgccttgtagcctaagaaggaaatcccctgaagctgactccgttttacctctcctatgtggtgctgtgataagccccaggtcaccaggtcatgctcccagcacccgtgggtcaaggatgaggcagaaacagcaccgtcaggtacagggccctctacctgctctctctccctctcccttcctagaaaacaaccataggtcattcaaagtcagtttgggaagcacctgtatttatggcctgcttatcttgaaggcacttggccaggtgccataaagtgctaactctgactgcccgactatgccattcaccccacctacctctgtgcaggagatgtgacatttagcaaatcagtataaactttttcccccaaagaaaagagtataaaccttctcatcccaccaccaccccgcagcaggaaactcctttcagtctccccatagaaaattcagcggccacacagttccttggctattgtttctctcctgataccagaaagagataaatcaacaacacatcttaactggtcatttctcacacaaaattggatccttagaaagtgcaacataggatatgctctctataatgattcactttttcacttttaaagattttacttccttaagagactatcaacaaaagctgtcagaatgaactgttagtttctagaatgttttaggcttattgatgctttaatagggacatgttttatgaatgcaagatcaaaaagggcgacttctgtctactcacatgagacaattaaacgcattatattagccccaactctgttaatcttctggtttgttgttcttccatttttaaagacaaaaaaaaaaaaaaaaagaaaaagaaaaaaatgaatttaaaaagtgccccaaggccaatatcgcctctctgcctgcccaacgaggggacaatacactgtttcccagactacgtgactcggaaaacttccccgtcagggaaagctgagtctttaaatttacaaaacacccactcgccccgtttacctagcaccgtttcctacgtgaagactgcaaatggactcgagcgtcccgtttctcggctcggatcccagaagctcccgacccgctgtggtaggcaccgccacctcgcaggcagacgatcccggcccgctctgcggcacaaaaaacttgaccttaaaaagcccagaaactggtctctgggaagggcgcggcctgggaggcgcggcccgcagcttccgcccccaaagaacaactcggaggccccctccagccccggttgccctggcgcagaagccgcggtagcagtcctttcaggcgccccgcgtccctgtcccgaagcccaggggcgggggctcgggcagcatcgcttgtcccctctggtccagggctgcggagaagcggcaagcggctccgaaaggcaagcgtcacgaagccgggctcagtagctcccccgggccccctgcgcctcgcagcggcgcgggccaggctgggcggcgctgggctctgaagggccaggacggcgggatgcccctgctcccggcaagggcgcgcccacgagccgcttcttggcacttggggagagtcccgggaaagcccggcgccggcgcgctcgcgactccagcctggcggctccactccgcccgcgagcccaggaagccggctccgcggcccgcgcccgttatccaggacacgctccgcgcccgccgcccgctgccctttccccccgctggcctcggggaacttccccgcgtctggccgcaggcggcggctgccgcggggagccccgaagttgcggcgtctgctaggcgcgcgccgggtcgcccacccggcccgtgacgctgtgtccgtccgccgcgcgctctggtggccccggggctcctgcaggcgcggagagaggccggggttcagcccggttccccgcgcggctccgagagggcgcccccgcctgccgcctggagatggacgcggcgccgaagttttccccggcgggaaaacgaaagtcgtgaggagcagagggtcggggcgtcccggcggagacgaggctgagaccgggttaacatctccagccccgggcgaccctcgctcccccgcgtggccaagtcgacttacgagagggagcgggccagccccgaacgcggggtccgtgcggctgcggaggccgccccggcgggggccgagggttgcgctctgggttcccaggctctccgcggcggctcgctctcgccgcgctcctccgtcgccctgctggggagccgctctcgcccggcccggggtgggagagcgctgagcggcccccgtgacgtgcggagaaagtaggagcgcctccgcgctcccgcagagggagctccctgccctgcgctcccagtccccgggccgcgcttcggacaaagttctcaggcgcgcgcggtgatctcggctctccgccgctgcccggagcgtcatccacgttcggttccctcccacattagacaagaaatctgaggtcaggagagctaagtaacttgcccaaagtcgctcacaaggcagtgacgaagcaaactcacatccgcggctccttttttctccttgaacgccgggctctgcggaggctcaggccctgcaggaatcgcccaaccagacagaaggcagctcgctctcatgggtgagacgaggagtgtcccacgcagccgcgagaaatattatcagcagcgtgggaaggtggagctttttgccgaataactagagtgcaaagttgtttttcaaacagtgcctacatgccaaatcggcttgctttttatcctcaagcgagagtgagggtggcggctgtgcggacgccaatcgggatcaccgaataagtgcagtggaaagaaagcacacagccacttaaccaattggccgacatcaaggacttggccttccgagcgggttcttgtgaatatgctaactttgtaaagcgggcgcaccacgctgtgcttgctattcacgcacttccaggagtctcccgcgaggctccacgtcctttcggggccgggggctcccagggcttgcctttcagggcagggagtggcaccagacaagtcaatcccagtcggtttgttcctttatcccttgcgtcaatcagtgttgactgagggcctgcaatgtgcatggctgttgggtggggagctgggtaggacctaggacctaggacccagtgaatctcaaagagggagggtcacatgggtccccatatgcttcactcccagaatctggaatctgcc

SEQ ID NO: 1881859 - DNA, 4001 bp, Homo sapiens
gtgcctgacactatatttcttcttcctactgtgaacatgggcctgctctctggagcagtagcagccatcttgcaatgccaagtttggtttgattttttgagggcaaatcaatcaatcaatcaatcaatcaatcaatcagagtcagcaaaatcccaatttgttttagttactgtaagttagattttctagcactcgcagctgaaaacattcctcattgataaaggagaggagatgagaataacaaacagctgtaaggaaaaacagtatttaagggctgaaataggtagtgctgcatggttcagaagagggtgagaaggcaggcttcatgacaggttcaatttgggatttgggttgggctttgaggaacaggtaggatttgcattggaggatgtgaggagggaggaattataggcagagagagtggcataaagaagagcatgggagtggcaaagctggggtctgtctggggatttgtgaagagccgaggtagcttgtgtacaacatgtagggagtgaaaatggtagatggtaaatctggagagtttggttaatgccactgtagagggccttaaagaccaaagtggggtttcgccttagccgggggagcattaaggaggcaagaaagaaagtgatataatcagagatgctgttcagaaagattgtcttgggccaggcacggtggcttacgcctataatcccagcactttgggagcccgacgcaggtggatcacttgaggtcaagtgttcgagaccagtctggccaacatcatgaaaccccatctctactaaaaatgcaaaaaattacccaggcatggtggcaggcacctgtaatcccagctactcggaaggctgaggcaggagaattgcttgaacccaggaggtggaggttgcagtgagccaagatcacgccattgcactccagcctaggcgacagagtgagactccatttcaaaaaaaaaaaataaataaataaagattgtctttgtggccatgtttatgagagactgttggagacggagatcagagattgagaaactatcagtttagttttctccagccgtctaagtaagagacaaaaagacatgaactagatgcggttatgaaagagaacagattgaaaggcacagcaaaggtggagtacttggtggaggtggggcctggataaggtttggctatgtctccacccaaatctcatctcaaattgtaatttgaattgtaatccccacctgtcgagggagggacctggtgggaggtgattggattgtggaggtggtttcctccatgctgttctcatgatagggagcaagttctcacaagatctggtggttttataaggggctcttccccttttgctctcttctctcttgcctgtgccatgtaagacatgcctgcttcctcttctgccatgattataagtttcctgaagccttccaaaccatgcagaactgtaagtcagttaaacctcttttctggccgggcacggtggctcacgcctgtaatcccagcactttgggaggccgaggcaggtggatcatgaggtcaggaaatcgagaccatcctggctaacatggtgaaaccccgtctctactaaaaatacaaaaaaaattagcctggcatggtggcgggcacctgtagtcccagctacttgggaggctgaggcaggagaatggcgtgaacctgggaggcagagcttgcagtgagctgagatcgcgccactgcgctccaggctgggtgacagagcaacactccaactcaaaacaaacaaacaaaaaaacaaacaaaaacaaaaaaaacactattttctttataagttaccaagtctcaggcagttgttcatagcagtgtgaaaacggactaatataggcctaataacaactcacccacccttgctaagggcttgtcctgggttttagaatctggagatgaagtttcttcatggctttccctctgcctggaatatgtatttgttcttgtcctgacccttagtcattgcttttctagcctcttcaaggccagtcttgagtcccaccttaaaatcaagagaagaatggataaactggcacatctgtacaatggaatattaccgttagaataagagaaaatggggaccaggactgtaaatctcttcagcagacaaagccagttaagccttggacacaaacttgaccttgataagctaaacttaacttggactattttttttttttgtaaatacctgcattaaagcaaaatgaagtttaagttcaatcagtagccaccaactgacttatataacaagggacttggcgggggggagaccaaataaggcaactacacagtcataaccaagccattattttctttgccttgcttccaagttacaaaagccttttccttgcattctcttggtagagccctgaaccactcttggtttggagctgcccaatttgtgaattgctgtttgctcaaaccctttaaaacatttaataggacttgacttatcttttaacactacgtagtaataaaaaggaacaaaccactgatacatggaacaacttgggtgaaactcaaatcatgctgcaataagccagatcaaaagagtgcatcctatatgattctattcatatgaagttcagaaacaggaaaaactaatctataatgagaaaaaaaaaatagtggttacctctgggggttggggttgaggactgactggaaaggggtaagagggagttttctagggtgataagagattgggttatagaaaggtatatgccattatcaaaacctgtaggatgttatccttaagatctgcatttcattatgtaaattttaccaaaaaagtgaactacagttaataggcaagctgaagaatgtaggcatgaagaatagtgatatctgtaactttaaaatgcgtcaaaatataggatggatagatggatggctccatatgtgataaagcagagatagcagtgttaatgataggatctaggtgataggtaaatgggtgcttactgtacaattctgtcaacctttccgtgtgcttgaattagtcattataaaatgttgaggggtatggcatggtgggggagggggaggaatccctagtctaagttttgccaattcacatatcaaaagtaaagacaactggcagtgagaagtcaacctgtggacagtgaatcaggtcaactagaagcctcctaactccttgtctctggccttttggaggggaacatgactaggcactgaaaaagaggcagtctaattcaggatccctttccctaattactttagctggtaggtgctgaaaaaaatctctcttccccccaggttttcctgacctccagcaccatgaagtcttttcctccttgcagacaaaactctatccctttaggctttgtcttgtgtttgtctttgttagggctcctaggcaaagtagagaccatctaattttttcttctgattagatttcacatttgattatctactacaaagctatttgaaatatcacacaccaatgtgttttgtctttttttttttttttaagaaaaagtttcaacagaaatgtcactgtatttacagagtaacttcctggtacacatgaggtcagctggggaacagaaaggacaggagcagatgattagaaacggtcattaaagtaattcccccgggtaacaggaacagcacttcatgtggtttataggccttctttcttctgtttggccaggggctttattcccctttatccctgtgacggcgggggcctgtaataatatcttgggccaggtgcagtagctcatgcctgtaattccaacactttgggaggcagaggcaggcagatcacttgaggccaggagttgatcatttgagaccagcagttgatcatttgagaccagcctggccaacatggtgaaaccctgtctctactaaaaatacaaaaattggccaagcgtggtggctcaggcctgtaaccccagcactttgggaggccgaggtgggtggatcacttgaggtcaggagtttgag

SEQ ID NO: 1881860 - DNA, 4001 bp, Homo sapiens
gtagggtttgaactcagtcttgctccagaaattatgcagagtcagttaagactaagttcttccatgctgggtccccccagaagtcatctgacttcccatcttaaatggtttttaatggttgttttattttctttttattgtcatctttggcagagaaattgactctggcttattcagtcttcttaacagaagacctactgattttgagatgttagaccgattagagaggaaaataacagcaacacaaaaaggggaataagaaaataaacctctgaagaatttgatgtttgagtctagtgttgtatgtaaaagcactttgcaagttgcaaggcagtggttttcaaacgatgatgtattcaaactatgatgtattccagaacaaccaggagagcttgttaaaaatgccgacttcccagtatcaccctcagagattctgattgcaagaatctggggccttgcccaggaatctgccttgttaacaagctcccaggtgaccttgatgcaggtggtccaaggtgctcaccttggaaacactgctgtacatatggggcttagaaacgagagctagcaaatcccagaagaatacttgcctgtacgataattcaaaccacctgagtggtagcttattagtgcttttctggttccccggtaactcactagctttcggccaaggaacttgattgagagggtattgatggggaggaaggggaggaaaagaaaggaatagggccaattaaaaccaccttcccactgaggtgattgtttctctgtggacaatgaaggagctgtggagcaccttcttccttcagtgtctccctaattggctgttgtgactatcattctgccctgagggaggttaatagaaacaagagagagaagaaaaggatgccaagtaacttagagcaggaacaaaaaaggagctggaactcatttccaccaggacagagagaagccctgattggtctctttccctaaggtcctctttcacacatctctacgacctttcccctccttttttcttttctccctcagagggaccaataaacatgggttgtctggacaagcagtgctttattaatgatccagggaaaattccgatgacccagaattctgccataaagtgatatcgtgttattgcaaagtgatagtgttcttaacctccttgctgaaccacattttttttttttgagatgaacaacagccagaggctcttttattctgagcatctttccaagagaacagttgagttatttggattttcatactggaccgttacatggcatgtattaacagtgtgtgctataaacaacttacctttcgctgaactaagtaatttaaagtaattttaacaacatagtttggcatcgtgattaagatttcctggcttcaatcctagctctgcaaatcactaactgtgtgtcctcgaaggtgactttacatctctaagctgcaggttccaatctgtaaaattgagataataataggacctccctcccaacatacacacacacaaacacacacatacaacagcgaattgttatgaccaccaaatgagacagtacatgtaaaatacagtgcctcacccacagtaagcccacaataatggtggcctccattgttttttatttttctgaattattatttgatatttctaacataataattgctgaattgctggacaaaaaaaaaacctagaaaaaaaggaactttttaaaaagtgtctcctctctattagcattgaacttcaaatgctcatagcacactgtaagcagagcaacagatggattccatccaacgggaaggacacacaacttaggaagcaaacagacataggagagcaagataaatcacttagttgcttaccacacacattgtgagataccgaatgtggattagaagtttcttaccaatagttgggcctccgtttcttgaatggttttatatttccggactgcaaacaaatgattatatgtgtgaaaaaaatatggaataggcaggaggacaaattcaagtgaaccagaataccaggggctctggtgttctcttggagctctctgcaccgggtaaatcctttgagtgtaggcttgctgacagccgtctcattcacacgcaggttcctcccgggtatagctctgagagcaacagcccccagtcagtgcagggttactaagcaactatactcccactgaggtatgcaataagagaaagtcttgattttaaaaacaaaagaaaaccaaaacaccatagtaagcagagctaataatacaacctgctcttctcctttgagtatgttaaccctcaagctagtttacctttaccagcatatcacaacctcatggaaatcaaattagaaagcatgctgcagttgtataaagtaacttcaagcaatgttttaaattactgctaatacatttcatgttaaaatggcaccttatatagtgaacccttttgtgtgtatcatctctcaacagggcaccttaatggagggcgattgtcatttgaataatggttttagcaactaagtcaatgtttagttttggacttaattttttattgtttttgtattatctaagttatacattcttatgacataaattattatttttgaagtagctaatacaaagataatgacaaggaatcgttgactggatctttagagtttaaggattccaaatagttctgtacatgtttacatgttccctacatatccccttaggaggacacagagaaacacttccttgttctgattcttactttgattaacatttgttaagcactcaatttgtgcagagaactatgtgagacactggagttgaagagggagaaggaagaagatgtacaaggagacaatacaaggtccaaccatgcaaagaagtgttgtatagttttaatgaaggagataaaattgtacacagatactacaagaggcaatgaaaggaggaattaagatattctgaatgatgtaataattatagaaatcactagcttcaaattgccaaatcagaacattacagttctaatctactgggatagggcaggagagcagtacagagggaatgttaaagaattagagctctggccgggcgcggtggctcacgcctgtaatcccagcactttgggaggccgaggcgggcggatcacgaggtcgggagatcgagaccatcccggctaaaacggtgaaaccccgtctctactaaaaatacaaaaaattagccgggcgtagtggcgggcgcctgtagtcccagctacttgggaggctgaggcaggagaatggcgtgaacccgggaggcggagcttgcagtgagccgagatcccgccactgcactccagcctgggcgacagagcgagactccgtctcaaaaaaaaaaaaaaaaaaaaagaattagagctctcaaatagaaatgaaagtgggtatgacagcattctatacattccagccttttcaacatcatggtgtatgtgcatagacagataaatagataggtagacataattttatttttacaatgcctcgaggtgtaaaggatttgtgtcagaggaaaacaagtcaccagcgacctaggccttgtccagctgcttccaaggttaacaggactggtgcctctgaggcccaccatacccactgggaagctctgcatatttgagacatgctccttacatggattttcccactagagagtcagaatctcaaatataatatgaaggaatgttggcccaacatagttgaccatggtacatgtgatgtggcatggttagcaaggcgatatgagccgggatggaactccagcctgtacactcactagcttccatcaccttggcaagttagctcacttctctaagcttcatgaaaatgtcactaataaactgggatgccctgctgagccatgtcggagcctgaaacaaaacgaagactgcgtgttcctatatacgttatcaaaatagccccctttattgtgaatcaaatgggaatagttaactggagcttttcagggacaaatcat

SEQ ID NO: 1881861 - DNA, 4001 bp, Homo sapiens
gtccccagtatctgttgtttccatctttatgtccatgtgtgctcaatgtttagctcccactaaataagaacatgctgtccctgtgatttttgcttagaataatggcctccagcctggatccatattgctgcaaaggacgtaattttatctttttatgactatgtaatattccatggggtgtatgtatggcattttgtttatgcaatccaccatcattgggcacttaggtgctattgtgaatagcactgggatgaacatacaagtgtgtatgtcttttttgtagaacaattgattttcctttgagtatatacccagtaatgggatggctgggtcgaatggtagttgtattttaaattctttgagaaatctccaaactgcctttcacagtggctgaactgatttaaattcccatcaatagtgtatgaacattcccttttctccacagtctcagcagcatctgttattttttgattttttaataatagccattctgactggtgtgagatggtatctcattgtggttttaattcattcaccaaattgagagttttctttattcacagtagtgaataaaaataaagtccctatcctcaaggagcttatatactttatttagcttgtctttccagcaggtagcagcacatagtaaacaatagatgaagagagtttgagtggataggagttgttcttgtcattgttattagttgggaaatctctgagaacaaccttgcccagggcaggagagtttagaacatttactttgtttataatatttatttattttctggttattgaaaactatattcagtatacaaaattatatatatatatatatatatatatatatatatgtcgaaagaagtgagtagaaactcagctgaaaacacatatgaaacatttattgatattttatgttttcttgctgtatgtttctgtgtatgtgtatatgtaaggatatgtacagttcttcaattgctttattggaatataattcatacatcatacagttcacccatttaaagtgttttttgtatgttcacgggatggtacaacaatcaccacaatctaaattctagaacattttcatcttcccagaaagagattctacataccatttaattagcaatcacccccaacattgcactcccttgctccaggcaaccactaatctactttctgtctctatggatttgactattctaggcattttatataaatggaattatacaacatatagttttgtgatttgcttccttcacttagcataatgttttcaaggatcatccatgttgtagcatgccagtactttatttatttttatagccaaataatatttcattgtgtaggtataccatattttatttatccattcatcacttgatagacatttgggttgtttccactatttggctatcaggaataatgctgctataaacattcatatacaaggttttgtgtggttgtatgccttcatttcttttgcttatctgccaagtagtaaaattgctgggtaatacggtaactctgtgtttaacattttgagcaaataccaaactgttttcaaagtggctataccaatttatcttcccaccagcaacaaatgaaggtttcattttctcctatatttcttaacttagggaagttcttattgtatataggtaagattttactgtataaagcagacttaggttctgctttacaaactacacaagtgcttctctcttataaaagaattacttgtaatggctgtattagtctgttcaggctgccataacaaaatgccacagtttaggtgatgtaaacaacagaaatgtattttcttacagttctagaggctggaaagcgcaaaatcaagtttccagcggggtttagtttctggcaagggctctcttcctggcttgcagacgggtactttgtcctcagatgaccttttctcagagcacatgcctagagaagagagagagagctctggtcgatcttcctcttcttataaagacaaaaattctctcagattagagccccacctttatgacctcacttaacgtttattacctgtttacagtccctgtctccaaacacagtcacattaggggttagggcttcaacatgtgaatttagaggaggacacaattcagtccatagcagtggctaaaaaaaaatggtctgttgcaaaattctatatgaaaatgatgctctaggagcacgatattaaagtttaaaaactttttccttaaaatatattatttgcaaattttctttaaaattcattttgttgtgttagctacatacccttcacgtccaagtgtggataaaagtgtctttctgaaatttctcacctgcatctacttgcaatctggaagaacagacttcacactctttcaaaagatatttaaattttctgtgtagctcaactgttgttgtctctaactccatttctatgctagagaaaatgatgccttttacaccattgagagcctgtataatcttgaaagttttcatttgaactgatgaaggaaaagaggccatcctagagttagctttattggaagcttctactaagcaaaacttcagatttccaaaggaaactaattggaaccctgaagcagatgggaaaagcagaaatttcggaacacctcggtgacctcattacaagcataatgaaggaggcaacgatggagttaattagaagagaggcaagaaaaagattaaatgagagtacaaaaaaaaatgtaactcagagaaagagaggcattcagcaagaaatagaatatgctgatctctgcaaaactattcagaaccgagggagatgggagctagaatcaaacaaaaggcatataaaccaggtggccactgaggatgaaaagtctgtagaaaacacaaagagcgggcacctgggaaggaatgaccagatatctgcatcaagcagaaaatatagacttggtagccaaaggaatttagttagttacacaagaggagtcgttcttaattgggtgacactgattgtgtgcttgtgtgtgtgtgatggataaaagtcatggatttcttaatagtcacaaatagatattagtccaaatttgtccattgccacttaaggccaccttaaactgttaacatctttaccactttctagcctaagggctattactccactatgtgtagagaccaaacagacctctaaagatcattattttcataagcaatatttgcccttcagacgtaggctgcagatggtaaattttaaaacttgtccatgaaatggcattttagacatgtagtttgtccatttgtttatggctcatactcattttgagaacaacaagaagacagtttcatagctctaaaattcacgtgtgaaagtttgttgcaagaaaagaataccatgctttctggtccaaatataattatgctgcttgtgtagactggaggcttaaattgtaagaaattgtagagacaggatccagaaaatattcagttgacacagactagcttctagaaagttcagctccaaactttatttccgaatcatatagattagctagttacaatgagcccacagattagaaatttaccacatattttctttatttatatttgaaataatccaggtctacaggctgtggttgaattgaacatgaaaccgcaagtttgatttgctgtagttcaccttaaagccacgtggtgatacatttatggctccaggttttcactcatgtacctcccccagagatgtcaccgggcaagcatcaaattggactaaccagtcatttttgctctagtcctacagtgatcaagaatgtaagatttcttctagctcagcttgttacatgaataatgtagaaggtacatttctcacatgtatcatatcttcaaacctcttacagagctatattccattgtatagataaattaaaagttaatgcttcaaacttcctttacagcataaaagaagaaataaaattttaaaatataaacaaagaaaaggggcaagttattttgaatgt

SEQ ID NO: 1881862 - DNA, 4001 bp, Homo sapiens
gaagagataatacacagaatgggagaaaatatttgcaaattgtccacctgacaagtgattagctaccagaacgtataagaaactcaaacaattccatagcaaaaaaaaaaaaaaaaaacaaatgattcaatttacaaatgggccaaaatttatcttttggctgggcgtggtggctcacacttattttattttgttttattttttattttttgagacagtggcgcgatctcggctcactgcaagctctgcctcccgggttcaagcaattctcctgcctcagcctcccgagtagctgggaccacaggcgcccgccaccataccccagctaattatttgtatttttaatagaggtgggaagccaggaaggtctcgccaggaaggtctcgatctcctgacctcgtgatccacccacctcgacctcccaaagtgtgggattacaggcgtgagccactgtgcctggcccggctcacacttataatcccaacattttgggaggccgagtggggtggatcacttgaggccaggagtttgagaccagcttggccaacatggtgaaaccttgtctctactgaaaatacaaaaattagcagggaatgatggagcatgtctgtaatcccagctactgggaaggctgaggcaggagaatcgcttgaatctgggaggcagaggttgcagtgagctgagatcatgccactgcactccagcttggacaacagagtgagaaaaaaaaaaaaaaagcaaaagaaaaaaagtttatcttttaacttcaactcactgccagcagtaagtgtgaaaaatcacaaccaaacacactaacctgcaaatttctttcataaagttgacatgaccttaattggttttcatcttaacattgaaaagaataattgcattagtaacttgataagtattctctgcattctcagtgtggtcctgggacagccagcatgataatcacttgaggttactcattacaaattattcctaaaccctaattcacacctattggatcagcctctttgaagctggggtttgaaaatagacatttaacaatactctgtggtacattcttttatacattaaagtctttaaggaccaccagtttatttaaagcttcattccagtcatacaggtttttgtaatcttcaaacaggagacaaaaatttggtttctcttatcagagaaccatttttgtgagttggtattttgggtatggtatgaagaggcacttgttagactggcaacaattacagtagatccccaaaaggcttggaactttgcatcaaaagaaactgagaacagggcatttttggattagcttcagaggatttttttttctaaatcaaaagaaaaccagaatatgttttattgtgaaatagatgcactgcactggaagaattagtattttcaaagaaaacaagccgtcttctgttagtcatattaatttattaactgtttccttaagatttttctttcaaaacaaacttttactgtccagtcacatgttttttatataaaatttaattaaattataaagatgtctaattacataaagagagagaagcacaagcacacacaaatataaaatgaggtagaagaaaatttcaaaggtcatttttttcctgattaaaattcataataaaattaaaacagctatgtttttcatcaaggaagtatttaagcagctaatttttatataaatatattccatgctagttcaataaattagaaaaaggagcataatcttgttaagatgcaattcagagggaacagtgaatgaatagctattaacatgtgaaagcaatgaaatgaatgtactgaataaataagccctaaaaagctactcacagctaaccaacagaatttagatttttttgttgttgtttcataaatgaggtaagacttacttgtggagtaactgacttcgacattttttttaagatgccaggaaatttttcttttgcacatttcaatggcagtcgagttctgcagcagcttgagaataagaccaagatcacacacttatcaggaacatgtgacaagatcctgtcattttgtcagaacttggtgttctgataagcttgctagtggctccttcagaaataccacacaaaggattgtgggtccgattaagcatccaaggacagatattatgatattttgtttcccctatcttttttattgtactgttttccttctcaaaacctactaaatttaaaatttttgaattataaaataccttatttcttctacttacttagaaaacaaataaacaatcatgcaaactacaagttgccactgtttcagctttggtttggacttggtttagacttgccatgagcactaaggaaaaggaagagtatgcctcccatttctcagctggaaggcttttcttgagcagctaggcctaacaaaggtatttacataatttcatctttcacatgtaccatcaaggccttattaagtttagtctaaatagaattacaactgaagagatgaagcagtactcattgtaagaggaaacatctctagagatatcctggatttccctctttttgatgatcaaatctttagtgattgcgggtcactaatggaggaagcatttgtgttgctctgatcccaatattccaatattgattttcattaataacactaaagatgaaactactgtacggtacaattatattttttaaagttttatgtagaagtctttgaatatttatttataaaatgtgtgaataagaaaaaaacatgattaaaaaaagggaaggtttctcactcttgaaaaataaaccatgcagtctgggtgcaggggctcacgcctgtaatcccagcactttgggaggctgaggcgggcagatcacgaggtcaggagttcaagaccagcctgaccaacatggtgaaaccccatctctactaaaaatacaaaaattagttgggcatggtggcacgcagctgtagtctcagctactcaggaggctgaggcaggagaatcgcttgaacccgggaggtggaggttgcagtgaggcgagatcgcaccattgcactccagcctgggtgacagagcgagactctgtatcaaaaatagaaggaagagaaggcaagggggggggaggggaccatgcatattaattgccaacaatcatagaattgtttaatgcatgattatgatattataggcaaaaatacttcttaggcaagctgtgagagatgggaagaaaattagagattgttcagcaaagggagttcgaaaatcagagagcaatatttgtgctgtttcagacacagacactgttgttaagtattcataatagtttgaggtttcttttagatgaatatgccaggaaaggcagattttgctttgttttctcctcttttatttcttttactagtttaaaaaagactagtatagctaagatgtgtagtagctacatgatagtatttacaatgaccataaattccataaaattctgatgctctttatggggcccatagagaggaatagctgccttaaagtaaacggcaatataagtaaacaagattttggttattcaaaaaatgatttatagtgatatatcttaccagatgtttgagttaaatggcaattcttaatacttaaagttaaaaagaatccatccatgtctagtatgtcttatttttctaaatattgctaatgtgatttcccttggctgatcatttcttataggaaaaaaatctaatttatgcctaaacaagtggaaaaaaattttcatgacaaagtgcaactgcctatatcctatggttgtcatttatttcaacattcctgtctgaagctgtattagaaatggctattctgtggagttcaaggaacctcctgcagtttgctattaaaatcattcattcaaaaaaatccattcagatcctactacgtgccaggacagtgctaggtgttgaagctaccaatgtgaatacgacagacactatccttgactgctgggaactcacagttttggtggcaggtgggc

SEQ ID NO: 1881863 - DNA, 4001 bp, Homo sapiens
tgtctgcctaatgtccgggtccagtacagtgtcttctgtgtgctgaaagacagtcggagtttctcttcttcctgtggttttgtgggcagtgtcgttttgtgccaacctgctgtctgggactgatgagcgctcacccagccaccctgagacttggtggtggacagatgcaccctgcttcctgagataggtgctgggacccacagggtgttgaacagatccctctggtcatgaaaatggccctctggcagcctctcagtgacctgtgtaaaccaaaaataaaattctaagtcccccaaccatctgaatggacccctcgcctcggccaatagccttccaaagttaacctgaaaaactagtgcaaaccgtggtgggaagggagggtcgaacgtgcctcattatttcctgctcccttttggaactcaggcacaactgaccagcattaacattaaaacagaccttaggattgacaaagctgattctttgtagcaataagacaccaaattccagcctggctgtagtatagcatcacatgacagagagcaggccctgaaaaaaaaaaatcaaagtattttgccccaagttatgtttatttgctgtatctcaaaatagtcctgcaaagctgtctcttgtggggaaaatctatatttcgaagagaatccccttccttttcgtgctccaggagagaattaattctgataagaaacatttacaacctattctctctgaagcctgctacctggggcttcctctgcataatgggaaccctggtctccacaacctctcatcttaacccagacattctcttctgttgattctaggtctttagatgataatacaactttttcaaccaattgtcaatcagaaaatctttgaatgtatctatgacttgaagcctctgctttgagttgtcctgccttcccggaccaaaccaacgtacattttctatgtattgatttatttcttgtatctccctaatatatataaaaccaaactgtaacctgaccaccttgggcaggatctcctgaggtctgtgtcacgggctattggtcactcatatttggctcagaataaatctccaagtattttatagagtttgactgtttttgtagacacctgggacaggaactcttggcagagcagacccctggaggcagcacccctgctgctgtgcctgctttcaaaaccccatggctcgtccttcgtcccctcctctctgtctctctgtgacttgaagaaggatgaaaggcggcctgcaggtggaccacaaaagtgggaagcatcattcccacccaagaaaggaaagagaacagaagacgcctgatcagagccttcctgaggtctcatctcccctatctccggggagctgagaaccacccccaaggatttggtgggtcccctccccaacaggcccctccacctctggtgaaagagctctgcccacttctctgcttagtctgagctgataggagggaaaaggagagcactgtatgagtcacaggtctcattacctcccctcatagcccaggggaaggggagatggcagaggcgggtagcaggcagggctggggatgtgccatggggttcccctggcttctccccacagaggctgaacctcctgggggaacatttgaaagcctcagagaccagctatggtgccaaatactaatggcctcagtttcccttcctatcccccacctttgcacgagtgtgagtactcaccccccgtcaactatgtgaccttgggaagacccctctgaaagacctcacaccattcatgttagtcctccttccccacctccccacaccatccacacaccacatgcatcaagccccaccgacttcagtcctcagcatcctcgcccctcaagagggctgagaaaaggaaccatgctcttcacgagccaccatacagacgtgggaattcccctgaaggtcagaaccacagctccttctcagcaactccttctggccccaggagtgggaggtctcatggtcccaaacaaaacggaattgcctgtgactcatacccagccctgcctattgagaaatctacttccggtgttgggggtgtggggtggtgcggaactggagccaggaaggggtgtgtttgtgtgtgtgtgtgtgtgtgtgtgtgtgtgtgtgtgtgttcctcagcttcctggctactgagtcttctcaagaccagagctccctggcttttcagaaaaccagctctcaaatcatctagatcatctatcccccttactaggtagtccagtgtggcccaaagcctatttggactttttttttcttaaaggagaagaaaaaaagaaccaagtgaaaacagaaaataattcagccacgtgaagctgaattattatagctgccccatgtgagtcgggaaagagaagggtgcttcctaaaacatgttagacaaggcactctgcggcttagtcccatcctccacgccccgaagtctgcagctctctcatcatctttgctgcttgagttttgagaggggcccagtgtgccttctgcaaagcctgtgccacttgcttcgaaatgtggctgtctctggagggttctcacgagtcccacgctggatcctgagggcacagaactgaagctgtttcagtttttggtttgcatgttgttgttactgtcgcaaaagggaaatatcaacttggatattaacaaaatggagaactgagacccaccctgcgatttttgccattttctcattttggtagaacaagagcaaagaacaaaggcgccttctaatggcataacctaacttttaaggtaacagcatcattatatgtttaaagcaagaaaagaagaggaaataatgtttgtcaaaatctatcatgtgtcagacattttaccgaactttctcccctaagcccaatgacataggtacttgtgtccccattccatgatggggaaatgggggctaagaaaggtgcggtgacttggttaaggtcatacgtgtagagatgaatgctagagaaaggattcaaaatcaggtctggctgttgctgagtttcctgtattttccaagttcttacactttccctaacttccctgccttcatctctgtcctctcctctgcttactctgttcttttctgttcctcaaacacacaaagctcattcccacatcaggactttctgtctctctttgtttggctgcttcctttcttatcatttgggactcatcacaaaggccaccttcttgtaaggtgacctgaccattccttttaaagtagtaccctctgggatattgctctgttaatttactttacagtacttctcactcacctactttgtttatttccgtagtctgtgaccccctacccacccctcactgaccctgcaacagacactagaatgtagggctagtgagagcagaggcctcttctttcttgttcttctctatatccaaagagtctggagaaatggctgggacattgaggacattcagaaatatttgttggatggataggtgggtgggtagatggatggataaacaggtgggtgagtagacggatgagtgagtgggtagatggacaggtggatgggtagatggatgagtagatggatggatggacggatgggtaggtaaatgaataaaatggtagatggatggacaggtgggtgggtagatggatgagtagatggttaaatggacaagtgggtaggtagatggatgaaagagtagatggatggttggatgggtgagtaggtagatggattagtgagtagatagatgaatggatggatgggtagatggatggatggatgaagatgaatgagttggtgaatgtacgtatgtatgaatgtatggtgtctactatatggcaggttccagtgaggatgtagagatgaataaaatgatgtctctttgatccaaatgtttgctttgaaatgagggagaccttctcaatagtcaagtagttgcatcaaagtatattaggtgttctgagggaatatcagatctcaaaagcacatttgggatagaaa

SEQ ID NO: 1881864 - DNA, 4001 bp, Homo sapiens
aaatctatacaggatattaaaacaacaccgctctgcaagacagttacaattaaaagctgacaccccccaatgtgtcggacacagtggcttgccagcaaatgtaagaaagtcttcctagccaccggtggaggagcatcacacactctgcggttggagggaaaggcactgattataggagtttctaattaaatcagaacacccatcccttctctgttttgaaacagcatagttattaaacaaatctcacaggattactcgggaaaccccatcaacattacccggagtctgtaatggaagttgcaggcctgcagattccaacagaagctgtgaatggggacgccttacaagtctcctgcaggttagggaggaaagcaggaaggtccttctggccctcacaaggggaaagtgttggaactcagcctgggtcgggaccgcctcctggtggagtgctgtgtcagccaggggctgatttggttcaactgttgggtggcttcttgccctagaaacctttgtgctttgtagaagttcccactcctgactgggaacctaaattgtcactggctctaaggacatctgtccctgacttattttctgtgttttgcttcctccagctaagaatcaaaccagttccacgtgcctaaagcaggtccacaaagcaagacatagatgaggcttattcttaacccctaaggtgctgagcaagcagggcagacccaggccagggctgtcccgacagaagagtcctccggtagcacctgctttggaaaagcattttgttggttacccaggaggcttcaccatcaggacactaggcctcggttgaggggtttgtgattcacccatggtgaaagtttaaacatttcaagagaaaaataaaggtaaaaataggcacagtcttgtagtttttaattttagacagaagatagctgaaaaacatcacacctttccttaaactacttctttccttcctcctgtgcacagaaatgcctccattctctcttcccctttttgctttttaagttccaaatcacttttgtttagctgatttatcctttgtacataattattccttctctctctctctttcttgctctctctctctctacatatttattttcatgtgaagaacaagtggttctttgtgacttggaatgaaaactgaagactcctataaaacaaacactctggaattgagagttggcttattcaaagaaccacagtctttagataattggcaaaatgagatctattggtgactctttatgaagaaggaatttgtgttaatcagacaaaactaggctatgtgtttgacatggttttggataattcaggacttcactgagcagacttctaatctaccaactctgtcaattaatatggctttacctatgtacgtctcatttcgctaacaaaaaggtgttaagtgtttcaattaatagaaaagcttccacccaggtactgcccccatgacccgggcaggtatttcactttcctgagcctgccaactgtccatgcaaacagtaatagcaccacacaaagttgctggaggctgaataaggagtgaggagtgctgaatattggctgttccccatactcagggtcagcaggcaatcaacttttctaccagaaattatcttacaggtgtctataacttacctttttaaataacaattttgaaactttttatagtaattttcttctaaaacatattttatgattcatttcattacagcagaatgcaggagacataatttgatctctttatgggggccggggcaccccaaaatccatgtgtttatgaagtggctacttagttccaagccccagggacctgacggtgagctcggccctcgcaggagaagggcaggggctgggggcctctgaacggtgcccacccagtcttgaggttcgggcaggcctggatattgagtaggatgaccaggtagcctgactctccacggaacaaatcagctgagtaactcactgtcttcactgcttaatatctgcagtccattgcgggcgcttcactgcattgtcgattgtgatctcacgtgcgaagctgtgagggaaacgtggtgatgcctatgtgctagaagaggaaacggaggcgcacgtgtcactagcacgtgtggaagccacagctggcacttgccttctgggacttctaagcctctcacccacaggggcatggctctgggacctgacagctgtttcccatctccgggtacattgccaggaggaactgcgcgaccataggatcccgctctatctcccgtccctccctgctagggtcctaacctacccgctttccctgccctgtctctcttaggttcttccaccttcacggtaaccaacagaaccaaatcatgcccagtctctggggaggcgcatggggtggcgagacagccccgaggtttaagccagacacctttgagttttggtcttgcctggattaaggctgctttgcttcaccgtttcaccaccttggagatgaagaaagtaagacttattgctcagggtttctgggggaatcaggcattatgcagagcacatatttaacaaatggtgggcgctcatgtgagatccctcttgcctcttcacaacacggcattcaaattcctccagtggaaccctggtcaccaaccccatggctcagagaccttccctttcctcttgagacacaggcctcagccttagtgatggtccccaccccaaccctccccaccttcctgtgtcctttgcatgaatcatgctgtggacgagctgagcccccgggcttctcctggttctagttctcgcttttccccgcagtttcctgaacctgtaagcatccccttcctcttttttaccctcactgcagttccagtgtagttcacatgctggccccagcaagactgcttggtgactttcttgtcccttgtttggattgaatatcgatcacgcgttttccttccccaatagtatgatttgcatgcagaattcatgtctggcccttcacagggctgcccctaatggccatgaccccagcgttaagcaattacaagtgccggtgagttttgagtttaatttcttaagaatttttagttttttaaaataaaaccgtattttaaaagcatgaaacagatttttaaatgtctaccaattttgagtttagaaaagttgccgccaataaaatggaacagaaaaaaatcaattgtattcctcttgaagcttccatttattttcaaattaatacaaagaacattgcaggtcatttatctttcaataaaaatttatttcttaaataaggctcacatatctttagttgttgccaatagaaacttttggttttattcagtcatctcttagagagagacttagagcaatttttagagttgtctggacaggcaattgagtgggaaaggccaaggaacaacctggagtctgatcacctttatttaaaagtctgtatatatattattaaatctattatactcatatatttcttattttaacagagggtatatctgtggtgttcatgtaaccattatcatttcaatctccgtcatccacaaataagttttctatggcaaacatatcactggtttaattacgatttaatgtactcccttccacatttcagatctggagtccacgtatttaagaaagtgtcaggaggtcacccgctactcaaattgatctgaattacagcactatcatatgtaattcataaaatattgtaatacagaaaagggccctgtacacttaaaaattgggtattgatagtgcatggctaataaaatatggacaagtggtagtagcttaataatatcccttaggtatcattaaaataataaattatatctgggttcacacttcattcttaaagtagaatttttttatttaaatggtggtcactgcttacatgaggtggatttgacatattaacactgtttgaacagccctaaaacgtcatactttgcatctaaagctaattgttattttatttcaatacttccata

SEQ ID NO: 1881865 - DNA, 4001 bp, Homo sapiens
tccaggagttgccgactgtcaggatttcctgctaatgaatctccaagctgcctctcagtcacccagcccacccacttcctttaccattgccactcttagtagctatttttcttttattttctttccttttcttttgttttcctttctcttcttttttcttttctcttctttttgaaagaggatctcactctgtcacccaggctggagtgtagtgacatgatcatggctcactgcagcctcaacctccttgggctcaggtgatcctcccgcctcagcctcctgagttgctgggattacatgtacatgctaccatgctcggctaatttttgtattttttggtagaggtggggtgtcgccatattgcccaggctggcctccaactcctaggctcaaggatctgcccatctcagcctatcaaagtgttagtattacaggcttgagccacagcagctggcccttagtaacttctgaacagaatttctctcctctttgggccagtgaagaagagaattcagactcagcattccgcctccccagacataccttttaaaaacacacacacatccttaaggttttttttttagcttctaagggtctgtattgccagtaacaacagagaagggggcagggactgaaaaggcaaaaaggctccacccagcactcccctcttttgctatttcatttagatattacagagaaggaaggaagacattttccccacccctgagttttctttgggactatctgggacagaagatctctctgcagctcttgtagacctgagcatttcatttctagagctgagatgtcaggagaggagtctgggataaatgtgaggaaatgggatgaatgttgccaagactaatattaggggtgggtggggactgagaacagctgtaaggcaatgttcttccctaccttagcctccagagctcatgctggaccagctggaggatgtgaaaatccagaggaggtgaggatctgggccaaagaaagggcaagaaagaagggagatctcaagtcaagcaattggaaggaaagggaggttcccatagtggactctggggcaggagagatggaagggttgggcatttgggctctcacacgtgtgtgggggtggggagtatgggggtgcagttaagggacctaggtaactgagcaaaattgggcctgtaaggccaattgcaaagctcgcttctgcatgtaatgtgtgtaccatctgtctctccatgccactaggagcactaataaatgttacatgtagaaacttttgcactagcttgtacattaaaattccatatgccaattgactggactacatgagcgcatctgtcaaaaacaggtctcttaggcccaatttaggacattccaaagcagctttataactgcttcagcctccaaatggtatgaattaactctcataagccaagtcaattctcactgagtaaaggattcggccaaatgtccaaaaaattcaagtcaaaaacactctcttccctttattatagagaatatcagtagtaagatcttttttcccccaaaattgtgctgctcattgactccgtgtttgatgtcatactgttaacataagttaatatggtcaaaatgataaaatgctttattgtattatgggcatgaaaaagaccatattttgcatttttacaaaattctgtttttccagttatatttacaatttacagtgtatgctgatatatattaagtggttaaatctcaggtgccaagtgtattttattttgaaaaagtaaatatgtataactcccaagacaacctgtttagacccattctctcccggcaatggaagatgcataaagaagaatataatcctcccttttaaggtaaagcttagatttacacttcacatgcccaaactcagcacatatgttacctctaggaactggaaattttgcttcttttcctcatactgatttttttgtttctgttcttattaacttttatgaaaatatctttagaaaagcaagtataaatacatgaatgaataaatatattggatgatagaatcagaatctttaaatatctcaacatgacagaataatggggagattctaataatgaaatgtaacaagtatgaatgccagtcacacctatgttccaggaacaattcatcataacagcaggatatgtaaggaaaggcttagggatttcagttcactatgcatagacctttttttttttctttttgagacagggtcttgctctattacccaggctggagtgcagtggtgcaatcatggctcactcccagccttgatctctcaagctcaagcactcttcccacctcagcctccctagtagctgggactacagccatgcaccaccaaatctggataatttttaaattttttgtagagaaggggtctcactgtgttgcccaggttgatcatgaactcctggcttcaagtgatcctctggcctcagcctcccaaagtgctaggattacaggtgagagccaccacacctggcccactactaacagactttagagagccattcaggctactcctcaccccatgcaatcttagactgtgttactagataaatgctgtctaaaaaaggggaagagataacctttttctccactttgtgtcagaatactatattcaaatctggacacctcatttcaacaacagattgcagggatccaaacaaagaaaccagcttggtgatcaaaagagtgcctgcccctcaaggactcccaactcagtggggttggtattgacatagcagatacacaaaatgtattctagattggtaccaaaactatggtgagtagatggctgtgactgggggacttctcaattgattgctcagtccattagaggtggcctttttgtgcctattggctgttatcggctgccttgagtatattgtctatatttgatcctcagtatttttgtgtgtgacttgagctttgagaattaaattaaaatgatatatattttactatttaatcctacaaaagttattcaactatcaataaatatgtcaagtgctgaaaagaaaaaatatcaacaatatcggaataaataatgactgtctagttattttctcagctgggcctagtggctcatgcctgtaatctcaacactttgggaggccaaagcacaaggattgcttgaggccaggaattcaagaccagcatacgcaacatagcgagacccccaactctacaaaaaatagaaaaattggccaggtgtggtggttcaagcctgtattcctagctgcttgggaggctgaggcaagaagatcacttgagcccaggagtttgaggctgtagtgagctatgattataccactacactcgagctactctgcctcttaaaaaaaaaaaagttattttttcatatgaagcaaaagttaaacattcatgtttagaaaatcagttattttcaactgttgcttttgctagaaaagtaccagttttgaatttttttttttttttttttttttagatggagtctttccctgtcacccaggctggagtgcagtggcatgatctcggctcactgcaacctccccctctgaggttcaaatgattctcctgcctcagcctcccgagtagctgggactacaggtgcacgccaccacacccagctagtttttgtatttttagtagagatggagtttcaccatgttgggcaggatggtctcaccctctgacctcgtgatccacctgcctgatttttttctttctttttcttttttttttttttttttgggacagagtcttgctctgttgccaggctagagtacagtggtgagatcttggctcacggcaacctccaactcccaggttcaagagattctcctgcctcagcctcccgagtagctggtactacaggtgcgtgccaccacgcccagctaattttttgtattttagtagagatggggtttcaccacgttggccaggatggtctcaatctcctgacttcatgatccgcccacctcagcctcccaaagtg

SEQ ID NO: 1881866 - DNA, 4001 bp, Homo sapiens
gtgaaaagtcgggccgatattataaaaaccctgctgagaggttttaatggaagcggacacggtgggcacattctccagctccaattttctcattctgaaactgaccgaaggagtgtagcaaaaacccaatgcacatcatctaatatctctaatatgcagccgccttttagcctctggagaaggacaggtattcattttcataaattactttttaaccatttttttttcaaagttggcggggagtggtgaaagaaaacagagacaaaacagatgccttcagccctttgatcagcctccctgcagacaacccggctgcccgatagcacctcttaactacagcttgccgggaagaaaatgaggggttttaacgctgcaattacagtgcctgctgaaggcctgtcatcgcagccagagggacctgatcccaccagttcggctgcccccagaattacaaccatcgggcagaaagttaaataccccctgcggccaggcagcttccacaggccctgaagctctgggccagccgcccccaaccccctgccccctaccatggttcccccatccttgtctctataaatatagaaaactaagaccatacacgccagctcagccaggccagacagaagagaagggaacaggagacagcggccttatctcacacccaggagtcggggaatgtggccgaggcagaggtcagatttctggaaacagaaggggggaggcctgttcccccccaaccccctgccaccccaccgactatagcctcttgcttaatcatctgagagcagtcaggctggctttctgaacactgaacatcaaacacctattggcttatctcaagaggagagacaggggagggtaatattgactcaggcctctatactcgcctcaggctcagcccccggtgctttccatgggtcctcctgccccctgcagctggtatctacaggagatgttattacccaaccccctagcatggcccagggccacacacagtggagcccccaagttctctctgccacatcttcctttacacttggcgcaaatctacttgggatgtctgcaaacaagcctagctttcttgcctctaggccttggcagacgctgtttcttctgcctggagccccctcctttgctgatttcccagcggactccccctggggaggctctcgcctttgaaggatctctctgagaagtcttgggggagccccctgccttgtccccagcatcctgtggcattcccggcgccccttccacgtgaggctgcaggggtctgacaccgggggtcttcctcactgactgtgagctgcttagggcattgatgggtcacagtcatgccacacacactgtgcctggtacatggtagaaccctgaaaagaactggttagataaatgagggactgggaaactttcagaagagaaaattcttgctcatagaagttcagtcactaggatggggatgctggaagtggggttaaaacctgggtcagcccgaacacacagccagttcttcccagaagggtgctctgcctgtctggggaatgacagtacatgtgccaacaagggaatacgcatccaacacagtgccctggctctcagggccaggactagccttggaagcagaactgaaagaggtatctgaaaaactccgttatcaaaatgaatcatattttaacctgatatcttccaacatcaaaacgaacacaaaaccccactctgaacaaaataccaaattttaaaatacagacagggtcagatttgctgacctcttctcttacctcaggttcaaacatgactcaggatgatgctgttggctttacgttgctgatgaccttagacatccttcattgctccctctctgggactcagtttccccatctgtaaaaagagtccaggctggaggctcctagaggctcttctgacttcaggctggtgtaggttcattcccaggccagcctgcctgcggtttctgtccctctgtggccccaaagctggggaaggtgtatggatgggcactcacttccagatcacgtctcagcctcctgatcctgggcagcacctgggctgagtttcacaagtgcctcccgaagaatgctcaggaaggtgcccggaaccgaggtcaactacagacgtgacgttgctacgtttttggctccaaggggctaggatgactcaagggtagtgcttttggctttttatggcctcagcgatgacagcccatggtgaagtcaccctgggatgccagctctcgagagtcactgctcttcctttatgtggctttttcacttatttgcctgactccgtagcagaaatgcttttattttaagaacaatgagagggacaactggggaaatgttgcagttatttgcttcaattcttctgatgtttgctcattgttttggaattacattctcattctgtcttctctcacaaattagtgctatacatccattccagccactctctaactcattcgttagttgatccgcttaaataaatggtgctggtacctgttgagtgtcctcagtgagccatgccaggcaaccatccatttgtctgtgtagtcccagcgtgcatcatgcacctaccccatgccaggtactgggctaagttctgcatttacatgttggagcaaataaaccacatctgtatcttgcagagctgacaaaaggctggagaacactggcattagactaaaagtaaatcaacaaatctgtagctaccacttctgagaagagctggaaagaaaaggcgcacagcactctaaaagcttaagacaggaggatttagtctggtctagagatctgaggaagcttctccaaagaagtgctaatgcgggtaagatatttgaggaactggggtacgatggctcacgcctgtaatcccagtactttgggaggccgaggcgggcagatcacttgaggtcaggagttcgagaccagcctggccaacgtggtgaagtccgtctctactaaaaatacaaaaatagctgggtatggtggcatgcacctgtaattgcagctactcaggaggctgaggcacaagaatcacttgaaccagggaggcagaggtagcagtgagccaagaccgcgccactgcactctagcccaggcaacagagagactctgtctccaaaaaaaatttaaaaagctatttgatgaactaggtgaagtaagggaaggaagtgcatctagcacttgcaaaggccctgagataaggggctgatgagtttgagaaactggagcagggcttaggtggctggagtgcagagagccgtgggcctccgtgtgaaatgcagctgaagaggtatgaatacactgagagcagcatgcagggcatcgcaggccagatcgaggagttggagcttgacatgatcatcctgactgcagtagttgttactattaccattgttatcactatttttccgatgaagaaaataaggcccagagaggttcactcactcatccagcaaacatttattaggcaactactatgcgccaggcatggttctgggtgctgggatatagctatgactgggacaggctgggccttgttgctgtggagcttttatccatacatgcagcagaggcaggatggagatctgggtctgcccgttccaaagcctttgctatttgccgaccttacggtgtcttgggcccagccctgggacgaaacatactcagggtactcctcaagagcttaccgtctggtgtgagctgccactgtggtttgtccactggacccagaatcagtatcctgcccctgccaggtattacagttgcttcctaaatctccaaagaaagaggctgaaacaggaatagggctgtggccctggtgagggaagtggcagagtaaagctctccagccctgcagttgccgggccaaattcagacccaccttttaatctcatttccactttcgtggattaaagatggtcacaaattctttactgatcttttcttcgagatagagactgcttccctctccgttttgactctggg

SEQ ID NO: 1881867 - DNA, 4001 bp, Homo sapiens
aattgtgctgcaattaacatacgtgtgcaggtatccttttgatataagattttttaaagcttctgttcagcaaaagaaataattggagtaaacagacaacccagagaatgggagaaaatatttgcaaactatgcattctacaaaggactaatatccagaatctacaaggaagccaaacaagtcagcaagaaaaaaaaatcaaataatccaaataaaagtgggcaactgacatgaatagacatttttcagaagaaaatatacagatggccaaatgtgaaaaatgctcaacatcactaatcatcaggaaaatataaattagaactacaatgagataccaccttacccctgcaagaatggccattagtataaagtcaaaaaacagtacatgttggtgtggatgtgggaatgcttatacattgcaggtgggagtgtaaattagtatagcctctaaggaaaacagtatggagatttcttaaagaactaaaagatctaccatttgatccagcaatctcactactggatatctacccaaaggagaagtcattatataaaaaaggttacctgaacatgtacgtttattgcagcacaattaacaattgcaaagatttggaaccaacctaagtgcccatcgaccaatgagtgaataatgaaaacagggaatattactcattactactcactattccagtacaccatggaatactactcagccataaaaaagaatgaaataatgttttttgcagcaacttggatagagacagaggccattattttaagttggggaacccaggaatggaaaaccaaatgccatattttctcttataagtgggaactaagctgtgggtacacaaaggcagactaagtagtataatggactttggaaactcagaaggaggagggtgggaggtggttaaaggattaaaaaaactacatattggtatgatgtacactacttagtgcacacgagggcactaaaatctcagacttcatcgctctacagttcatccatgtcaccaaaacccacttgtactctaaaagctattgaaatttttaaaattaaaaaaaaaacactggattgccttcctgtaaaacattagtcactttgaaaatacacgtgcatttgtgtgattctttgatctatatgtaccttctgatgagaaagtaggctgtcagatcataagaataaagacagtgtttcttttgctcatgattatgcctacagccattagcatataacttatattaggttctcgataaatattaattgataaaatggccagagttcatatcccaagacttctagataagtacttggccctcatacgcctctttctaatcatattttttaaacttaacaactataccttttttcttgcccatggaaaatttcgttaaatttacaggagcagtactcttcacaccacactttggaaaagactgggaagtggaaagagcagaggtctaggtgttagcaaacctacattctagtccaaactgattattactttctacagtcccgcagggaagtaacggcccctctcttctcctcagtggtctcatctttcaacagactagccccttctaaccccattgttccatttctatgctgttagaatatatttcacaccagttttctccatttttataacttatctccaaggtacctggtatctattgttttcttctgaatatgcccattgagctgtctgtttccagcattcccaaggtttttctcccttttagaactgacttgttccactcacttggggattctgattacttctacagttgctccattcaagccagtcatatttagcttaagggatagtttgtagctgggtgtattagtcctttttcatgctgctgatgaagacatacccgagactgggaaggaaaagaggtttaattggacttacagttccacatggctggggaggcctcagaatcatggcaggaggtgaaaggcacttcttacattgcagcagcaagagaaaaatgaggaagaagcaaaagcagaaatccctgataaactcatcaaatctcgtgagacttattcactatcatgagaatagcacgggaaagaccagcccccatgattcaattacttccccctgattccctcccaaaacacgtgtgaattctgggagatacaattcaagctgagatttaaatagggacacagccaaaccatatcactgggtaaattaacactgaatagggaagcattattattttaataagtgctcctggtttcttaatccaaaatgggagaattcaagaactatggcatagacaagacattttgggaaaggtaagacctttcagtgacacaagtagcattttggatagctgtctatgtaagattgatgctgaaaacagatactaaaataagtaaaccaatgaattccaataaatgtatggctcagtgagtcttctcagctaaaacccaaactatgctgtttccccaagtgtaggaaggcacccagagggcaagtctattgagtcagcaggaagatggattggacgatatagacctggcaaagcctgcaagggtactgcggaggggaagatagatgccaaaccagttcacaacacacagcgggaacattaggaatgccgtagcagagaggaaaggaggaatccaacccagatgcctcacagctggaagtaaaagctgctcattgctagactgttataaagtaaatgatacacaggagtggaaattcacctgtccctagaggtaagaagtacccttgcaccatcactgagtttggattagttctctcacgtgaaagtccctttaggacctgatgaattagaaagcagctccctcccacagcccatctgaaaaacagctttatagggccaaggagcccctcagccctgtggtaagtaaggctccagatccaccaaagtgaatactccacagaccccattctcataagtactcttcagattctagaacacaacctcgttcaagattcactctcaataactttccctctgtagcaggaattggcaaacatttttatgtaaagggccagaaagtaaatattttaagctttataggccattctgtgtcacaactactcacctgagtcagggtagcatcaaagcagccacagacaatatgtaaatgactgagcgtgtctgtgttccaataaaactttatttacaaagagaagtagtaagctgaatttaactcatgggctgctatttgccaattccagctttacagaagttaaggcaaaacattcaacacctcctctcttgccatttgcataaacctaatactccaacaggaaagatctctgaagtcccctaactcacagagttggaataactgccctaatccatgagttctttactctcccaggctataccttaccctaattcttcagtaaaacttaatcacagccaaacctttgggctttattcattcagtgttctaattttaggacacaagacagcaaatataatggcacagtgggaaagagcaccgtagatgcaacagaggattatcaatggtataaatagttctaccatgtctactgttaagaaaactggacttaggagtcttactccttagctttatgtccgactagactagggattaatgaccagagacaagatgattacaggtgagggagttactggcagactttattgattaaaaatgtgaataaaagtataaaataaaaaacagagaaagatgcaatgccttagactaccagtcacaaggccagagacctagtcatggatatgactactggtctttaggtcttgaattaagtctctcagaccaatttttctcattggggaaacaagtggacacatcctgtcagctccctaaataacatgctgtaaagactcttgctaagcttttgaaaaaactcaaactttttcttgtctcttatgactttacccttcacaagttactctgaagccatgggttgcatgacacatccaccccttacccacagacctctatgcagtgtttt

SEQ ID NO: 1881868 - DNA, 4001 bp, Homo sapiens
acctactcctgctctggccctggctagggccctaacttcccctaaggagacagccccttcctgcagtgcttacacccagcagagaccctcagggaggcaactctctcctttcaaccggccccaaggaaccagggccctgaggtgctgttcccagcaaagaggaaactcaacccaggttcaaatcctttttttttttttttctgccacttcccagctgggtggcattgggggagttactccaccactccgagccttggtttccccctttgtagaatacccacagtgagccctagcccaggatgctggcccaggagtgtgctcatggctgggcacgtagcaggtactggataaacagcttcagtgcactgccctctcagccaggaccagaccccagacttggtggaccctggggctcatacagtgtgtagcgcctctttaagaaggagcctctgaacttacaaacatacaatagggcttctgatggggcctatgccggggaggcatcctgaggcctgaattccattcgcttctgctttctgctctcaatccctcctcctccgtaatgaccgggccaaacgtgtttcagaaacgtccctcccaacttgcctgaataagccccaggagcctgagatttttacgaaattgtcagaggcagtgaccatcttagtctcccagcaggatccaagctcccttggtaagtgagcaagacttttgatggaacaaaagcaaaatctctatctgatgagattagctccttggaaaagagcacacagttcatctctaccttgcttggacagtagagctgccagattaaaacagcaacaacaacagctatatacatatggattcaatttaatttgaattccagataatgaataattctttagtataagtatataccaaatattgcatgagacatttaactggatgtcctgaattttatctggcagccctgtctgtcagagacacagcaacatggctattcaaattcaggatgtgttttgcagaagtgttcctgctttgagaagcagctgggggcccttgaacttcagcagaataaccagtggcagaggaagggatatgggaagctgcccccgggcaggttggtgacgcttttaacagctgcacccagagccaggtggtcagggcctgaactgtagcctaaaatgagccttgcagccacccccagagcaggtgttggcacacccatttctgcagatgtgaaagccagagcgcagcaagaaaggaacaccttgtgagcacctactatatgctggcatcttacacgcattagctcatagctaagagtgggcagattttgtagctgttgctattaatgtaatgcaagcatcagagaagcattatatgaaaaataagtcttcttccccacatttgagagcgctcaacctcttaaacctctcagcgattcctcagcctcagcactattgacatcttgggccaaacttttttcttttttttgtcgtgggctgacctgtgcactgtagaatgtttagaagcattcctggcctctagccactcaatgccagtggcacccccctccccgccccgtgacaaccaagaaaatgactccagacattgccaaatgtcccgtaggaggcaaaaatcgcccctgcaaaaccactgctctagaataatcactgttaatcattttgtgaaagggaaataaatcttgggaccccaaaatcactaggccaaagggaaaagtcaagctggaaaccatgttgggcaaacccaccacccatttccttcctgaagaagatagctacaaagatttttaaaagctacttaccttcctcacaattttcccacaaggaaattccttgtgggcctcaagatcttcaccctaaattagttctgttgaatttcaccctggcaatgtaaaccaacagctgatcttcacagatgtgggacagaaagtcatccctctgctcacctgaagcaaatgcctatccgattgcttcctctgccctattgtttatgtaaaaatgctgattcactgagccagactaaggcataagtgactattcttctacgcccccgccccccaccaccgcatgtaaattgtgtattcagtgaaaggctgattaaagactcaaaagaatgcgactatttgtctcttgtctacctatgacctggaaaccaccccctccacctttctggaccaaaccaatgtacatcttacacatattgattgatgtttcatgtcttcctaaaacatataaaagcaagctgtatctcaactaccttggggccaaacaatttttggcctcaggacctcctgaggctatgtcatgggtgcgtccttaaccttggcaaagtaaactttctaaactgattaagactgtctcagatactttgggttcacacttccttgagaatatttttagaatacttctaagcacatgtgtatgcctttaaaaaacaaaaccaaacaacgacaacaaaaagacaaggccaggctcagtggctcacccctgtaatcccagcactgtgggattacaggatctctttgagcccaggagtttgagacccgcctcagcaacatggtgaaaccctatctctactaaaaatacaaaaaactagtaaagtgtggtggtagacacctgtagtcccagctgcttgggaggatgacttgagcctgggaggaggaggttgcagtgaactgtgactgagctactgcactccagcctgggtgacagagtgagagcttgtctcaaaaaaaaagttttaaagagacaggttaatatatacacctcttttatcacttgcctttttacttatcagtataccttggacatctttctgtacatcccactcatgaatctgcatttctcctttgacaactacgtggcatttctttgtgggtattgctgccattgatgtaaccagttccctcactactgaggcagttgagttgtttccagtgttttgctgttacaaacagtattccagtcagcattctcacacatgtatcttgatatatccataggataaacccctaaaagtggaatcactgggccataggtgtgttcagttttaatttgatgtgccacattatatccaaaatagtttgtacaatttactccattgccgctaacatcttgatgaaaagtaccaaacatttagtgagcattgactgtatttcatacaccatgttaagggatttacatgtgctatcttatttaattctcactataattctactggtaggaactaatattatttccattttacaaatgaaagaactttggcttagagtgattaagagtattttctaggcggggtgcggtggctaatgcctgtaatcccagcactttgggaggccgaggcaggcggatcaccaggtcaggagattgagaccatcctggtcaacatggtgaaaccttgtctctactaaaaatacaaaaaattagcccagcgtggtggcgggcgcctgtagtcccagcttcttgggaggctgaggcaggagaatggtgtgaacccaggaggcagagcttgtagtgagccgagatcgtgccgctgtgctccagcctgggcgagagagtgagagtccatctcaaaaaaaaaaaaaaaaaaaaaagacttttctaagcttgtcagtgacagtaccgggatcccaactcagagctctctcagtctaaaacctgttctcttcaccaatacatttactcttcataacaattgtgtgagctgggccccattattcccatttccaatgggattactgaggctccaagtagttaaagtgacttgctcagggacatagaacccaatcacaaatctgagcctgactccagaatctgtgttcttctcttgagactccatgccaactcctccaggaagctctctgggattactccagccatccttatcatctaacccccaagagcagctccttgggagccctgggaatctgcagcaggcatttcaactcagagtgcataggtgtgtgggtgtgtgggatctcacagatgttgaag

SEQ ID NO: 1881869 - DNA, 4001 bp, Homo sapiens
aaatataaaaaacaggtgtgtcttccagaaggagtttagccatccaaggaaggtttggaagtggaaggccaggaaatcaatagagtcagcactaaccaggcggttttgagcttgtagcccctgtctttggtctccagcaggcctcacaagcatgactcagtggtgaggctgccgcacatgtggttttgaaaccaacctttccccttggccccagcagtgcgttggcgtgtccctggggctggtcccagtgcccgcctggaaatgcccttggtttgggcccctgcctgaatctctggaaaggtctttgatctcctcaccccagctcttccattggcttcctcctcaccctgggacaaagtctggcaattgctgaggaaaaggccaaatgccaccttgcaatttgctgggtcatcctggaacaagtgctgctggggctccctgtccctacccaagcagaggaaagttcaggacagtgggcagatgccaccacccccagaaatgagtaaaccaggaggctgggcctggggtgctggctgagaccctggccaagtgcttatccacagtgataaatgaggtcatcatagctgctaaggtcagtcctcctcgggcatgtaaacagcaaataagctcatgattggagaacacccttcgagagaggaggctcctgcatgcagaagatccttcctgagcaccttctgccctccatgtccgagctgcacactggaacagagaggtgaataaaacgtaatcactaccccaaattgcttgccagcaatgacaagagacagacaggtagcaatcagcccacagtacggtacacagagtctgtttatagaaggacactctagagcttgggaagtacagaggaggcatgaaagctacagccgggggacaagtgggagggacccaaggagccagggactaagctggcacctgaaggagaaagctggtggggtgaagaaaggagggaaaagccatccatcctgggtggaagcagcatgtgcaaaaatgcagtggttgctcaggggcctgtaagtggagcccagggcaccgggagaggcgatggaaagaggggagattagaggggaagacgggaccagtgttctcaagttctttcattggggcagtgtcgaggtctggtccagactcattccctctggtccagatcattttctctaaaacaattaaacagaaactcatgcagacccagtgtctccctccataggaaatcgtcttagcaaggactcggcactttctgggaaagctaaagggatgtgtgactttctgggaaaccacatcccaatatttcctgcattctcaccccagagcccccaaatcaggctcgtttctaggaagtcaaatcaacagtggaggtttggactgttgcagccgccaggtggaaagacacgcagcccctgcacacctgggctggctggacaaagtggccaggcagatgcgcaggaaggaaagcctgcaggtgctgaaggcgcccccagaagaaagacaaaaccatctctccttgtccccttattttgtcatttgaaacatcatttaggggaaggtgaaggccgtttggtcatatattcccagctgcgtgaccttgggactttcagtttcctcagctgaaaaggtgatgtgagaatgcccctaggtctggcaagccaagcacctgtgcgaggagatgccaacttactcttttttctgaagaccctcctcagcaaagcccgaaagtgctctctctccccacgctggagaccagtgtgctctccagacagcaggctttccctggcagggtcacaaaccaaatgtctaagtattaaaagttttaaagcaagctaacaaactgctagataaaatatagcatacctcctcacacgatggcagagcctcctaatgacctggaaggccagatcagaatggctagactcctcggagtttcacattggcatgcggcagctactttccccgttcttcatgttttcctgcaccgggagaaaaacagaaaccgggcactcggcccacgtggccaagctctacccgggtcccacaaagcagctgccctttgtccagccttcagggctggagcacccactggccatgtggttcacactagggaaaatgggagaggtccaggaggcctcagaagtgggcatggtcatttggacggggaaccccagggtcctgggaatccagagcgtcctctggaagggaggcatgtgagttccaactgggcacagccctttgttccccaagactcctcactcgcagggaggggcagtgtctaagcaagaccttctaaaatgcagggcccagggctggagcccctcttaccctgatcagagagtgctggacagggaattggagatgcaagaatattagggttttaattaattaattaattaattaatttatttatttatttattttttgagactgagtctagctctgtcacccaggctgagtgcagtggcaaaatcttggctcgctgcaacctctgcctctggattcaaatgattctcctgcctcagcctcctgagtagctgggattacaggtgcacgccaccacaccctgctaattttttttttttgtacttttagtagagacgagctttcaccgtgctggacaggctggtcttgaatgcctcacctgcaatgacctgcctgcctcagcctcccaaagtgctggcattatagatgtgagccaccacacccggcaggaaatcagcttttttattttgctatttccaagtgagatctgaagtaaggcccacaacgtttctggcccttagtctttcccagagtcaaccaatttagtctctgtgcttccttctggctctggcccagggtcctaaagctggtcctgtccttcctaaggccagtggatatgggtcatcagctttgtaaaacctttctgcctggtgccagcacctccagggctacagttagccttagtatttgacacctggacttccctcagcagcaggcctggaactgaaaagcaagcaaacgcatgcaaaccttttatttctttcacctgtgacctgggatcatgaacgctgtggagtcctgaccaggctcacctataccagtgtccaggtcttccaggcaggacaggcctccatcagacccattcacagatctggctggctctcccaagccaggtctgtcatcaggatctttaaagaaaatcaatgaatgaagcaaaatgagaggacagagggctgctggcttagtgcagggaaaagctggtgtatgggcccgtaagttctgcagtgtttggacacagataaggccttacactgaatgtggggagaggaaggggaccagaggaggaggagaataattattactgttcagtgagtttttccaggtgccataatacgtgttgctttttttttttttttttttttagatcaagtctcgctctgtcaccaggctggaatgcaatggtgcgatcttggctcactgcaacctctacctcccaggttcaaatgattctcctgcctcagcctccccagtagctgggactacaggtgtgcagcaccatgcccagctagttttttttttctttttttgtatttttaatagaggtggggtttcaccctgttggccaggatggtttcgatctcctgaccttgtgagccacacgccttggcctcccaaagtgctgggattgcaggcgtgagccatcgcgcctgtccatgttgcattttttttacctccattttctcagtaatgtaaggacctcatagaccagtgaaatcctctcctttccaagacctcaattttgggaggtgacatagggctgctcactttttattttgccatggaaagacattataaagcaaatatccactcaattatttattcagttgacaaatacttatcgagggtctgctctgtgccaggcattctttcaagccttgggatacagctgtgaacaagacagacaaaaatccctgccctcttgggaagagtcagacagtggcccaagcaggaac

SEQ ID NO: 1881870 - DNA, 4001 bp, Homo sapiens
gctatctgggggccccagtgcctgacctggagaaagatgttagtgcccgagatccggctctgggggtgcccatggctgtagggtgtccctgctccgaggtcccccagtggacacagctaaagcctcggtgagaacacacgggcccatgccaggctcacacccgtctacccagccgtctaccgacacttccgtgctgaaactacaagctcctactgccgcctcccctcccagcctcccatgctccttactggtagctcccttctccagcagcgaggctcgtcacccacagcgcggccgctggaaggtgacctgagcggccagacagggcctcctgctcagagtttaaagctctgctgtcgccatccttaagttcttaatgagttttgagcaagggccctgcaatctcatttcgcaccaggtcccgcaaattatgtatccggctctaattacccacaatatgcttgcttgctcaagtctggagcacacacaaagtaatctcataattgctaacccaggttgctgtgcaaaacagcttcacaaactagggcacagtgtctgcacgccattctttttgtcttacagcccatgatactgtcttccaaagcatgcggtaggttttcttttccccactcccttcgatgaggttcacctgttactgcttatattccatttcggcttcaagcccccatcccggttgattttaatcacttatttactttggggggtgtgtggtatatttctgtggtcctggaaggaacacaaaagctgcagcctccataataaggtaagcccaccagcgcctgtacctttgaggaccatgaagggaagggtctgtctccctgttccctccactaactccccccatctctctggcccccacttctccgcaaagtggaaactccctggggaggcagaagaccagggtggcaggactgcaggcagagagggattcctgccgccccatggctgggtaccgctggtaggccacgcacacactgggtaagtgtgcactaggcactgacgttaagggccaggcgttggtccctccgtctcacctgcgccaactcagcacagggagagagctgaggctctgacaaggatacagggcagagagcaggaaacagcagggctcaggctaggggtgggagcccagctgctcaggagttgaagtgcaggccccctgtgggcacctggcggacaggaaaggaaggagactaaggagtgtgttgtactttatctgtacctggctacgtgagatcagactgtcacccagcattaactaaaccttacagtggagacagtgggttgtatcactcccgagaagaaaccacagaacgctgtaggagtaatgcctgcaccggcttcccccgcaccacacggagcggctgcctacagctttgttaggggctgaatgcaaccccgatgcaggcaccagccctccagagcagcctccatggaggaatgcggttccccactctgcccacatacctctcctgcagcagcgctgaacaccgtctccggacgtctggagctatcaccatgggcaacactttcgtggtctttatttttagcttctcctttagaaactcactttttggggtggttttgtgtccagaagttggtgggttcttagtctcgtcttcaagaatgaagccgcagaccctcgcggtacatgttacggttacctaaaaacggtgtgtctggagtttgttccttctggtgcgttcgtggtctacactgatttcaggagtgaaactgcaaacctccgcggtgagtgtcacagctcctaaaaatgcagcacgtccagagttctttgcccctcccagtggatttacagtctcgctggcttcgggagtgaagctgtagacctttaccgtgagcgttgcagctcacaaacgcagcacagacacaaacactgagcagcagtaagatttactacgaaaaccaaacaaggaaagctcccagaggacaaaagcagaccctaacaggttgccaccgctggctcccgcagcctgcttttattcccttatctgaccccacccacatcctgctgactggtccattttacggagaactgattggtccattttacagagagctgattggtccattttacagagagctgattggtccatttggacagggtgctcattggtgcatttacaaacctttagctggctacagagtgctgattggtgtgtttacaatcctttaggtagacagaaaagttctccaagtcaccaccggagccagaagcccagccggcctcacctctcagtagcactccctttagaactttgcagcatctaccctgggcactccggcagcccagagggagctcatccccagatcaagcccagcaggcgtcggcgggccagccaagcctgcacccacccggaacccgcgccgcccgcgagcgctgcgctcagcccccgctcccgcccgcgcctctccgccagcagagggagctggctccagcctcggccagccccagagaggggccccacagcgcagcggcaggccgaagggctcctcaagcacggccagagccgacacggaggcccaggaagcgccgagagccagcgagggctgctggcacgttgtcacctttcagtttcacaatatcccaagatgcattagtagtttctgtagcctgagtgttagtggcccccaaaattgataggttggaacctaatacccaatgtgatggtgttaacaggtgggacctttgggaggtgagtagatcacgagggctgtgctctcacgaatggcatgagtggcccgggtagaagaggctccagggagctccctcgctctgtccaccctgagccttgtcaagaggcgccgtcttggaagcagagggctgcctcatgggacgccacatccgccagcaccctggtcttggacttgcagcctccaggactgtgagcaataaatgtctgttgttgacaagtggctcaggcttaggcgtgttgtcacagcagcccgaatggactccagcagcagagcagccagggctgcacgtggtgcgtgaacacacccgccgccctcctcctcctggggcatatgacggctgcgcagctctgtgtatccagtttctgggctgttccatgcccctattcccctgattgctatgttctccagctgaaagagcacactgattttgccttcagcccactctcattttcccccagatttcactaagtgattttgctaagtgatggctgtgcttcccctgtgcgcttctctctggctggtttctactccggatccactagtggggccagaaagagcagtaggaaggaacctgaggttcctgtccaccatcaggcatgtgcacacctacacccacacacccctgcactgtgcacacccacacacacttgcacacccacctgtgcacacgtacatccatacacacatgctcacccctacatggacacccacacacgtgcacgtgcccatacacatgcacacccatgcacacacctgtctgtgcacaccccacacccatgcatgccggcacacacccatgcacatccacacacaggcacatacccacacacacgtgcacacctcacacccatgcatacctgcacacgcttgcacactcacctgtgcacacacatcatacctgcatgcacacccccacacgcacacccacacacctgtgcacacacccatacacatgcatgcccacacccacatgtgcacacaccgtacatacctgcacacacccacgtatgcacatggtcaacactcacccactcaggcactcttacatgcacacacgcacacagacatggccactttcatggacacacacccacacacgcccacatatacacgcatgcccacctaaaccactcacttgaccaaatagcttttcaggagagcgcctggtcctgaagctttctaggcatttcggtagccaaaccctcttgatcgtgtggttccagaaaaagccagtgcggcacccacttacccgtactgcagccacc

SEQ ID NO: 1881871 - DNA, 4001 bp, Homo sapiens
ggagcagaatcacccagctgagtcctgtgtgagttccttaccaacaaaagtcatgagataccttgaaatgattgtttcagccacgaagctggggtcatttattatgaaacaatagatagctagaacagctcttactaaatgtttgctatggatggataaacagatggatgggtggatggatggatggatgacttagaagggccattatttttcctagaggaataatgctcagagataaagcaacttgccaaagttcctgtagtaagcatttgtcattatttcctcctcccttagcatctgaacctccttctccttttggagaattttctgtcttattaggtagagctacttcaaattacagaaacaaaaatgccatatatgcctttccacagccttctttaaagctaaggtacaggcccgtggtgcaagatcttccagtgagacactcctgcctcagactgtgaatcagaaactggggcaggctccattccagtgggtgggggcagcagttggagtctcagcaacacagaccctccagaagccctgcagccacagccccagcagcagggtcctgtgtccaggcttcctggtacgagccccccagccaggtcccatgtctagtgatatgagccagagttgctgtgcctggcagcagcaggatcttcactgcattgtgaatccaggccgttcttcctatctccaagcttgtcatctctccctcttaggggtggggtgagctatgctatcctatctatttttaataagttctttctctgctgaaagctaggaaccctggctgacagtaccagatgtggatttctcattctaggatgccatgttctccatgaataattttcaaatggtgtcctgaaggtcctagggttctcctgggcatagtctgtagtcccagctactagggaggtgtgagaatcgcttgaacctgggaggcaggggttgcagtgagccgagatcacaccactgcactccagcctaaatgacagagcaagattccgtctcaaaaaaaaaaaaaaaattccttggtctgtttgctctaatatttttgctttgggtggtatgtattgttgtcttgtacagttttgatctttcttttaatgtaattttcctccttaagttttgaccttcttctgtcctgtgagctcctgttgaaagggggtattggctactctggcactctgcatcaggaaaggagtataagggagggaaggtggtgagccccaagcattagaaccaccattcctattcccatttgctaacattcccatttgcaactccagccaagatttacctttagctttaggaagaagagcaataggggtaagtggtttgttgtcagtttttagaatccatgcttccttcttgcttccatagcttcttcagcattgccttgcaggaaggagctacagccacgccagttggacaactagcaggaagtggagattctgaataaatgattaatcaatttcacctagcgggacaattagaagaggaataacttacatgtgaagcagagctgggtgccagcttgtcatggcctggactgttggctctctctgtgatcccactgtgtctggaattggtgggttcttggtctcactgacttcaagaatgaagccgcgggccctcacggtgagtattacagttcttaaaggcagtgtgtccagagtttgttccttctgatgttcagatgtgttcggagtttcttccttctggtgggttcgtggtcttgctggctcaggagtgaagctgcgggaccttcgcggtgagtgttacagctcttaaggtggcgcatctggagttgttcgttcctcccggtgggttcgtagtctggctggcttcaggagtgaagctgcagaccttcgcagtgagtgttacagctcataaaggcagtgtggacgcaaagagtgagcagtagcaagatttattgcaaagagcaaaagaacaaagcttccacagtgcagaaggggactggagtgggttgccagtgatggttggggcagcccgcttttattctcttatctggccccacccacatcctgctgattggtagagcccagtggtctgttttgacagggcgctgattggtgcatttacaatccctgagctagacacaaaggttctccacgtccccaccagattagctagatacagagtgtccacacaaaggttctccaagtccccaccagagtagctagatacagagtgtggattggtgcattcacaaaccctcagctagacataggttgctgattggtgtgtttacaaaccttgagctagatacagagtgctgattggtgtatgtccctgaactagacataaaggttctccaaggccccactagagtagctagatacagactgttgattggtgcattcacaaaccctgagctaggcacagggtgctgattggtgtgtttacaaaccttgagctagatagagagtgcacattcgtgcatttacaatccctgagctagacataaaggttctccaaggccccaccagagtagctagatacagagtgtagattggtgtatttacagtccctgagctagacataaaggttctccacgtccccaccagactcaggagcccagctggcttcacccagtggatcccgcacctgggctgcaggtggaactgcccgccagtcccacaccgtgcacccgcactcctcagcccttgggtggtcgatgggactgggcgccctggagcagggggcggcgctcgtcggggaggctcagccgcacaggagcccatggagtgggtgggagtctcaggcatagcgggctgcaggtcccgagcccttcccggcgggaaggcagctaaggcctggcgagaaatcgagcgcagcgccggtgggccggcactgctaggggacccagtacaccctccgcagccgctggcccgggtgctaagcccctcattgcccggggccggcagggccactcggctgctcggagtgcagggcccgccaagcccacgcccacccggaactccagctggcccgcaagcgccgcctgcaaagccccggttcccgctcgcgcctctccctccacacctccctgcaagctgagggagccggcttcggccttggccagcccagaaaggggctcccacagtgcagcggtgggctgaagggctcctcaagtgccgccaaagtgggagcccaggcagaggaggtgctgagagcgagcgagggctgtgaggactgccagcacgctgtcacctcttaccactatcatcttcgtcatgcagtccctgatagtcctacccttgacctccagaagttgatgctccaagcatgaggcaggggcgcctagagttcctgacctcagtgacctcattgattcctgtgtttaaagtttctgaggaacctgaaggctgactcaaaactgcctgagatctttcttcatcgttcagttcaaacacaagccacaattgcctaggcaagtagaaagggaaggtagatgtcagcaaaagcctggcttgcctgctgccactgtaatgaagactggccagagaagcacagacaggaccgaagagcttcacgttgtacagaacagcaggtctgggaaacaatatggccttgctcggtgatcacttacagagaagtgtcctcaatgtctccttcctcagagaaacaaagccatttccttggcaacaaaaccccatacttgtgtactttgctaaaaatttacagtgcaaggccaaggctgattgcatgtgtgcactcatgctgagctttcgaaacaggctttgctgatgcccatctgccaacaaaccaccttttaaccctgtgtccttaaaaagctcagagttataattttcaaaagttcttaagttcggctgggcatggtatctcacgcctgtaatctcagcattttgggaggccaaggtgggtggatcacctgaggtcaggagttcaggaccagtctggccaacatggtgaaaccccgtttatacaaaaatacaaaaatcagctgg

SEQ ID NO: 1881872 - DNA, 4001 bp, Homo sapiens
atgaggatattgagggtccaatgtgcccaaggtcatacagtgaaggcggcagaactgcaggtttgagttcaagtctgcagacaattcagccctaatctcaaccaccaagatgtaattaatgccttatgctttagaattcccattagatctggaaatctaagatggctacaacataacttagcagttctttgggagaataaaattgtctggtatgcatctgttaacactttgttgttctgagcctttcttgtaaaatccagtaaatgtgagcttcccaaggctcgaaacagatcggatttatccttccacccaggtattctgcagaacatcacttggccaataggaggtgcccagccaatgttgaaagtaaattaaacgaagtgaaattcaggtttttgctctagatgtgtgccaaatcagctcattaggggactggcaacaacaaaattaacattgagtgctaagtcctttagaggccaagaggcctggcggctcttcctagctctgtagcgactcttagcaaacttgcagagcccaaacgtggtgaggaaagccacatgcggaatccacgcttgaggctgcacaggttgtgacctggagagccatcttccagattctgaacacccatctctcccttgagtctgcgtttctcacaggcctgagtcctgcacacacaaacttgtgtttcttacacactcataggaaaaacgtgccttgcacacctgacaacatgctgcagaggaggacgtgcagtctggatgtaaatgtgggtctaagccacagcaggagtcttcttgtctgcgagacgcgcctggcattcactgagcagggctggcgtgagcatgagtgctggtccacgtgaagcgcttagcacggagcctggcaccgggggcgctggggaagacagttgatcccaaccactttcttgcacatttctgacacggctgctgattcctgccaggcaggccccgggcgcctgcgattcagcaagacttcctcatcgcctttttaaacctgctctgctcaagcctcagctcttggtgatttcctgaagatgctgccacccgggaagagcctcccagtcctcaaatcccgagcccatgcctttcatccctgccaggtttccatttccagtttgctcctaacctggcccttgtcccctgccccggccccccgggacgggcgagagcgagccagacaatagtaaatggaattcagtcccacacaaggggaaaaaaaaaaaaaaaagattatgaaaatggaaagtaaataaatatggatgttgaggacctaattctgataagcggattttcaaaattagccatttgcaagagtagattaaatgcgtttaatgtgatgggtggaagtaagtcgattaagatgcacagcagaccccatttcagcagattccggggagcaggcctcgcaggcccccttcacgctgcgcatgtttgccgggataaacgccgaatgcctcttaagcgcactaatttgccgttgtcgtgctggtaaacaggcctcctggaaaggggccactcgccgcttctgtacccaaggcggacagcggagcagggaggggccgccggccgggctggggcgggaggccaggggccagccccgggggtgcgggggctccgctcgcggtctgcagggaggctgagaagcgccaaggacaaaggaatggcactggatttcccctcaccttccccagccggccgccccccacccgaccctctgcagagagaattctggtcccagagtaccttgcagctccttccatggcaacggccgcctccctcccgcaccgcttcgcctccttccttccttcccgcgccttctccccgcagcccacaccagagccaggcctcccgagggctcggcgcacccgcacccccggggcagggacgacggccagtccttcccccccggaggaggggcaagcaggcgctcccaacgcgtacgccagccacacctgcaagcgggagagggccagatccccacacgtccctgccctgtccttctccggggcacccaccacattcgggggccttagagccctgaaaagcccggctgtgtttcaggtttgaggaaacagatgaaccgctttaccgtggcccagtgttgggggatggtggggttgggggcggggtggggggacggtgcaggtagaagccagtgatctgaataaacacctcctgacgtctttgaatggatcacacccaacgatctgaagttgcatccagacagttccttacaggacctgaggctccaagtcaccatgtaaccctaatgtctcagccatggtgcgtctgtcatggtgtgaggacacagagagcagtcacctagcactaaccctggtactagcactgtgcttcatttactccatttaattctcccagctgggagaagctgcccatcaaacagaataagctccataggccctgcaagatctgccaggctgcctctctgaactcaccccctccctcacccccactgctcctccctggggatgctccagcacagcagccttctttctgtccccttagcactctgcatccattcctgccccaggacctttgcacttgctgttctctctgcccaggacactctgccactatttgcaccatgccagtaacttggcattggggtctttcaattgccttcgcaacagttatcactgtttgtttcattggtttgtttgtgagtttgttgtctgcgtcctgacaccttgaaaacaggggccttgcttgtctggaagagctgtgtcccagcactgagaatggatcatacaggtgtgacggggtgaagccaggtctagagcccttgtgttaggggtgcagagcctttctcaccccaaccaatgccaccacctggtgcctgatgaccccatgcaccagggtgaggcagggacaggttcccttctgtaacagcttctatcagagctgctctcagggaggcataaggcaaggtgccttctgcccccttggaagcagggctcaaaggggaggtgggttctacttctctcccatttcacagatgaggcagctgaggcacggatgggaaacactcaaactcccacagctttaagtggcagaatgggactcaagcccagacagtctggggtaggggaggaggaagtgaaggggaattccagcccaagaagcattacatctcagtctaagggagttgttctcaaatgtttcgaagcaagagcatcgatcactgcagtcatttttcgaaaggtcattttcatggccctgccccagcgatgctcgcttggcaggacagatgcggcgcctggagtctgtatgtttaacaagcatatgcctaggtgcctctgatgcaggtgctgtgctgcagggccacccactctttggttgcagccgggagaggaggtggttgtcctggccagagaccagagaagccacctctgtaatgttccctccaagatcaccattccctcctctgcccccgatctccagcccacttccctcccagtcttctgtgaggccccggggctcatccatgctgggaggcctggctgctgtcagcccatggaatttgaaagtcctctgcagagcttcctggtggatgggaggaagaaaagacatctggtcaagttcttccctgttttccctgtgcctggctgggaccactcagaagtcgatgcagtccccatcagcagtgacccacgacggggtgaggagcaagcctcctgcagaggaacagggctggctctgaaaagcgcaggtggagacgactcgagttcaaaggagaatgcttcttgcaggcggctcctcaggataccccaatgccgctcagggttctgctacggaagggcttccttcaaaaagcctgggtcccttcttttgccacaccctgtctcatcctaggtgggtgtgaggtctggccaggaccccagatcctagctgcggggggtgggggctcagcaggtgaatgagccaggttgtgaaggcatctttgccttctcacacaagacg

SEQ ID NO: 1881873 - DNA, 4001 bp, Homo sapiens
tcccagaaaatgcaggaagctatttaaataaaatatctccatgattttaaagatgagacaatgattctttcctatacaatttctttgcggagcaagatgctgtatttgttccatatcttttaagagaaaagcattgtgttggaacaaaagaacacagggagactactgaaattaatacatcatggtcttttctcttaaagggcctgggatctggtaagtgagaaaatatttgcataccttttcaggaatatctctactatataaagcatgtcatttctgcattataaacaaaccacaaaactggttctatcatctacacaatcataaccaatatcagtaatatatacttctagttacaaagtacttttatactcactttttttcttatgacaaacttatgaagtggaaattattaattctcatttacacatgaggaaattgaaggtcagagaatccacagcagagggcccatattccttctgttttccaaatacatgctatttatcatgcagccactgctggaggattggtccttccatacagagccttcactgggggtattctctagtcctgatcagaaaagttgggcagcgtctgcccaccacctgtcaggacctggcttcaggtcagccagcatatcggggaccaccccactgtgggatgctgccaactgcatcggtctggcaaccacgtttgtttaccagcacttgttggcaaggccacggcttttgaagctgcctctcattgtgtctttaacacttctgctctgaccacccagcctcagcaaagcaagacccacgtctgcccacatcaattcattctgtaactgcttagggaagattttgcctcctccctcctctgtgtgcttcctgactcaacagtgacatcaaagtccaggggaccctttgtgagagcctcagtgctagtgattccacgaccaaaatactggtaagagcatgcaaaacagaggttcttgggcattcatccctcacaattcccgatgccaccaaatccccaccccccgcatacacacacatacgctccttttgcctcaattggagacatggtaataccatccattcgtttatccattttgagtaggcaatttatagctccgaagctcacaatagttgttttctaagacatttaacaaacacttatatggcacctactgtttgccacacactgttctaggcactgaacaaaacaataactcatttcatcctcataaccacacatgaattgcattgtctccatttcacaggcagaaagactgatacagaaagtactttgcccaagatcacttgctagggaagccaggttttgaactcagaaaggtaattccagtatccatctctcaaccactacactctgcaacctttttcttttttttctttttttttttttgagacggagtctccctctgtcgcccaggctggagtgcagtggcgcgaactcggctcactgcaagctccgcctcccgggttcaggccattctcccgtctcagcctcctgagtaactgggactacaggcgcccgccaccacactcggccaatttttgtatttttagtagagatggggtttcaccttgttagccaagatggtctcgatctcctgacctcgtgatccgcccgcctcagcctcccaaagtgctgggattacaggcgtgagccaccgcgcccggcccactctgcaaccttttggttggggcacattaacaggaaattacaaaaacggatggaggaaaaatggataatggtgtaggatgaatgaagagacatatgccatcaggctgagaacataaaaaagtgatcttcatagattgataaggtaccagggcagattctctactgacaaatcaaacactacttgaaaatttcaagcttcccaattttctcaaaatgcttttacctcctcccttcccatacaccgaaagtaacaaatttggaagcatctcaccagtcattttccttccagctcacaaggaagtgcttatgtataacattttctgcctcctaattgtcaagatgcagagattttacagattcacaaacagagacaatgcttttataatttataaatatttgtttttcaagctatagacacttcccttgagctcttaaaaaagaaaatctcagtagttttacatctcaaatatctatgaaatggttatttaggtgaggtttggggaggttgggtgtgggggttgtgttttatttttgcttaatttggtattcaaatcatgtggttatgcattgaaaattagcttgatccacactcatctgtgggccttttgtgtgacagcattccacacatctccctgttttcctaattctagtttattttatgatgacttggagaaaatggcaatgttatcgctgaggaatttatgttataatattggtctttctctggcctgaaaaagactaattgttccccattctgtgttgccacagctccctccctcacaaagctattattgaactgtatttaactatctgggtgggcttctggtaataattagattgccatctccattaaatcccagggagagcagacagtgagggtagcaacagcaagacttgtagtaacatttaaccatcaaaaaagaggatgacttgaaggcctcttttgtgttctccctctgttcttctggctttaaagctataaacatctgatgataaagcatcctttaaaaattctgaataatttattggatgcttgcttacagaggatcctattattttttgactcttcatttctacaattaggcagtggctttggaaacacattaaagactccatcaaataataattgtaatccaaatcccaataagaaccagattttgaatattgagccctgaacctcagcttttgataaaaagaagagaagaaagagagagggtggggagcagcagtgagaaagagaatagtatgaaagtagcatggatcactggaaaaagaatgtcttgctttcagaaatggatagtaattctacctctctaagtgctttattgggatccaagaaaagtgaaaacatccttgagctcttgcctcctatatccaaaactcagattaaatgcatcagttagaactaggctggctgcattattttaaaaaaaaaagagagagagaataacaacagttagttaaatacatggtagaaacctgaggctggcagttgagggctgagatgatgaatccacaggcagagacccaggcttccactctgtggccctgctccattcttagtttgccaactcatggtttaagatggctccttgagcaccagccatcatgtctacatgctgaaaaactgagaaaagaaaggaataaagaaataatgtgctctctccattgaaagacactttggaagtcacagcacacctatgtccaaattgcaattctttgtctaaactcagtcatgtagccaaatcttcattatttaagagaaggtagtcttttgccaggtagcaaagtgcccggcataggagaaagcagagaatgcatttgggaaggcaattggcaatctctgccctaaagaaatacagtattcccttccaggatatttaaatgtgtcaatgagatactaatgtactttctccaagcgtggcattcagatggcactgcatagtagtgaactgttttctccctgcaatgtagccttgcccatcctgtaccattgttgatattgcccaccagcattaaaaatgtagagagtttgaaaactgacccccaaatctgacaatgtctttcaggtttttagtagggctgtctacattgtctgcattatttagaagtgtgaaattagaagacactttctggcaaaaagctttccaaaacatcaaaatgtaataataaatactagaagtaactggtaatgaaaactaacaaaagacagaattcacttctgaaactgttagagtgatgattggggagggaatggagagttggaatcattctgacaagagagagctgtaaggacaaaaagcacttagagg

SEQ ID NO: 1881874 - DNA, 4001 bp, Homo sapiens
tcctttggtcaaaaacctcagtgggtctgtctgcctgcctaagagaagaaaattagcctcgttagtattaatataaggcttccacccagaggaaggcaggacacactgttagaccaagaagacggcaaagacttccttccaaaccagcatatcctggaaaggaatttttatcccaggaatgagcacttcctcctccaagagcccttgcctggtgctgtccacagggaggttaacaggccctctcttcaaggcccaggccctgccctgcgcgtcctcaagcctttccagtttcagatggaatctagatgctcagggccttcctactgacaagggcaagccccgtgctctccacagttccccgctgtccacccatggccctcctgcagctcagagatccagtgaagaggcaggcatgggcaggccatgcagcccttggtgaaatggcagcacaccaacgagggcccacaccattaggagggagaaagggaagtgacctcggtggaagtggtcaggaccagtccagggaaagaacagagggaagtggggacgagcagcttcctcctcctaccccactgcttggtccccacacctctgaccgcaggcagggaagatggcttctgatgccagcttttctgctcacgcagcatcacactagagtgccacttttctctgagtgttctcttctagaggtagatgatcagagggcgaggctggccaagtgtggggacaggactggacaagagcagctaggctgcctggaagatgctgtcccagtggagaaaggagcctgcctggtcccagccatttagatccaaagggctgtgaggaggcggggagccgaggcgggcctaggctcaggagcagggatggggaaccctggcaggaagatgaggtggccagcggctcaacagcaaggccagggtcctaggcagcccctggctctcggatgtgctgccctggtccagaggcagcaggatggggagtggatggcgggcacggctgacgagtcctttgctcctcccaacagtcacagtgagggcgcatctcaccgggtggctgatgacactgaagaaaaccttcgtccttgcccccagctctgtgctgcggatcatcgtcctcatcgccagcctcgtggtcctaccctacctggggtatgttgtcagggagtttggggctgtgggtccttctgccacttcaatactgtgtccagaggtttaacagctacattttcaggggaaatccccaggcacgtctagaatcggaaattcagaatgatgttttgtgtgtctgcccaggcaccaggtggaggctcttgggatccattttagaaaagtgcttttgaaatcaggcccagacacgaataatagccactgagctcctgtcagggcatggccggccctgcacgggcttgaacgtatgctggacatgaaaaccagaagagaaggacatggtccctgcgctcagggagctcccagcgtcctggggagggtgggaagggctgtgggatccatgtgctgtgggagggaggtggcccagccccgagttcctggttcccctcacacattaggttattagctgcggcccttacgaagccagcagatggagaacgccgctggtctcagccgtctcgaggctacacttactttcctgggttttggcatcgacggttgtgccttgacttggccttaacagacaaattgcctttgtgttctcatctgcagggtgcacggtgcgaccctgggcgtgggctccctcctggcgggctttgtgggagaatccaccatggtcgccatcgctgcgtgctatgtctaccggaagcaggtgagacagccgcgccgggagcctcctcccgggtgcatcctcctgggtgcaggagaacctgagcagccactgaccaggttggatggtggcgttcgtcagtgggggatccttggtgacactgcccagtctcgtggcttagggtggctggaagcctaatgggagtggggtaagaaaaaaggggaaaagctgaaggcagcaagtacagacagtccctttgaagagttttgcgccaaaggggagagaggtgtggacatggatttcagaaagccagcgtagatggggcgaaattcagcctatggcttgctttggggaatgacccgcagacatgcgatgctgccgatgggagaggggacagtgataccaatgtggctgtgcacacaaggactgggcagtccaagacaggagctcgggcagcctctctggtcatgggcggagcagagatgcagtccgagagcttgcgcaagggcccttctgatcacttttgtttttctcagtgaagtaggaagccacatcattgtctgagaaaagggaggtatatgagggtggaagaacgaggacacatgggtggggaaacagttggtcaagagagtagcagagtgaacaggccggggcagcagagtgacggccaggccactcagagagcctgctcacggtgcgtgacgtgcatctcaggacactggctgtcccctgcggttgggcttccccagccatggcagctgaggggtgtgggctgagatggtagagatctgaacctcagcacagctggggctttgcctggcaaatataatgaaagaaaagcagggtagggaaatgatggtcattactgagcatgtcatgtaagctgaggaaagaggggagacaggacatcgaaaaggtggccacaatgaagggttggtgggatccgtggatgggggaccagcggggttggcagacagaggacaatgtccttgccttggcctgttggtgtgtcgataatggcaaggtctgcagtgacccagcagtggctgaggtggggctggggctgagaacctgatccctgagaggccatttattgtaagaacaggcaacatggcagggaagtgaccaggaactaggacaggcagtaagtgggagagaatgacggcaagcctggagctgtcccagaggtgactgacggatgctgtacaaggtggaatattttgataatgtgagattccaagcttgaggctttagggaggaggaaggagaagcagtctacaggtgactgtgaggagtcggggagagcgcagccctcattggaaagggcagcagggagcgggttgtctggggcggggcagtgggacatggtgtcctccgaagtgcctgcctagctcagtgccaggcacacagcaggcacacagacaaccaaactgcaaggaacacactgagctaagatgcaaaagaggtgacgccaccccaaccataagaaggtttaagcctacagtgaggggtcccccaagaccccggtgttgtctccctgctcgtggttctgctgtgcagtgtccccatccacagccccacactgatgagtcttctttggtctagaaaaagaagatggagaatgagtcggccacggagggggaagactctgccatgacagacatgcctccgacagaggaggtgacagacatcgtggaaatgagagaggagaatgaataaggcacgggacgccatgggcactgcagggacagtcagtcaggatgacacttcggcatcatctcttccctctcccatcgtattttgttcccttttttttgttttgttttggtaatgaaagaggccttgatttaaaggtttcgtgtcaattctctagcatactgggtatgctcacactgacggggggacctagtgaatggtctttactgttgctatgtaaaaacaaacgaaacaactgacttcatacccctgcctcacgaaaacccaaaagacacagctgcctcacggttgacgttgtgtcctcctcccctggacaatctcctcttggaaccaaaggactgcagctgtgccatcgcgcctcggtcaccctgcacagcaggccacagactctcctgtcccccttcatcgctcttaagaatcaacaggttaaaactcggcttcctttgatttgcttcccagtcacatggccgtacaaagagatggagccccggtggcctcttaaattt

SEQ ID NO: 1881875 - DNA, 4001 bp, Homo sapiens
aaagcggggcttgggaaggccgccgggaggcatgagctgggctgggccgaaagaggccactgggaggcaggaggagctgggcctggagaggctgccgaaaggcaggagcttcgcctgaggatgccacagtgagacaccatctgggtctggagggtccactgtgaggcagaggctgacctgtagagtccgacagtagacagaagttgggcaaaagcctgatttgaggaagttttgggcttcaagagtcagccacgaggcaggcactaggcctggaaatggcctcacagtcatgagttgggcctaaatgggccactgtgagggaggagctgtgcctgttgaggctgctggcaggcaggcagaaatttggcctggggcagctgccatgaggcaagagctgggcctggaaaaagcccctgggaggcaagagcagggcctgcagaggctgttctcaagtcaaagctgggcctgttgatgccaccgggaagcagaaggtgggcctggagagtttgacttgaggaagttttgggcctacattggccgccatgagctggacaggaactgggccaaaaaaggctgttgtgaggcagcagttgtgcctgtagacccagccaagaggaagaggtgggcctggagaagcccccatgaggcagaggttgggcctgtagacgctgacaggaggcaggagctgggcctggacaggtcaacttgaggagattttgggccttcataggccaccaggaggcagcagttgggactagagagtctaacttgagtaagttttgggcccggagatgacgtcctgggacaggagttgggcctggagaggccaccgtgaggcataagctggatgtagagaggccagtgtgaggcaagacctgggcctgtctaggctgctgggagacaggcaggaatctggccagggaaggttgccatgagacaaaagttgggcctggaaaggcccttgtgaagcatgagcttggcctaaagaggccactgggtggcaggagctgggtgtgtagaagctgctgaaaggttgggagcttggcttggggggtccacagtgaggtagatgctgggcgtgaagaatctgctgtgaggcagacgttgggactgtagaggctgacgggaggcagaggctgggcctggaggggccaccaagatgcaggagctgggcctggagaggctgcaaagaagcatgagctgggcctggtgaggtcgacttgagaaagttcagggcctggagagaaggctgggaggcaggagctgggtctaaagaggccattgtaacgatggagctgtgcctgtggaggctgttgtgaggcagtagcctcatctgcggaggctgccgtgacgtagggtatgggcctaaataggccattgtgagtcatgagcttggtctgtagaggctgactggagaaagttctgggcctggagaggctgccgggaggtaggagctgggccaaaagatgtaagcacatttgcatttattaggcactttatttccattattacactgtaatatataataaaataattatagaactcaccataatgtagaattagtgggcgtgttaagcttgttttcctgcaactggatggtcccacctgagcgtgatgggagaaagtgacagatcaataggtattagattctcataaggacagcgcaacctcgatccctcacatgcacggttcacaacagggtgcgttctcctatgagcatctaatgctgctgctcatctgagaaggtggagctcaggcgggaatgtgagcaaaggggagtggctctaaatacagacgaagcttccctcactccctcactcgacaccgctcacctcctgctgtgtggctccttgcggctccatggctcaggggttggggacccctgctcaagtgcatccaaagcgacccttcccacaccagtcttcacagtggtcaagggcagcaaccacttagctcccaaggcatgtgcctcagctggcatttcgtcacaatcaacagtaagtggtagcttgagtcactgtgaggtcacctactggaaatcaccagcaccccatttcccactggcaaagagctcagcactgccccctgggaaaccaaacctatgcccaaatcccatctgtgtgggtttacctcctgggacccttcctaacatattagtcagagtccaatcaggaagcataaaccactcaaaagtttaaagtggtaaaatttaatacagagaattattcattataacaggtgaacagcataatgagagattggctagcacagagtaaagagaactctagagaatatgggactagcccaggccaggcatggtggctcatgcctgaaattccagtaatttcagaagctaatgcaggaggattgcttaaggccaggagctagagaccggtctggacaacagagtgagaccctgtctctatccaaaagaagaaaaaagttagctgggggtggtggtgcacacttgtagtcccagctactcggaatgctgaagtttgagcctgggaggtcaaggctgcagtgaggcatgattatgccactacagtccagcctggtgacagagcaagaccctgtctcaaagaccaaaacagcaacaaccatttacagacagaaaagaaatagagctaataagctgaggaaagatgttgaaatgtgacaagtaaagtaatatgagttcttttgtctatgtaaaataatcaaacaaaaaatgacttactaaattataataccctgtgctggcaaaggtgcagtgaaatgggcaccttcttatactatgaggggtgtttaaattgtgtataagccttcccgggtaaagcctgtcaattttttaaaataatggagacagggtctcaccatactgccatactgcctcctccaactcttggcctcaagcaatcctcctctcttagcctcccaaagtgctaagattatagctgggaggcacccaaaaccctgtcaatttacatcaagggtaaggagaatgtccattcaccatgactcacagtaatcttacttctggggagacaattcaatctaaacaaaaggtcatctgtacacacacagtaaaaatctgggagtaactgaagacagagttggtaagtgaaataagaaacagttataagaaattaaactatggtatcaataggcacctggtaaaaggtcagttgatgttagctgctacttttttgttgttttgagacagggtctcactctgtcacccaggctggagtgcagaggcctgatcatgactcactgcagtctcagcctccctgggctcaagtgatcctcccacctcagcctcccaagtagctgggactacaggaacatgccaccacactaggctaattcatgtatttttctgtagggatggtgactccccctttgtttccaaggcctatcgcaaactcttggcctcaagccatcctcctgcctcagcctcccaaagtgttgcgattaccagtgtgagccaccacacctggccagctgctacttttatcaatattattcttattccactcaattaaaagttattattttcaaggctatgcaacagtatgtatcccacagcataattgtaaaaacatatagtcgtcgtccctcagtatacagaattagttccagccccccatctctgcatataccaaaatccatgcttactcacgtttcgctgtcacccctctggaatccacgtatacgaaaattccaaatgttagttgggcatagtggcaagcacctgtagtctcagccacgtgggaggttgaggtgggaggatcgcttcagcctggaaggttgaggctgcagtcagctgcgatagcactactacactccagccttggacaacagagggagaccctgtctcagaaaaaaaaacaaaataaaacaggttagaaattgtaatgaggtctgctgggcaaaattccatataagcaaagtataaattaataaagcaaatcgtgataaattagtacgattgactttctggagtttctgacaataaa

SEQ ID NO: 1881876 - DNA, 4001 bp, Homo sapiens; identical to SEQ ID NO: 1881875

SEQ ID NO: 1881877 - DNA, 4001 bp, Homo sapiens
gtgaacaaggaatgttgttttgttcagcgctaccaagagcgcggcaaccgagaaaacacggagtcgcccctagtggcgaaagtgcggatgcgaaaccgctggctcggcgtaagagcagagccgcggaagagaaccctagcggcggggaactagctcgccttcagtgctcacgggagaaggcaagttagaaagaacctgagacgtgacactgaaaatcagtagaagaaatacgccacatttattctaccggggaagacagtgggtaagaaaaaaataccgtaacatttaaattaaaaaataattaaaaatttaaaagcaaatagaaattaaaacaaaatacactgataacctcgctgccagaacaagatacaccaaaaaaaaatttttttttttgagtatacaaaacatacaaagcatcctacaaacagaaagaaattgcaaacagggtcgaatggtgagatcctaccattatatttgtcagcactaaacccgtgcctcttgcgcctatccgaagtttcctcggattaagaagaaacagccatggttaaaccggtatttgcgacaccaacaattatctgtagccgacgtaccccaacttctacatgagtgaaaaatcgccagcatagccagggcgagactattgcgaattctaacttggtatgatttaaaaattccagacactgctaaatttttttaaattgcattcttcagtacctagattaatacaggagttataaaccgcacgcatggctataatgggggctcctattacggaacaggaatttgctactactaaaattatgtaggcatggttaaagccagaattgttacaaccagaaatcgcaaactggaataactctcaacttgctacggtaagaaataactaaactctgacttggtcagactaagaaatcaggagtttgagaccagcccaggcaacatggcgaaatcctgtctctaggaaggatacaaaaaattacccgggcgtggtggcgcgtgcctgtggtcccagctaccccggaggctggggtgggaggatcgcttcagcccgggaggcggaggttgcagtgagccgagatcgcggcactgcactccagcctgggcgacagagccggaccccgtatcaagaaagaaagagaaaagaaaaagaaccaaagaaaaagaaaagtcaccatcgcacggttaagtctgccttgctacagctaaacagtgacttcctaggaccaagaaatcgcagccagggctagaccgatgccctaaatcgggacttgcttaggctgagaaatcacattttggctagttatttggacaagaggtagaaatagcgggcaccgcgaaatcgaaacttgctaggaccaagaagccaacgacgggcgaaaccgcaggggcctgcgatagagacgccagcggcgccgccgggggactgggttcaggaggccgagcaggaacccgtgcgtcggcgctcgcggcgctgtgaagagacggcgtccgcgcagctcctctgcctctggctcggaggagcggcgggctcccccgcccagcgccggcgtcgcccgggaaccccagactctgcgcaactggctgcgattccaaatccctcagatcggctaccagagcgctgccgccaccgagaaaatggaggcaccgaggaacaagatgtgccgcgaccaagagaactcggcttggcgaaatggcggtgctgggaccctaagagtgacgccagccggaggagttcccaaggacaacatccattttggcggaaccaacggtgttgtcacgcagaaaatgtcgaccctcggaaaagagaggttctgcgaccgagaaattcggtgcaacaagtgctgtgacagaaaaccccccgctcggcgctgctggcgaaagagccaacaaaacgctgggtgctgccaccgtgacaccgactttaggaccccggcctcggatggagaaaggagggtacggagccaccacataacttcctaatgtcttcaaatagcgaaagtgctagccggaaactgccggctgggtttacctattggtgctcgtgtgggactagcagattcgagaaaccagcgggactggaacctagtacacttcggcagttgagaaatgacttaccaggacaaatactgcttctggctcgatggtgctgcccatgaacatccgccggctctgagaaacgagctgcactgtcagtgagaaaccgtgggcactgagaaacgagcggactgcaactgataactgcccacccagtgccactacgacaaagtgctgctggcactactcccaccctccgtcctcaaatcagtcccctcccgcctaagaagacctttatttttcctagcgaagtcatactgagggccccatcaaccgatcccttgcgatgcgcatgggaaaaggaggcagtatagggaccgagaatcgggcggattgggctggccctggtaacaaaagccatccgggtcgccaaccgtcttccactgcaagaaacaaaccttccagtggctgggctccgcccttctccttggtcagagccctccaggctcctaagggcgaagccgacacctcatccctttggaacttgaagttctcagtccaagacctccgtggagagtgaaagactcaatgcctcctgaccgaggcttcaggcctgccccggcagctaggtacctctccaggggatggaactctgtgggaactgctatttaattctgatggttaactctgtcagatggccttgatatatgggaataatcgttgcaggagggtaggggaaataagaatcgcaagactctagcacaggacgtgtggattgatggtgaggcctttgctccctctccccttgaaatcctcaaagggcagttcccgatttctatcacctttgaaattcatccctgatgtcttctccatctttgggaagtgcaatgcaatttcaagctcttgaatcttccctctcccacatttgtcaaatatactgacgctacaaactcctttcttacaggaaacctgaaactgccattgagcagaaggaaaacatccctttccagaacctttctcgtttttctaaaaatctgcacttttggaagtgatcccccaaagagacctccagactctaccatgagtgtctccagctgaactcatcgtgtctaatcctcaccctagcttatcctgttcaaatcatttccatctttttctggatgaacctgggcggatgtcagaccagagaagagcacagaatgtaccagagaggtaagaagacccattttgggctctcacttctcacccactcccaagatggtcacctccagtcttcccccctataccttaccctttcttcagctagccaaaacctgccctggtacttgaggcttcttcagttgccttcttttgcaggcagtagaataaaggaaagagggcagtgtcaatagaagaaaagttacagccactttatctaattgaagatactgtgcagagcctttgaaaaaacaaaatatctcacccaccattcctctctccgtttccaccctagcttcctattttagcaaaaatggtgggatcagcacctctggagggaaggggtcactcttccaggttaggaatgtggacaggagttatggagcttacttccctaaaggaggaggcattctagttccggcattcagattctgtctgattccaatatggtgtttgtgtggggtggtcagagaaagggcaagtcggcaactgtatattcctcagcaagagactataagacatttgcatttggaaaatcaggagagatgctgatatggtttggctccgtgtccccacccaaatctcaccttgaattgtaataatccccatgtgtcaagggtgagaccaggtggagataattgaatcatggggttggttttccccatgctgttctcgtgttagtgagtgggtctcacgagatctgatagttttataattgcctggcattttcccctgctggcacacattctcctgcggccctctgaagaggt

SEQ ID NO: 1881878 - DNA, 4001 bp, Homo sapiens
tgggaaagtttggaacttcctagagacttgttgaatgactttgaccaaaatgttcatagtgatatggacaataaggtccaggcggaggtggtctcagatggagatgaggaatttgttgggaaatggagtgaagtcactcttactatgcaaagacactgcaggcattgtgcacctgtattagaaacaggcataagataggcgggaaagagtgaaaataagaatttttttctagagttccctagagatctgtggaactttgaacttgacagagatgatttaaggtatctgacagaagaaatttctaagcagcaaagcatgcgagaagaagcagagcataaaagttcagaaaatttgtagcctgatgatgcaacagaaaagaaaaatctattttctgaggagactgggttgtagaaatttgcataagtaatgaggagccaaatgttaatcaccaagacaatggggcaaacgtatccagggcatgttagagaccctcacagcagaccctcccatcacaggccaggaggcttagaaggaaaaatggttttgtgggcccagaaccccctgctgtgtgcagcctaggaacttggtgccctgcatcccagctgctcctgccataggtaaaaggggccaaggtacaccttaggccatggcttcagagggtgcaagttccaagcctttcaggttctaggtggtgttaagcctgcagatgctctgaagttaagaattaaggttcatgaacctccgcctagatttcagaagatgtatgaaaatgcctggaaatccaggcaaaagtttgctgcgggggggagggggggccctcatggataacctctggtagggcagtgtcaaagggaaatatggggttggagcccccacacagagttcccactggggtactgccaagcagagatgtgagaaaagggccaccatcctccagatcccagaatggtagatccactgacagcctgcactgtgtgcctggaaaagctgcagacactcaatgcagccagaaggggggctgtaccctgcaaagccacaggggcggggctgcccaagaccctgggaacccacttcttgcatcacctagatgtgacacatggagtcaaaggaggtcattttggagctttaagatttgcctgctgggttttggacttgcatggggcctgtagctctttcgctttggccaatttctcccatttgaaacgagtgtatttacccaatgcctgtatccctgtgtatctagaaaataacttgcttttgattttacaggctcataggtggaagggacttgccttgtctcagatgagactttggactatggaattttgagttaatgctgaaataagagtttgggggactttggggaaggcatgattgcttttgaaatgtgaggacatgagatttgggaggggccggggaagcattatatggtttggctctgtccccacccaaatctcatctggaattgtaacaattcccatgtgtcaagggtggggccaggtggagataattgaatcatggaggcagtttcccccatgctgttctcatggtagtgaataagtctcatgagatctgacggttttatcaatgggagttcccctgcacatgctctctcctgcccaccatgtctgactaaattttgtatttttactagagacggggtttcactatgttggccaggctggtctccaactcctgatctcgtgatccatccacctcgacctcccaaagtgctaggattataggcataagccaccacacccggcctcttttttttctttttcttttttttatctggagactgagttttgcacttgttgcccaggctggagtgcaatggtgcgatctcagctcactgcagtctccgcctcagcaggagagcaggaatcttcagtgatccacgggcagatctgcagccactgtgggcacctgctcctcccgcgacctttgtgcccgcgtctctccctccagtacctattgcacgacaccccacgtccgcctcctgccattgccagcaagtgccttgtgcgagtacctggctgtgcttattaatccattatggtcgctctgtcactggtgccattatgtgctcacgtgcccactccctcaggtttagaaggcgcgttgcccggcaacagaagagtctgctggcttagcctttggccgagttggcagctggatgaggacgctcagagcccagctctcgagagttcaagcatccgacggttccccactgctcccaggagcggttacccgggcactctgtgcccctcattcctgtttgggccaaggctgaggacctgcgagtagggctcagttgcctggagccccttcaacccatcccccagttcactttgcttgtgggatctccccgttgctcctgcccctggactgagtggcaggtcatcctacaagcacccagacactcgacatcagtggtgtcaagacaactccaagaaggttttccgtgatcctgcaagacctgtgttccatcctggtgattctgccttcaatttcactgcacaggtaccatagcaagtcagtgctgtgtgctccgagttccagggcatcctccagctcggccactacactgagcacaaggactctgtggggccccaggagcaggtagtcaccccattggggttcacaacacccggctgtccccagacttgtgtccagggaagatagtgttgagggccctcaaggagagcggggcagggatgcctgagcaggacaaggaccctagagtccaagagaatcctgatgatcagagaagggtccccaaggtcaccggggatgcacggtctgcatttcggcccctgcgggacaatggagtcctctctccctttgtgcccaggcccgggcctctgcagacatacctccatgcccagaggtcagaaatcagatataaccagacatcccagaatacctggacgagctcgtgcaccaaccaaaatgccatctccagctcctatagctccgtgggaggcttgctggggctaaagtggaggagggggccagcagggcaggagagcggggcagggatgcctgagcaggacgaggaccctggagtccaagaaaatgctgatgatcagagaacggtccccgaggtcaccagggatgcatggtctgcatttcggcccctgcgggacaatggaggcctctctccctttgtgcccaggcccgggcctctgcagacagaactgaatgcccagagctcagaaatcagatataaccagacatcccagacctcctgggcgagctcgtgcaccaaaagaaatgccatctccagctcctacagctccacgggagacttgccggggctaaagcagaggagggagccagcctcatcccactgccagctgaccctcagttacgcaatgacagtgagtgaggacaggcttcaggctgtctcttcgggtcacacacggtgtgaaaaggcggcagatacagcaccagggcagacactcgccccaaggggtggctcccccagatctcaggcctctaggccccatagacacaagattcccctgctgccacgcaggcgaggggagcctttgatgctgccacctcccttagagcgggggtaccgggtcactgctgaagacctgcacctggaaaaagaggcggcattacagcggatcaacagtgcactgcaggttgaggacaaggccatctcggattgcagaccctcacggccttcccacactttgtcctcacttgcaacaggggcttctggtgggtctcccgtttctaaagcacccactatggatgcacagcaggacagacccaagtcccaagactgcctgggcctagtggcccccctagcatctgctgcagaggtcccctctacagctcctgtgtctgggaagaagcacagaccaccaggacccctgttctcctcctcagatccccttcctgccacatgttcccactcccgggactcagcccagtacacctcgctgattcctgcccccttcacagctgaaagcatggatgcc

SEQ ID NO: 1881879 - DNA, 4001 bp, Homo sapiens
aaaaatacaaaaattagccaggcgtggtggcatacgcctgtagtcccagctactcaggaggctgaggcaggagaatcacttgaacccgggaggtggaggttgcagtgagccaaaactgcaccactgcactccagcctgggcgacagagcgagactctatctcgaaaaaaaaaaaaaatcctgacaccaaaccaatgaggtaagtactatcattattcccatttttcagatgggaataaactgagtgaccaagaggctgaatatcttctccaaagccaaagaaccaggcagtggcagagatccaaacccaagcgatttgggtgccagggctcaagcacttccccatgcagccactgcctcgagaaataaaaagactcaccagacacttcctctgtgctaggtgctttgagttcctgcgcatgtttccaggggtgggcatgagacaagacagccagtctcactacattgttagaatgacagcctccagctcttgtcatccaggatatcattgtgcctgttttaattttactgaaccacacagcatgttaaaaacaaaacaaaacaaagcaaaaagccttccctgctctgcttgatcatggatactccttgatgatcttgggttctcaagatctgtctttacatggctttccttcaccagtgaggctctgaacttcttgggagcactcctccccagatctctttaatcaagacctgtacctggctccatgtaggtaccaaataaattgatgagcaaatgaatgaatgtatgagtaaataagtgggtgaatgacaataaatggatatgtgatagagaaatgagtgaataaacagaaccagtgagtgagtgagtgaatgaatgagtgaatgaatgaatgaactccttggggcagggcatgggtttgactaacacctaaggactattctaagaagaacctctgacctttactgtgtgtgcgccgttatgccagcgtctgctcctgggttgccgataggtaatgacttcctttcttaggactgccccccaacctccttattcttggagcctgggcacacgcacagctgggtggcccttcagctgatactgccttaactgctttaactctgcctgctgtgctgtccaggcttctgcaaatagcccaggtgtggccatcctccagaggcctccaacattaactgtgaagggcccggaataaaacctagtattagtaggccaggcgcagtggctcacgcctgtaatcccagtactttgggaggccgaggcgggagaatcacctgaggtcgggagttcaagaccagcctgaccaacatggagaaaccccgtctctactaaaaatacaaaattagccgggcgtggtggcgcatacctgtaatcccagatactggggaggctgaggcaggagaatcgcttgaacttgggaggcggaggttgcggtgagccgagatggtgccactgcactgcagcccagggaacaagagcgaaactctatctcaaaaaaaaaaaaaaaaaaaatctagtattagtaaacgcaggtgtttaacaatgtcaccactacatgtcagggaacactgataaactaagagagagcacgggacctgcctgggtgtggctgctgtacttgcaagacatcttccctctctgagtttcagcatgccggcatttggcactaagttgtcgttcaacatatatggaatgaatgaacgaaagggagagttggagttaataacaccttgcatagaataaaccccgtcggttcttaacccgaagagagtcgagacccagagcccttttccttccctgccgccacggtgcccacggagggggcgtggttgatctccctcacagctccgtcgggaccagagacccggggaccttttacacccagggtccgcgcaaagtgtcggcctagccagtggttgggtggcgcccgggcctccaggcagtcttccaggggtcggcgaacgaaacgcggagctcgggagcgacccggcggggccaggcacgggcagaagggccaagagggccacaggtgggcgcggagcggccggagtgggcggggactggatgagaggggcggggtctaggagagaggggcggggcggcggccacaaacccgcaggcacgccgccggccgccgtttagtcccagagatagaaaaaagtagaggtaggagggcgcggcggctcacgcctgtaatcccagcactttggaaggccgaggcgggcggatcacgaggtcaggaaatcgagaccatcctggctaacagggtgaaaccccgtctctactaaaaatacaaaaaattagccgggcgtggtggggggcgcctgtagtcccagctactcgggaggctgaggcaggagaatggcgtgaacccgggaggcggagcttgcagtgagccgagctcgcgccactgcactccagtctgggcgacagagcgagactccgtctcaaaaaaaaaaaaaagaacaccagtaagcctctaccgcaggccctacacaagcaggcccttgtactcactggcatcgccctcccggggccgccaggaatgaggcactgagatcccaccccaagccgctgggggcgccattcgacttcgctcctacggaaatggggcttcgatgtctttctgcgcttgcgcggcacggaaactcacttccggccctgcgcactcagggtctgaggcagctagtagccgggtgagtggaggctggagttttctcggacagtgaactctaccgccccgtgagaccctgccctatgtgtcgcgggaacacatgtcaccccacagctctctttgagtgacctcccgaccacccattcctgcctaaccctagcattccttcctcagcctcaaggtcccagtgctaccctctcccccacgacccctttagacgggcatgcgacctccacacacgcctcactttatgtgatagtcagactagtcgcatctctctgtcctccctcagttgccttttcagaggctacctcccctgtagagcctttgttgggggatgaggagtgtcttgggtcgagaacaggcccctgtaacccactgagcgccccttcattccgtctctctccgccctttgtagagggtcaccatgaagttcaatcccttcgttacctcggaccgcagtaaaaaccgcaaacgtcacttcaatgccccctcacacgtgcgcaggaagatcatgtcatccccgctctccaaggagctgcggcagaagtacaatgtccgctccatgcccatccgcaaggacgacgaggtccaggtacgtctccctccggcgctagtggcgctcggacaccgttgcctaagaacgtcatgcgtggagcagtcacagactcacatgcctcaggactctggaaagtagtgtgacccttcagatgtgttaggccagagatagggttcagagccaccagagagtgcctgcgttgctttagagcatttaattatttaatagtaatagtaaaatttaataaaacagtatgtcaaccaagcaaaaacctgcttttttgtttgttttgtagagatagggtcttgctatgttgcccaggctggtctctgaactcctggcctcaagtgatcctcccacctcagcctcccaaagcactgggattacaagtgtgagccaccgtgccccaccaaaaatacttttgatttaaccttctggctgctagtttgccaagtgttgttgcccagggtggcttgttgaaccagactgtaggggaaggtgctgcagtgagagtagtgttttagtgtatttgggtgtagtgggattgatggacagagatttgtgggagctggccatgtgatagcattggatttggcaggagaactggtaaagatgcagcgagtcactctttcataatttctaaaagactggcccatgtgagaacgtacaagccctctgttctctgtgattggagcttagaatgcatgagaggagggaagggagttggatatgagtgaaataagcaggggctagattcattcctcaaaggaa

SEQ ID NO: 1881880 - DNA, 4001 bp, Homo sapiens
catggatactccttgatgatcttgggttctcaagatctgtctttacatggctttccttcaccagtgaggctctgaacttcttgggagcactcctccccagatctctttaatcaagacctgtacctggctccatgtaggtaccaaataaattgatgagcaaatgaatgaatgtatgagtaaataagtgggtgaatgacaataaatggatatgtgatagagaaatgagtgaataaacagaaccagtgagtgagtgagtgaatgaatgagtgaatgaatgaatgaactccttggggcagggcatgggtttgactaacacctaaggactattctaagaagaacctctgacctttactgtgtgtgcgccgttatgccagcgtctgctcctgggttgccgataggtaatgacttcctttcttaggactgccccccaacctccttattcttggagcctgggcacacgcacagctgggtggcccttcagctgatactgccttaactgctttaactctgcctgctgtgctgtccaggcttctgcaaatagcccaggtgtggccatcctccagaggcctccaacattaactgtgaagggcccggaataaaacctagtattagtaggccaggcgcagtggctcacgcctgtaatcccagtactttgggaggccgaggcgggagaatcacctgaggtcgggagttcaagaccagcctgaccaacatggagaaaccccgtctctactaaaaatacaaaattagccgggcgtggtggcgcatacctgtaatcccagatactggggaggctgaggcaggagaatcgcttgaacttgggaggcggaggttgcggtgagccgagatggtgccactgcactgcagcccagggaacaagagcgaaactctatctcaaaaaaaaaaaaaaaaaaaatctagtattagtaaacgcaggtgtttaacaatgtcaccactacatgtcagggaacactgataaactaagagagagcacgggacctgcctgggtgtggctgctgtacttgcaagacatcttccctctctgagtttcagcatgccggcatttggcactaagttgtcgttcaacatatatggaatgaatgaacgaaagggagagttggagttaataacaccttgcatagaataaaccccgtcggttcttaacccgaagagagtcgagacccagagcccttttccttccctgccgccacggtgcccacggagggggcgtggttgatctccctcacagctccgtcgggaccagagacccggggaccttttacacccagggtccgcgcaaagtgtcggcctagccagtggttgggtggcgcccgggcctccaggcagtcttccaggggtcggcgaacgaaacgcggagctcgggagcgacccggcggggccaggcacgggcagaagggccaagagggccacaggtgggcgcggagcggccggagtgggcggggactggatgagaggggcggggtctaggagagaggggcggggcggcggccacaaacccgcaggcacgccgccggccgccgtttagtcccagagatagaaaaaagtagaggtaggagggcgcggcggctcacgcctgtaatcccagcactttggaaggccgaggcgggcggatcacgaggtcaggaaatcgagaccatcctggctaacagggtgaaaccccgtctctactaaaaatacaaaaaattagccgggcgtggtggggggcgcctgtagtcccagctactcgggaggctgaggcaggagaatggcgtgaacccgggaggcggagcttgcagtgagccgagctcgcgccactgcactccagtctgggcgacagagcgagactccgtctcaaaaaaaaaaaaaagaacaccagtaagcctctaccgcaggccctacacaagcaggcccttgtactcactggcatcgccctcccggggccgccaggaatgaggcactgagatcccaccccaagccgctgggggcgccattcgacttcgctcctacggaaatggggcttcgatgtctttctgcgcttgcgcggcacggaaactcacttccggccctgcgcactcagggtctgaggcagctagtagccgggtgagtggaggctggagttttctcggacagtgaactctaccgccccgtgagaccctgccctatgtgtcgcgggaacacatgtcaccccacagctctctttgagtgacctcccgaccacccattcctgcctaaccctagcattccttcctcagcctcaaggtcccagtgctaccctctcccccacgacccctttagacgggcatgcgacctccacacacgcctcactttatgtgatagtcagactagtcgcatctctctgtcctccctcagttgccttttcagaggctacctcccctgtagagcctttgttgggggatgaggagtgtcttgggtcgagaacaggcccctgtaacccactgagcgccccttcattccgtctctctccgccctttgtagagggtcaccatgaagttcaatcccttcgttacctcggaccgcagtaaaaaccgcaaacgtcacttcaatgccccctcacacgtgcgcaggaagatcatgtcatccccgctctccaaggagctgcggcagaagtacaatgtccgctccatgcccatccgcaaggacgacgaggtccaggtacgtctccctccggcgctagtggcgctcggacaccgttgcctaagaacgtcatgcgtggagcagtcacagactcacatgcctcaggactctggaaagtagtgtgacccttcagatgtgttaggccagagatagggttcagagccaccagagagtgcctgcgttgctttagagcatttaattatttaatagtaatagtaaaatttaataaaacagtatgtcaaccaagcaaaaacctgcttttttgtttgttttgtagagatagggtcttgctatgttgcccaggctggtctctgaactcctggcctcaagtgatcctcccacctcagcctcccaaagcactgggattacaagtgtgagccaccgtgccccaccaaaaatacttttgatttaaccttctggctgctagtttgccaagtgttgttgcccagggtggcttgttgaaccagactgtaggggaaggtgctgcagtgagagtagtgttttagtgtatttgggtgtagtgggattgatggacagagatttgtgggagctggccatgtgatagcattggatttggcaggagaactggtaaagatgcagcgagtcactctttcataatttctaaaagactggcccatgtgagaacgtacaagccctctgttctctgtgattggagcttagaatgcatgagaggagggaagggagttggatatgagtgaaataagcaggggctagattcattcctcaaaggaatatttatggagcacttaccagagattgttctaggacaagattgacgaggcccttgttctcatggagatcacgttttagagcagggtttcctagcctcagctctattgatatgttggactggataattgttgtggggggtggggggtgggggctgtcctgtgcattgtagaatgtttagcagcgtccctggcctctccccactagatgccagtggcactccctcccttcacagttgtgacaagcaaaaatatttccagatattgccaaatgctccctggggggcaaaatcaactcttccctcactcagttaagagctattgtcttagagaatgaaatgacataaggtgatgaggcttggtgtatcatctgagacactgggactctttgaaggtttggggatatgttaaggaggaaaaaatgtggagttaagccggaagtgtgacaggaagagtggaaagagtagttcagaggtatgatcagcagtttcaaccccctctctcctggatccttcccatcagacatgttctagaatgggggaattgcaaatacttataggggataggtagggatagaaaatggcaaactggaaagct

SEQ ID NO: 1881881 - DNA, 4001 bp, Homo sapiens
gcgatctcagctcactgcagtctccacctcagcaggagagcaggaatcttcagtgatccacgggcaaatatgcagccattgtgggcacctgttcctcccgcgacctttgtgcccacgtctctccctccagtacctactgcacgaccccccacgtccgcctcctgccattgccagcaggtgccttgcgcgggtacctggctgcgcttattcatccattatggtcgctctgtcactggtgccattatgtgctcacatgcccactccctcaggtttagaagtcgcgttgcccggcaacagaacaatctgctggcttagcctttggccaagttggcagctggacgaggacgctcagagcccagctcttgagagttcaagtatccgacagttccccactgctcccaggagcggttacccgggcactctgtgcccctcattcctgtttgggccaaggccgaggacctgcgagtagggctcagttgcctggagccccttcagcccatcccccagttcactttgcttgtgggatctccccgttgctcctgcccctggactgagtggcaggccatcctacaaacacccgcacactcgacatcagtggtgtcaagacaactctaagaaggttttccgtgatcctgcaagacctgtgttccatcctggtgattctgtcttcaacttcactgcacaggtaccacagtaagccagtgctgtgtgctctgagttccagggcatcccccagctcagccactacactgagcacaaggactctgtggggcccaggagcaggtagtcacccctttggggtccacaacacccggctgtccccagacttgtgtccagggaagatagtgttgagggccctcaaggagagcggggcagggatgcctgagcagcacaaggaccccagagtccaagaaaatcctgatgatcagagaacggtccccgaggtcaccggggatgcacggtctgcattttggcccctgcgggacaatggaggcccctctccctttgtgcccaggcccgggcctctgcagacagacctccacgcccagagctcagaaatcagatataaccacacatcccagacatcctggacgagctcgagcaccaaacgaaatgccatctccagctcctacagctccacgggaggcttgccggggctaaagcagaggagggggccagcctcatcccgctgccagctgaccctcagttactcaaagacagtgagtgaggacaggcctcaggctgtctcttcgggtcacacacggtgtgaaaagggggcagatacagcaccagggcagacaatcgccccaacgggtggctcccccagatcccaggactctaggccccgtagacgcaagattcccctgctgccacgcaggcgaggggagcctttgatgctgccacctcccttagagctggggtaccgggtcacggctgaagacctgcacctggaaaaagagaaggcattccagcgcatcaacagtgcactgcacgttgaggacaaggccatctcggactgcagaccctcacggccttcccacactttgtcctcacttgcaacaggggcttcgggtgggcctcccgtttctaaagcacccactatggatgcacagcaggacagacccaagtcccaagactgcctgggcctagtggcccccctagcatctgcagcagaggtccccgctacagctcccgtgtctgggaagaagcacagaccaccaggacccctgttctcctcctcagatccccttccggccaactcttcccactcccgggactcagcccaggtcacctcgatgattcctgtccccttgacagctgcaagcagggatgccggcatgagaagaacaaggtcggctcctgcagctgccgcagcagcccctcccccctccacattgaaccccacgtcggggtcactactcaatgcagtggatggaggcccctcacatttcttggcctcagccacagctgcagcacgtgtccagaggtcagaagtgagatataaccagagatcccagacctcccggaccagatcgtgcctcaaacgaaatgccagctccagctcccacagctctacggaaggcctccaggaagtaaagcggaggagggggccagcctcatcccactgccagctggcccacagttcctcaaacacagtgagtgaggatggacctcaggctgtctcttcgggtcaccgctgtgaaaacaaggcaggtacagcaccagggcagacacttgcccccaggggtggctcccccagatcccaggcctctaggccccacatcaacactgcactgcacgttgaggacaaggccatctcggactgcagaccctcacgaccttcccacactttgtcctcacttgcaacagaggcttcgggtgggcctcccgtttctaaagcacccactatggacgcacagcaggacagacccaagtcccaagactgcctgggcctagtggcccccctagcatctgctgcagaggtcccctctacagctcccgtgtctgggaagaagcacagaccaccaggacccctgttctcctcctcagatccccttcctgccacctcttcccactcccgggactcagcccaggtcacctcgctgattcctgccaccttcacagctgcaagcagggatgccggcatgagaagaacaaggtcggctcctgcagctgccgcagcagcccctcccccctccacattgaacaacacgtcggggtcactactcaatgcagtggatggaggcccctcacatttcttggcctcagccacagctgcagcacgtgcccagaggtcagaagtgagatataaccagagatcccagacctcccggaccagatcctgcctcaaacgaaatgccagctccagctccagctcccacagctctacggaaggcctccaggaactaaagcggaggagggggccagcctcatcccactgccagctggcccacagttccccaaacacagtgagtgaggacggacctcaggctgtctcttcgggtcaccgctgtgaaaacaaggcaggtacagcaccagggcagacactcgcccccaggggaggctcccccagatcccaggcctctaggccccacatcaacagtgcactgcacgttgaggacaaggccatctcggactgcagaccctcacggccttcccacactttgtcctcacttgcaacaggggcttcgggtgggcctcccgtttctaaagcacccactatggacgcacagcaggacagacccaagtcccaagactgcctgggcctagtggcccccctagcatctgctgaagaggtcccctctacagctcccgtgtctgggaagaagcacagaccaccaggacccctgttctcctcctcagatccccttcctgccacctcttcccactcccgggactcagcccaggtcacctcgctgattcctgccaccttcacagctgcaagcagggatgccggcatgagaagaacaaggcctggcacctcggctcctgcagctgccgcagcagcccttcccccctccacattgaaccccacgtcggggtcgctactcaatgcagtggatggaggcccctcacatttcttggcctcagccacagctgcagcacgtgcccagaggtcagaagtgagatataaccagagatcccagacctcccggaccagatcctgcctcaaacgaaatgccagctccagctcccacagctctacggaaggcctccaggaagtaaagcggaggagggggccagcctcatcccactgccagctggcccacagttcctcaaacacagtgagtgaggacggacctcaggctgtctcttcgggtcaccgctgtgaaaacaaggcaggtacagcaccagggcagacactcgcccccaggggtggctcccccagatcccaggcctctaggccccgcatcaacagtgcactgcacgttgaggacaaggccatctcggactgcagaccctcacggccttcccacactttgtcctcacttgcaacaggg

SEQ ID NO: 1881882 - DNA, 4001 bp, Homo sapiens
caactcctgatctcgtgatccgtccaccccgacctcccaaagtgctaggatcataggcataagccaccacacccggcctcttttttttctttttcttttttttatctggagactgagttttgcactcgttgcccaggctggagtgcaatggtgcgatctcagctcactgcagtctccacctcagcaggagagcaggaatcttcagtgatccacgggcaaatatgcagccattgtgggcacctgttcctcccgcgacctttgtgcccacgtctctccctccagtacctactgcacgaccccccacgtccgcctcctgccattgccagcaggtgccttgcgcgggtacctggctgcgcttattcatccattatggtcgctctgtcactggtgccattatgtgctcacatgcccactccctcaggtttagaagtcgcgttgcccggcaacagaacaatctgctggcttagcctttggccaagttggcagctggacgaggacgctcagagcccagctcttgagagttcaagtatccgacagttccccactgctcccaggagcggttacccgggcactctgtgcccctcattcctgtttgggccaaggccgaggacctgcgagtagggctcagttgcctggagccccttcagcccatcccccagttcactttgcttgtgggatctccccgttgctcctgcccctggactgagtggcaggccatcctacaaacacccggacactcgacatcactggtgtcaagacaactctaagaaggtttcaagtgatcctgcaagacctgtgttccatcctggtgattctgtcttcaatttcactgcacaggtaccacagtaagccagtgctgtgtgctccgagttccagggcatcccccagctcagccactacactgagcacaaggactctgtggggcccaggagcaggtagtcacccctttggggtccacaacacccggctgtccccagacttgtgtccagggaagatagtgttgagggccctcaaggagagcggggcagggatgcctgagcaggacaaggaccccagagtccaagaaaatcctgatgatcagagaacggtccccgaggtcaccggggatgcacggtctgcattttggcccctgcgggacaatggaggcccctctccctttgtgcccaggcccgggcctctgcagacagacctccacgcccagagctcagaaatcagatataaccacacatcccagacatcctggacgagctcgaacaccaaacgaaatgccatctccagctcctacagctccacgggaggcttgccggggctaaagcagaggagggggccagcctcatcccgctgccagctgaccctcagttactcaaagacagtgagtgaggacaggcctcaggctgtctcttcgggtcacacacggtgtgaaaagggggcagatacagcaccagggcagacaatcgccccaacgggtggctcccccagatcccaggactctaggccccgtagacgcaagattcccctgctgccacgcaggcgaggggagcctttgatgctgccacctcccttagagctggggtaccgggtcacggctgaagacctgcacctggaaaaagagacggcattccagcgcatcaacagtgcactgcacgttgaggacaaggccatcccggactgcagaccctcacggccttcccacactttgtcctcacttgcaacaggggcttcgggtgggcctcccgtttctaaagcacccactatggatgcacagcaggacagacccaagtcccaagactgcctgggcctactggcccccctagcatctgctgcagaggtctcctctacagctcccgtgtctgggaagaagcacagaccaccaggacccctgttctcctcctcagatccccttcctgccacctcttcccactccggggactcagcccaggacacctcgctgattcctgcccccttcacacctgcaagcagggatgccggcatcagaagaatgtttcgtgttcgaaattgtttgaggggtttgggtttatttttgttggttttttctttttttttttttgcttacgtgggcatccttcagcttttaataatctgaaaaattctatttacccattgtcaatgtgtataaattaatctcagtcaattttatacaataaaaggtgaacttttatccatcaaacaataatttaacaaaaaatgtaccggaagaagaatgttcattacaaatataggaaacataaatattaccaaatattggcaagcactaaaatgttcagaaatataagtctattacagttatagctctctcaagcaaaaaaacagcagagaaaaacttagttttcctgaggggctatttatttacttagggatttgttaaaaggtcaaatggggtcacacagaatactaagaagagctgttcacccaggcctcactaagaactcttcttcatgcagtagctatatagtaatatgacaactgctcctacgacccacagaggaactacagcaactactctttagcatctgttgctcccaactctgctttgcaattatatgactcaagcattctggctccgttaactattactgctgttactcccaagtaaattccctctaaaaaataaaaatttttaaagctgtaatttaagctctctgctgcctcatgacttcaattccatcagagttacgcattgtttcctctgtacatctttgctctgcttccattgctaattccctagtaaagtgttgtatattcaaagttccaaagaaacagaatatccaagacatcaccaatcatccaaaacacagtgtaggaggccacagttaagagaagcaagaccattagctctttttataggctcgagaacaacaggatgctttggtcctgtatcagcaggatgctttttgggtagatcctactgccaccctactatcgggtagatcctactgtcaccctagctatgggcacatgtcagagtcccatgtaataaaggagacaaaaggaaaccaccacgagtataaactaagaaaagtactccaaggtttctaagaatggagctgtataactcactttgccccgtttgttacttctccacggtacttaccaccacctattacatacattttgtttatagtcagtcttcccccattagaatgaaagttccgtgaggataggactatacagtcagccctcagtatccatgggggactggtttcaggatctcctgagggtaacaaaggatactcaagtccctgatataaaatgacatagtatttgcacatcacctttgcacatcctcccatatacttcatatcaactctagatcactcataatatccgatgtaaatgtcatgcaaatagttattgtactatattgtgtaaggaataaggacaagaaaaaagtctgtacatgttcagtacagacgcaatttttttttccaatatttccaatccttggttgccttaacggatgtagaacccaggaataagttctggtgtcctattgcatagtaggatgagtatagttaacaataacatattatatatttgaaaatagccagaagagtagattttgaattttctccctacagaaaaatcattatgcaaattaccctgatttgatcattacacattgagtacatgtattaaaacatcacattctaccccatatatatgtacagttattatgtgtccataaaaatttaatgtcaatgtgtgaaataaaatgaaaaaataaaaatttttaaagctgtaattatctccatctggtaggaatatatacaatctgaaataaaaaatatatttgtaattgttaggacaaaatagattatacattaagtctgcaaattataaattataaaattctcacagaacctgaaaaattattgatactgttaaatatttaaaaagctgtccttggagagaaagaaacctatcagatttacatcaacaagtgtaatatgtcagcctattaccatctgctacagactgca

SEQ ID NO: 1881883 - DNA, 4001 bp, Homo sapiens
tttgatttgtcttgacatggacgctgatttatagagctcttcccccagtgatttcttcttgtagtccagacacatggaaatgataaaaatctcaccaaagctcaccttggtgctaatcaagactgctcgatgcacgttataaatctgatacaatatttattgcttatctgtattcgaggggttagtctccatcctaggattgtccctttcaaaaaaaattttttggatgcatctgttttcactttgcactttcaacgggctggagcagacaatagtgtgaaaaacatctgaaaatatgaggcgacagagctgcatgtgtgtttcatttctgcggtgttaggggagaaaataacaaaagaaacacacactacaacacacacgcacgcacgcacacacacacaccggcccaggacctcagcacaaagggcgcgctgacccagcgctaacacacaagacaaattaaagaaaggggcaaatcggaggaggggctaaggcgagggtccaggcatttcgggaaaagatcaaggacaaggagagttaagaaactgaccgtgggccagggaagaccggagagagagaaagtaaagtgtccaggactggaactcacgtccctgaggcaggggacagtaagtttgcttgtaacacagacagttttccttgactgcaggaaacaagaaaaatagtaatcataaaacaagcacaaatcccccaaacatcaggggggtaaaacccccattattagccatcacaaaccaaaacccaaaccgagtcttttctgctgaattgctgcaagatcacaagagaccaagagatccggagtcaggctgtgaacttgggaaagataagttgcccggcgaggttggaggtagactgaggaacgcctttttttgtgaaggacacaaatatttgcagagtttaaagctgcaggaatacaaaagcaggagtgagattatctgattacggatacaggatgtccgagttgttgcctcccaaaaacgactgcgtaaaaaaaaataaataaaaggccagttcgaaaagtgaaattttaatatcagtgaaagcatcggagggactcggattgaacgcggcagctccggaactggacaacagctgcgtggtgcagccaatcccggggcctgtgggaacgagcgaccgatctcaggaccacgcgggcgagagcaaggagcctcccggccacacagccacaggcgctgcggaacccagcccggactctccccggctggagtgtgcgaagggcttcccgcccaggggcccagggtggtcttagtgaaaaagggatggcgctgcagcactgaccacgttgccctggtttctccatttctccttcccaagtctctgcctctgtttccccatgacccggaggacgcgcctacggaagagacgtctggtcgagggggtgccggggagcggaagggggaggggaaggtctcatccctgggacgctgacacccccctccccgcggcactccagctccgaagagcgagcttcggttccgcccgccctccagaccatttgcttattctcactattgttttaatttattgtgcagcctgttgcgccgcgggcccggctgagccatttggggccctctagatgccctgcagggcgcctgtctccggacgaccaccacgcaggagcagcgggggcacgcgcgtgttttcttgtggataactgcctcggacttggcggggccggtccccacctgaagctcacctcaggcagtcgctagaagttccaatccaatcgtgagctttcctctgggagggacaggatccccttcaactcctgaggctgctcctctgggcgaatcccacagtaattgcgcatttctctccctttagtgctttggaaatttagaaagcgcgctttcatttgtacatcgcctgccgacagcccctttgctgattagagaagccttgttccccctctccacgcgtacgcacactcatttttagttttaacaaatgatttaaaaatcaaaacaaacctctgagtcagtccgcccaattttatgctccatctcctctgtgtatgtgttagattctctctgccaatcgatgggaaagagcatttaggggcatttgcaatttcctttgtcacttgccactctgtgcgtatagattttacatatcatttgtttaccaaatcagttcgtattttcttagcccagggttcaggattttgcgtttgtggattaattgcccagtacccaaagggcaggacagtcagaggagccacctgatgcaagaaggatcagctcacgttaggacaaaacaaggaggttgttgtgagcccttctgcgggctctgaattaactcaaacagcccttcctaggacttgttaaaaagaccgtaccttgaagggatagtgtggtgcctaatgtctgctagcctataactcaatgcattacaaggtcatttttgcccagcccaaagaaactgagtaaatccaatgtccctggttgaagataatacgtagtcacttcatttctggccatatggtgcctacctgcattctagtcttgaacagtctcaggttccttactgggtctcacttattgatttttttactagattacatcataatttaatatggctgagtgatgtggagcttgtggatgatccttttattgccctgattaaaatccacacagtaagaaattttttaaacggaggttgatgatggaagcttcctcaataagtatccttcagtcaagaaatgattgagctttaaattataagaatctcaaaattactgtgcaagtgtttggcaatcaatttcaggttttcatgacaacaggagcctaggccataggatggcaaactaaattcaatgatcacttgtctgcttctgcagataatcttaaaggaagcttcattacaattcacccatcaaacaactggcatctcaaaatgcatcaagagctttgtctatgtaagcagacagcacattctatggcatttgaattttataaaaataactagttaaaagatatattttgaggtcaggcttaatttttgtttggaccaatttgccttatcatttataaaggtatccttagatgtatgtcgttacaccaagctttcagctgtctctaaggacacattaaggtgaggtggtgctgctgtctaagattctaaggacagcattcatgggtaaacaacagacaagtcctgtgcccttaccattacttcagagcacagcagttccactggattcaaggtggcttcttcctactcttgtcttcattattgaacataatttgatcttatttaagatgataataagttccctgacagtcagagcatgctggtcagagcaatgtctctttcttgtgaatgaaaggacaattaataggaaactctgttggtcttctatatcgtctttgttaggatgtgggcagagtgagtcaataaatagaatttgaaataagcaacacatatttgccctccaaatcttaagctataattcaatatctaatggatttgaggaaagaaaaaagaggtacctggtcttctgagctgatagagggttagattataacctgattgaaggactggcaaaaagagtaatagacacaattgatggtgtattttcattcaaccaccagctaggcagaagagatgtggaccaaggaaattccacctcaactttctttattctgattccatgttcaccaagaaactttctgattataattgaaattgctgtttatatctgctaagtaatgggaatgtatttaggtctctgagatcttttttgtgtatatatatatatatatatatatatatatatatatatacacacacacacacacacacatatatacatacatgtaaacacacaaaacgttttaatcaatggattctggtcttaatcactgtggttaaagtgattttgctctgagagacagtttgctaagaagtcaggtttccggctaggtgtggtggctcacacctgtaatcccaacactttggga

SEQ ID NO: 1881884 - DNA, 4001 bp, Homo sapiens
gaccctaactttccaaggcacccagcaggtgacggccccggcgaggtctcccctgccgccgtggggctctccgaaggctgactagccgctgccctctctcctaggaattgacaaccctgtgttttctccggacgaggccctggaccgcagcctcctggccaggctgccgccctggctgtctcccggggagacggtggtcccctcgcagagggcccgcacgcagattccctactctcccggcaccttctgccgcctgatgcccttccgcctcagcagcaagtccgtggactccttcctgcaggcagacggccccgaggagcggccccccgccgccctccccgagtccacacacatgtaacgctcccgggcctcccgccgcctaacccctctccgcagctcctctccctccaggtctccgcctcgcgcgcgctgtctctctccctccccgcctaacccctctccgcagctcctctccctccaggtctccgcctcgcgcgcgctgtctctctcctccctggacctgaacctggctcgctctctctctccccgcctaacccctctccgcagctcctctccctccaggtctccgcctcgcgcgcgctgtctctctcctccctggacctgaacctggctctctccctccccgcctaacccctctccgcagctcctctccctccaggtctccgcctcgcgcgcgctgtctctctcctccctggacctgaacctggctcgctctctctctctccccgcctaacccctctccgcagctcctctcctccaggtctccgcctcgcgcgcgctgtctctctcctccctggacctgaacctggttctctctctccctccccgcctaacccctctccgcagctcctctccctccaggtctccgcctcgcgcgcgctgtctctctcctccctggacctgaacctggctcgctctctctctctccccgcctaacccctctccgcagctcctctcctccaggtctccgcctcgcgcgcgctgtctctctcctccctggaccggaacctggttctctctctccctccccgcctaacccctctccgcagctcctctccctccaggtctccgcctcgcgcgctcgctctctctcctccctggacctgaacctggcgcgctctctctctccagcagcccctcttcctcctctagcgccctgctggccgcacctccctcaggagcccggacagagatactctggcgtctctgctgctcccacggagctgagggcactagggccgcctgagatttcctttaggtggctccgaaagctagtccgcgagtccaaatcctgcgctcccagggagctgagagcagggctgggggaagccagacagacgccccgggtccccgaccctctcacagggatacagggagggccggccccgcagacccggactctgcctccagctcagagcagggagaggggcgggccgtggggtctgggctttctgagctccctctgggggcctgggaggcacccgggggacgccagggcggtttgagatggaggaagcaggtccccttggggaccttgacctcccgcgctgcagggcctggggcgggaccttcctgcgccgaggaggccgctgtcccgggacccccggcggggggacgtggcggggccgggctggggcttcgctgttgctgcttccgcctctgccccgcgaacccgggtcctgggaggaggccccagcggacgccgagcctggggtgcgccgcgggaggggaggcgagagccgccgggctcggggacagctgaggcccccggggacgcccctcccgccccagcgcccgggctccgcgcgccgctcacgccttcctctcccgcaggtgacaccggctccgacacgccgctaaccggccgctcgtccccgcgccacggtccgcccaccgccgccgccgctgtcccagagaaaccccagatccccgcgcggctacagcgaccgcgagccccgagccccgcctcgcccacgccagcgcctgcgcagaactccgagagtgccgcgcctgcgcccgcagagccgcccgagggcgagccgggggcggggcctgcgccgggggcggggccggagcgccgagggctgccgagtgcgcacgcgcgttcggcggcggcgcgccgcgtgcacagccggcgctcgttccagcggcctcgcgcgcgccgccgccccgcgctgctgaagctggcgtcgctgccgccctcgtgccacgcaccgccgcacgcgctggagcaggaggagacgccgctgtgacgccgccggcgggaagggtccgcgcgccatggctggccgctcgcgccctttcccaccgctgccgggaaaccgaggctcgccccaaacggatttgcgtgaaaccagcccaaggttccgggcccccccaaccgagccccgcgcccggggactgactcggggaccgactcagggacctcccgagcgccaggactcagggcccgacctgcagcggctgcaggcccagcgcccgcaagcggcctgggccgagcgccgtttccaggccctcgccaggtctttgaactgcaggtaaagtggcaggaacgtcttccgtctgctcagcgtttggggatttagactcctaaagccagtacctgccccgtttcccccccaggttccgtcctgcccgcgcccggtctcagggtggcggccccggacacggcccgtccccacagacgaggtctccggcctgagctgtcgcacctggcgcggaggtcgcccggggtgccctggctgggtgagaggtggcctggcgggcggagcttgccaagaatcacggccagtccttaagtggatggtggggcccagcagctgctctgtcccccttaacaaaccagggggcatggaggggcccagggcaccgcccccctaccaggctcaggccctccaaggagaacctgctgagacccctgagcctgtcctagaccccggacccctgacccttcccaccccttccagcgtcccagggcgaggccttggacagagctcctggtcctctgcagggagaccatccagcccaagctctgggaggcacagtccattgagtgggcggaggccgcgggtgctgagccggggagggtgctcggagtccatccatccctcagacggcaagtcccacagggtccaacccacctgaaacctgcctgcacggtggaagtggtggaggtggacactcctaggggcttttctaaagctagactcgcagctccttgctcaggaaaattaaactattcacgtttcagatcaagtgttgacagtcaccagtcaggaggagttcttaaagagttttatgttgactgaatattgcacattgagtccccattgagtccctggtgggaaaagtccacaatttcccattgatagctttttactgttgtgaaaaagggaagcgtcagccacacaaaagcctgcatgaccgctgcttcggagaagctctcgaccctaactgcagtcactgttacttggatcagatcaagcgcagtgactttttgggattcagtggttattctccacacttcgtagccatttcaaccaactctgagcacaaaatgcagccatcctctatgcagcaagccctgcccagtcagtgaccctactggacagatccaaggccagccctggttccctgctgcagccaccgtcctgacgttcatcggagcaggccggggcctggccttcccggcacaagtggctgttctgacaggcccccagtttgtcccatctgaactgctgggaggtttccgggtggccagaggagcaaagctgccttccaagtgcctgtctgtgcctgggagaacagagcaggagcgtcgtgcggtccaccgcgcaatgcatggcgattccaggcgctgaacaactcccctggacccttgggcctgcatctgactcccagctgcagagtcagaagctgagtccaggcaactgcttggccactcccgatcgctcctccctggacacccggttaccaaagtc

SEQ ID NO: 1881885 - DNA, 4001 bp, Homo sapiens
aaaaaggtatctttggattacctacacgctttttaaaaaatgaactggcaagattgttgcaattttccacctactgtgtacttctgcaaagcaataaagtatgattttactcgaaatctaaatctccaatgttcaatattttattacaaattgggcaagatcttttttcgaatagcatgtttgatggcacaatacgacagaatagcatattcaatggcacaattagtagtaaaaaaacaaaaaacctgcctgacgtgcttccggaaaacgtaaaatagactgtatatacagtaattcttttcataagacaatgacaaaatgtcagagttgtaattgaggactttattaactgaactatacttctgattacaacattctgtgtatgttaatagtttctctggagaaattacgggcacaggaagttcctctcattaaggatattaacataaagcttaatatgaaaaattagcactcagttcagaaatgacgacttcagaaatgacttcagaaatgacgatttgtatgatcttttcattcctcacaacccagtattaaaactatctaatattgcaaaggatggtagtgttccacttcgttttgctattcaattattgctgatagatacatgttttcaaaaaggccattggcatctgtttgctttctcctacttctccaagtgaatacacccttcaatatgtagtaaatacatatgtggagttatgttttgagatttttttgaaggatttgaaccaaactgtttaaacagctggtagcctaaaactggaatatttcccacaagggaaaaataattatttggggaatgtatgttaccacaaactcatctgacttggaaagtgcgcctttacaccaaatcaaataactgaacaatgggattagaaacttttaattattattaacctcggccaccgggcgccgtggctcacgcctgtaattccagcactttggaaggcagtggcaggtggatcgctcgagctcaggagttcaacaccaacctagcaacatgacaaaaccccgcctctacaaacataaataaaaaacaaaaatcattaaccttgagtgagtcaagttcatctgcagactgaaaaaaataaagtgtaacagaattttgatttaaaaaacgctttcaaaaaagcatttcaaaatgctctaagtatgtttcaaaaatacacttaaaaatatgtttccaacacactgaagggatttaactaagatccacaattacagttacgatacaaactgtaagctaaaaggcagcaacttaagctgagacagttactaacatccctcgagcagcgttttttgttgcgattcggcgccgcacccgtcaccccgccctccggggaggaacctagaaaggaagggtggtacatttctaaaccaggccacccacacatgaatcaagcggcatcacaggctgtcaacaaccgggtctctattttctctcctcctccggcgccccgcccgtgcgggacatcagctcccaggatgcgtcaatcgcagatcgcccaagcgtaagaggtggcgagaggccaccacggttgcccaacagttgcgttcccaggctgcctggtgtgacgcagcagcccccgcccggaccctgaggcctggcgctccgactgagccgaggcctgtgctacccgacactccttgcgacccggccccttaggcttattcagcgcggcccttcccggcttcccgagtcccatcgcagtctctccccacccccgttcctccccggttccttgtcagtgtccgccgcgatgtccttgcgcaaccatcccaagtgacattagcgcccatacccgcacggagcgagcctgaagctcccacttcccggaattcaacgccgggccgctaagggcgggcacccaagcgaggatcagcggactaaggccgcgaccagagtccagcggtctccgcgcagtcagagtccgacagcctctgcgcatccgccgtgcgcactcccattcgtgcgcgtgcgcgcactcgccccccccgccccgccccagcaccaatcgcttttttcctacgcccacgacccttcaacgtagtccctcccgcctcccgcgcgcgagcagaaaggcttcggcgtgcgcgcgcccgcccgcctcgcgctctgtcgggaaggggagtgagcagaggcgcttacgtcgcgcgggaggcggaggcgacggcgacctcggtggcggcggcggctacgacggagacggttgcgctcgcttgctttctcggcgtcatggcggctgccgggggcagataagcggagggagcgggagcgcgcgcgcgacggcggcggcggcggcggcgacgactggttacttatagctcttgctgccctcgcccttggtgcttcaataatgaattgttagctccactccgcaggggatcgcgcgttggtgctgcggaccggggcttccccttcccctccgcgtctgtccccttccccctcccccgcacggactcttgcttaccccgagacgccggagccctaggactgggcggcggagatcccgggcctgggcgcgggggaggccgtccacccgagtcggctccctccgccccgccaagcccgccggtaagaaagggggcggcgggcgggtcaggatgtggcggagaggacaggaaccggccgggcggagggcgggcgcggcgcggtgcccaggcggcggcccagcggccgggtgaaggccgggtggctctgtgagtgccggtggcggtgtacgggcctggcgcgcagggggcgtgtgagcggcgagtacaggccggggccgcagaacgcatccttgcgccggcccggcggccctgccccggcctcttcggcttggtgccgaccgggccgcgagaggagacccgcgaatggctagcacttagccggtgcgtgggtcctgccgcgacccgggctcccagcacgtggggagcggcgggagggggagggggcggcggctcgggcgagcctgggagggcgcggggcgggtctgcgggaagtttgaggcgggaagagggactcctggaccgggatggaggccctgggagaggggggcaggtccgcgagggaggctgattggagcgcgctggatggatgagtgaggatggtttccaaacctctttcgagtgccgctttaaaaacttagcaggagcaaagcaactgctaaaagacagaggattgaagaggtttaataacttagggtagtcattgtggagacgcttgagaggacacagcgctgtgtgcgcttggagcttcagaactcagggttgtgaaaagggtctcagaggacttattcggataagggagatggaggggaaaggaagttaaaatgtacagagaaagccattttgagggacgaaaggaaggtgaaaaggaaagaacgaaaaggggagtgaactttttaaaggaagaaacgggaaaggcagtttgttaacatacttagattttttaagacttaattgttcagtaaggcactttgactagggttgagattaatatttaacattaggaataaatgttgagtagaacggttactttttagataacctgttcttgcagagtctactggacagtagtctagagaattaacatcctgatccagatgcagactttgctatcattgagttggtaacaatctgtttccctccctctcttgtggaatggaaataatcgtaggagtgaattctctttgctgaggtcggaggacagctctgctctcagttggctgtctcggtactttctggctggggaaggatctgacgtctccttcccccgcttcttcctctccctcccctgccagagatctcctttgtttattcgtggatggcttgtaggtgattcttcagtgttgtactgaaatctttaaaggtggaaatggtgtgtcttggttcattattcttgccccaaattttttacgtaaaaaatcagatatagtgtatattctattaccttttcaatttttttcacaaaataaaaaccaagtgcaaactggtta

SEQ ID NO: 1881886 - DNA, 4001 bp, Homo sapiens
gggcacaccctcctcgtcatgcgttcccaataccatgtggacggctccctggaaaaggactgcagtctgaacccactgggtcgtgaacaggtcgaactaactggactccgacttgcaagcttggggttgaggtttaataaaatcgtccattcctccatgacccaccccatagaaaccactggcttcagcaacaggcacctgccaagcgtcttcaaaggccgcacagacctggggcgggaaccctcctcgtcaagccagcctggcagcgtatcactggaagcggccgctgggcatgctatgaagatggagtccggatcgagggagcgctccgaaactacatccctcgggggatgccaagcagggggaggataattaggagatcttccgatgtcacgccagtgtcattcgctgcagatgacaggacacagcgctgcagtttcctcccgaaggctggctccattgctccctcaacaatggcagcatcacccacctggtgatccgacccaatggccgagtggcgctcaggaccctcagggacacggggttcatgctccctcacagcatcacccagtcctgagggccctccgcaagactctgccctcctcagctcaagacctggctctggcttttccttccctccgtcctcctgtacaggctgcattgcagttacgtgctgttctcgaggaggcaacagacaagtagaaatccctcaaatgctgcgtttgggtatttgtttctggcccgggctgacaagggaaaaattcagatcagataacctgacttatttgcaaggctttctatcttaccatgacctgccaggacgaccgtgtggggtttaaggtgaaaactcagacgaaactcgggcctgttttggggactgaatgagtcctgacagaggccatcacttggacgaccacagcagcccgtcgctgagggtcccctgggctccgtgggcaaagccttgtcaggcacgagggtaactgaggcacacggaaaagaagggcatggaggttttgtttacaactcacttcatttcacattcttttaatttcttaaaacccttgtgtcatttaaatatttatccattatagattttccccagctggattcttgctttgaaaaccaatttctcactccaaagttacagatccctgatgattctggatctgaactcatctacgttattaggcctttgagggctcaaggacttaccaaccacacaggtgaccgtaggcaggtgaggggtgaaatgagtctgcagaggtggtgtgagcttcgaccttcatgctggtctcaacggggaggcgataggctggtgacagcccagcaggaggagattacccttattcaataataaatcccagactgacagctcaatcctagtttgcttctgatttttttttatgcttagggattaaaatatttaaacatgatgtgtctatcccaaatatttagtacaaccatcctattaatttagaaaaaaacaatttctacaacacagtagtgaacattttctgcagtcaatacaactaattgggatagttaatctatttctttgtcaactttggaaatgactacatactaaaaattactggtttaaaaaaattaaaaaatacataaaaaataaaaacatatccagagtctatcactagagatttgtgattcagttgataaagactagggtccaagaatctacttgttcatacatttaagctgattctgatgcagatgattacaacaaacattaaaatacacaacctctaaggtctcttgcaattttaaccctctcttctgttctagtctgtcacaactgtttatcgctcacttagagaatacgtggtgccttacaaaatctagcgtgctcgatgaatataattttatttgaaatccatactcacaggttgctggaattggttaacaaggattccagtcatcatagcatattatagcattctgctggctggacatggtagtcttgttttttctctggtccaggttacttagacggttggactgaaagattcccatcactgtgagattctatgattctgattctaattctatcatattattaggtctaccattaggagttgctaagttttctctgttacttggctaaacatatgtgtactgcctcagaaggcctccaggaagttctccatgtggttaagaatgttgatgtttatggttcaaaagttatacactcagagtgaaaatataactttatttattctctacttgctatttaaagatacctcagttttggatagttcaaagtttaagctccttctaagtattcccttcctctcatactttccaaattggcacctggacatacaggtatgcttatgtatcacacatacaataaatgaattgtccttagggatagatactgcctctgagtccttgctggtctctgacatgttgtagcttgtttggtctggtgcccaggaaacagtggtggtgcccacagaggtgtggtttgtcccacctggttccctcaaatgctatgttggcatccctgctgaagtcagagctacattcatgacctcttccttctaaccttagtcctcttctggtctactgcttcttccatttcccattcatgtcaaggatacagaatattggaggatatgaagaaatgaggtgatatctaaagctcagccctctagacagcccactcagccatttctgccatccaatctggcaccatgttagatgcagtgccacgccaactgtgggatgctctgaagcacaagctgggatatacctgctgtcctggaccatgtttctaccacatcttccaagaactactaccccaaggggacaagagagctgacataatcatgtctgatggcttgtctttcttctctttactcctcccaaccatctcctctcagaaatataaggggctttccctattcttagatagaaatgtcccttgcagcatatattggtcttctctacataatggcttatagtaaaattcagtgatccagattccctaggcttagcatttgatttgtaaatgaaattttggcaaatttaaacaatatttttcccctctcaacaaagcctggatttcaatattatgttctcactgtgaattttttaaaatgtggttttccattgatggccaagaaatgactcctctgttccagcctcccatgaaatgaagtccagtgatttaataagtgcagagctgcatagcaacacgatttctgaaaatgaaaaacgtcaacttaacatttgcaaaaatattattcctgtaaaaataattatctagataggtctgcttttggaaagccggaagctaagaaaataagctatacaagtataactgttgcatcaagggccatagatggcaaactgcttaagatcaagtatcattgagtttacacatatttggttctcttgcagctgctacaatcatagaaacataaggaatgcaggacctaagtgatcctgacagtgaaatttgacataatgaagagagatgatttttcctaggaaagagacaagattaacagtatcaattatctcacaacttggcccagtctagcactccagccttacttcctcctcctcacccgtgtcaacctactcttcctacaaagccagtggacccatggaccttcagatccaccaactgcattcctatatctgtgtctttgctcccacaatcccctccatgggatgcccccgggcagtagggctctaaagattagcgagcaaattcatgaggattaagtgagtatcaataagcatgcctcctgtttctatctccatcaaacacaggaatcatgtgttgttacaagaatggaagtactatatttagttaggctcctttcaccaaaaaaaaaagtggatcatattggtatcttactttgagggaaaaagagattatatccaattaccgttttctataatttgtctattcttttcagaaaaccttctgagtaggagccacaggctgagtctggctctgaggggggtgggga

SEQ ID NO: 1881887 - DNA, 4001 bp, Homo sapiens
ctttgtgtacatcctgttcatccaagtccaactcaagtaccattatttccactgaaacttccacccaatgtttaaaatttcccttctttggatttatatatttttcttctgaacttttttgttgtgataaaatacaaataaaatatcttaaccatttttaaatgtattctacactggtattaagtacattcatattattgtatacccttcaccactgttcatctccagaactcttttcattttgcaaaactttaactctatacccattaaacaataactcccaaagcctcctagccgctggcagctaccatttaactttctgtgtctattattttgaccaagtacctcgtgagtcacttagcatattgtcctcaaggttcatctgtgtttcagcatatgtcagaatttccttcctaagaccaaataatactccattgtatgtatataccacattttgcttatccattcatctgtgggtagacactggggttgatgccatattttagccattgtggataatgctgtatgaacatgggtcgataaatatctccttgagacccagctttcatttcttttggatatatacaccgaagcggaattgctggctcatatggtaattctgtgtttagtatttttttttttttttttttttaaggaaccaccatattgttttccacagtggctctaccactgtatatttccaccgaaagtatacaagagttccagtttctctacatcctcaccaacacttgctattttgtttctttgataatagcaatcctaatgggtgtgaggtggtatctcatcatggtggttgttggtttttttgttttttgttttttgttttgaggcagagtttgctctgtcacccaggccagagtgcagtggtgcaatctcggctcactgcagcctcctcttcctcccatgctcaagcaatcctcccacctcgtcctcccaggtagctgggactataggcatgtgccaccctacctggataatttttgtatttttagtagagatggggtttcaccatgtttgccaggctggtcttgaactcttgggctcatgtgatccaccttggcctcccagagtgttgggattacaggtgtgagccactatacctggccttattatggttttgattagcatttccttgataattagagatgtcgagtatctttatatgtactttttggctatttgtatatctttggagaaatgactattcaagttctttgtttttgagttgggttgttttttagttgttgaattgtagtagttaatatattttcaatcccagtctgttactagatacatgatttgcaaatattttctcccattctctgggttttatttttactctcttgatagtctttttaagaaatcaaaaagcaaatatcaaatttaaagaaaaaaatggagcaaatgatctcctgaaaaaattctgtatcttgatcacatttattggaatggttggagaaaaataaaaatacctcttagcttaggaagttgtgagttatctgcaaatctcctcagtttaggagtggaagaatcgtggagtcatttatttcaaaatgtatgcaggtttctcttttgaatgtcttacagatttaaagaggccattgaaccaagtcttgtatttttctatacaggataaattccttgtttcagccagctgtcagtggaaggcaactagtatgacaccatctccatggacaaagaatgttggaatattccatttcattgatttatatatctctttatctgtttcttcattagtttctatagtagtcaccgtttcttccaatgtcatttaaatgttgatcacatgcctgtaatctgcttttaagttcttggtcatttctcattttcacataaatttgttcatccaggatgagcctgatggagatccaggagctcctttatggtgctggtaatttgttttgggtccatgttgcctgccgtatttcaaacactgcacccttttcctcctctctcgaatagtggctttggatttataacttaaaaactgcttagccattcaatttaaaacttaaatatataaactattttatgtagttttctaattgttcttggatattttagttgctttagctaattttctttttaaaataaaaataaagttaaaattcagatctctctactaccagtttataaatatgtttcacttcagatttctcattgaaattaagtttttattttgagataactatagattcccatacagttttaagaactactactgtgaggtcttgtgtatcttttatccagttaccccagtggtaatatgtttcagaattatagtataatttcacaaccaggatattggaattttggtagtcaagatacagaatagttccatcatcccaaggatcacctgttttttatttttattttttatttttattgctatcacagccatctccctcctatattccctttaccccctgcattttgtcttttcaaaaatgttatataaatggaatcaggctgggcatggtagctcatgcctgtaatcccagcactttgggaggctgagatgggcagctcacttgaactcaagagttcaagaccagcctgggcaacatgatgaaacatcgtctctacaaaaatacaaaaatcaggtgggtgtggtggtgtgtgcctgtagtctcagctactcaggaggctaagatggaggtattgcttgatcccaggaagtcaaggctgcagtgagctgagattacaccactgcactccagcctgggtgacagagcaagactcagtctcataaatgaatgaatgaatgaatgaatgaatggaatcatatagtacatgacttttgggattggctttttacttggaagattccagagttgttgcttatagctataatttgttcatttttattgagtagtactccatggcatccatgtgctaccaatttgttgaatcatttcatgttgaaggtcatctggattgttgtcaatttttggctattagaaataaacctgctgtgaatattcatgtagaggtttttctgtgaacatcccagttttcactgggataaaagtataagagtatgattgctgcggtgtatcggatagaaactgccaaagagtgttttccatagtggttgtactattttgcattcccaccagcagtgtatgagagatctagtttttccacatcctagccagcaattggttgttactttttttttttttttttactattttaaaaactattcttatagataaggagtatatctcatcatggtatttcatgttagccttttcctaatggctaatatgtggaacatctttaactgtgctattcaacatctatattctcttcatatctgttgcccattttctaactggattttttttttgtaagtattgaattttgagagttctttatatggatccgtttttggatatatagtttgcaggtattttctcccattccataccttatcttttaattctaacagcatcttttgcagaacaaaagcttttaattttgatgaaatcccatttattattcttttatggattgtgcttctgttgtgaagtccaggactttttggctatttttgtatcctgaaaaatttcccttatgcatttttctgaaagttttatagttttgcatttccctctgtgatccattttttttgagatggagcctctgtcatccaggctggagtgcagtggtgccatcttggctcactgcaacctccaccttcctggttcaagagattctcctgcctccgtctcctgagtagctgggactacaggcacatgccaccacgcctggataatttttgtattttcagtagaatcatttaaaataggatccctgtatgttcagcttcattgattattatttttaacatttctccttacagatgagatttgaggtgacacttaataggatgtcaatacatagttaatagaagtagaaaatcagatccaaggaaagaagtgaagaaatacatt

SEQ ID NO: 1881888 - DNA, 4001 bp, Homo sapiens
ggaacagtggacgggtaggatgcacagaataggtacacggcgctggtccctcttgtaagcatctcatggacatgcctgcttttcatcttcacgtaattccaggcatgagttacagaaattttccccattctgaggccagtaagtttaatcagtttgcctgaggccacatagctaggaaatggcagaatgatggcaaagtcaggcaaattcgttccacagtccctgttcttaacaaaaacagaaatctaaatttgagaatgggctgtatgccctgttgaaagactcttaaaagagagagaaaatccagcaaacttaccctgagatggatggtctgggtttcttcccatttcctagaactgcttacccgtgtggagccatgcttactaacccgctgcccttgatgccagtgaggcttggtgctgggctgccaatgacctcagttatggggcacggcaaacttggtgactttagctgcaggcagagtctggggtggcggtgcctgcagtctggtgtgctgtaatgtaaacacccaggaaggcttctggttgttgctttaggcctaaggcagggagccgggagaaatagagaagggaaggggtcttcattagatgagaaaggaatattgaaaagtgaggatttttctgtttcactttcattttatttgaccttttacattgtaaattatattcatttaaaaaataaagaaaaagaaacatttctccaataaatggaatgcaggacacatgttaatacgggcagtgaatgttaagctacacagcgattttaaaatgaatgcaccatcttccttgctcaggcagtggctcctgcggtcaccatctaaggcaacctgttccgacctccctggtggaaacctggaagctctctgaactttcctctctccttcttccacgttgaatcaattactgagcccccaaagattttacctccgaaacatgttgtggcaaagtcagtgtgctgtgtttgccagacccagttcctttttgttctgggctctcagctggactatatagtccagcctccctcaagttagatggggccacatgtctgagttctggccaccaaaatatgcatgtgagtgatgtgctggccaccccccagacctggaccctaaacctcctgcaggatgctccatcctatttcttcccctcacccctttgctggccctctgcagagaactagctgaaaactccagggcccaagggaatggcagaacttctgcctgaaagagccaggattcctgaatgactgtgtggagcagagttctccttccccataccccaggccccatgcaggcccacagtggactgggaagtgaataagaaataaactcttaacatgtgatgccactctgatttgagatcgcttcttatagcaactacaataactgaccctaatttattttctcctaaataatcctttgcatacctaatactgtgcccattactgattttctatttctctcaaaaggccatccccccaacctttacctccatcttcaatcttggcctctcataattccatctgttaagacaaagtgaacttttcttaaaacgcatgttagaccatacccctctttggggtacatcttttaatggtacccccaaaagtgctgaccatggcacacccttcctgtgcctggctttggccaacagcctcacattggatttctgctgccatgcttggcccctggccactgagagccctggggaatttctgtcctcagggctgtgtctccagacatttctcatcctggaatgtccttcctctgttaggctaatactctgcatcttctaggatcagtccagcaacacctctaggttcccttgccctgtctcccactagtaccctgcacatgtgtgtacatcacacacatctccgtttattgagctgagagcttctttgggccctcactcagagacggaatttgtcacctgtatgtgcttgacgctggggcccagcaactacccctagtcgtgacaatccaaagcgtctccagacgtggccacatgtgccctgggagacacagtcagctctggttgacaatcctgctctagagtggttggaaagaagaggcatttcttgtgggttgtattctcttggtggggctactctattcaaggtcaaaaactagatttcgtcagaacattcaagcctctgtagcaggccaaaaagtgtcctcccaaaattcacgttcacccagaatctcagaacaagaccttgtttggaaacagggtctttgcaggctctcagaaacagactcgtatggactgaattcagaagagattgcaggtggcagacactggcaggacatgagacccacttcctgcttctttactaacagacccagtttttttcaacatggtcataagtcaagcacaaacaatggctcacgattggtttaggtcattcatgatcattctgtgtctcatcatgtgtcttaatttctcagactctctcgcagttggggtggccttataactagctctaatcaacaagatttgaggacaaatctaacgtgaggtttcttggaaaaagtttgcttttctgatacaaagggtcacagacagcagacactgtccttcttcccccacctccttcctgtggacatgagggatggacccagagcagcctttaggtgaaggccaggggaatgtcagacaggtcagctcggacatcctgggacactgggccaccatgccaatggccctttcttgctggatttcttattacgggagcaaaataactttcttgttttatttaagcctctgtagtaggttgcaaagtggtcttcccaaaattctgggtgaattttgggaggagactatgcaacctcctagtgtccacccagaatgtcagaacaagaccttatttggaaatagggtctttggaggtataatcagttaagaatcttcagatgaaatcatcctggatttagagtgggccccaaatccaatgactgatgtccttacaagaagagaaggcatagagagatacacaggggaggatgtcatgtgataacagaagtagaggttagcataattcatcccccattctcccccttccagtgccccacaccgcttgcaatatgatgcagctccttccatcaagaggtggaggcttctttcccactccttgacttgtcaaggccttgccacttgctttgtctcacagaatggtaaggaagtgatggcatgccggttctgagcctcatgcatgtctgcttgcactcctgaaactctgttcagccacctgagaacaagcctgagtcagcctgttggataacaagagactgatggtccttgtcaactctgtcaactccagtgccccagctgccagccaggctactctagcccagccagccttcagctgattggccagctgagtggagcaagatcagctgtgtttgacccagagcagcaaaaccacctagttgatttgtagacttgtgagcaataccaaacacttattttaagccactaagcttggggtggcttcttacccagcagtagctaatacctacacactttcagttatttggcacctgtgagcaattgaatttgggaaccctgttttaggtagaggttttcagagttcactgtgttttagaattactcagaaaatttacttaaaatagagattcctgggcttgctcctagagagtttcagtaaattgggtgagctctaggtatctgcattttgaccagcattgctaattctggcatgggtagtccatggaatacactttgtaaaccatttttttcatgggaacaaatcactaaaatcatggtgtaatctctaatattattcctcctccaatatccgaagagagagaggagagggtttcagcccaaaacgggaatgggctgcacttatctgtagaaattgataaagagaaagatctcccttgcccagcgtctcaaaaactgcattttacattcagtattgtttcttgattgcattaagaaatacactgcagccgg

SEQ ID NO: 1881889 - DNA, 4001 bp, Homo sapiens
gactgacagtgtaaagtaactgtgctagtgcttcttgatttttaccagtgattagtgtcctgatttcttcaacaaataaatttcaggggaaaaaatgagatggagaggaacatatagattaagagggaattttaaattttatcaaccagtacagtatatggaacttatttagatcttgatccaaatgaactatacaaaacacttgacagttgagacagctggaaattagtgtgataatggtttcatggcattttttaaaaagtcatcatcttttagagatgtgtacagaaataattgcggatcattatgggatttagaagtggggtgtagatgaaacagaattggtcacgagtggataactgttgaaactgagtgatgtatgcatggggattaataattgtgtttttgaatgtttaatttttcccataataaaacattttttaatccaggaaaagagttttatttctagtaccttattttaatgccttttcttctgccctctagcctattgtttccttgcataaacctgtcctctttgctgacatacctgagtccttgtttgggatagtgcctgtccttccagtccttccccacccacatcctagaagcagacctctttttagcactccctaattgagtcaccatcctgggtgtgctgggaaagtatctgtgggaaactcaatgactatattatctgaaagaccaaatgcttggtgaagtgcccagatttttaatactgcttttctgctacccttccagacttatatctgtccccttctttataactctcagcatctggttcttcctttgggattctgtgtggctttgttcttgtcctttaggtttgttcattaatgccagtttgccctgtccctccttacagcttgcacatctgtaatggtctagttctgtgggattttgcagatagttgtatattttggccaaggtatcagtgatacggttacctttgggcagggataactgctattcggttggcatgatattttttccttctataatgtataccttagtgattgttttaaagtgctgaatttatcccttatgtatattacaaccatgaagaatataaatcagaagtcctccatttgggcagcttcttatattaacacttatattaacattaagaccctcttactgtctcctcttcccagaattagagagttgatgtagtgcttaatagacatggcttattgtatgctaggtgaacttggcaattccatagctatgttaccctcacagaaagttatttcctggagagattattaagtgttctgatctttcatatatgcctgagagatctaagattcttccacaaagaccctatttcttcagagaaaactatagtgatgccagagtctttttttttttttttttaacaacttgtgatttttgtgcacctgtgttgtatgtgttgccattatctcactttagggacgttggataaactggcgtatttgtgcagcctcatttaagtagtggcaaccattaatgacttgtacccacaagtttttccagataatttctgttttttccacctttcttacatgttcttttttagtcataggtacttggcttactcaagggaggtgtagcgtaagataaagataatggagggtgttccctgtagaataggtacaaatgctgcaggctttatcttgggcagagcaagtagggttttggtcctgagtaagtgagtgaggttaggtggagctgcctgtcttccagccgtgcggatacaactgactcagtccgtgttctcaacagtttttgaaaagcccatttttctatcccacttactcccacctgcagttctttaagaacgtagtttccaggatgtcaggcaactccccactcctccatttcctgtttgtggtcttcattgagagacgccttaaacaggaattcctggggaagtgcaggctatagcggtgggattccgggggtcattagtccattattgaagctggggaatcatgtactataaaaggacctcccttccgttctgttgtctcctagaaactattactgatcataaccaagcagtaactgcaactcagggctgttgacttgtgccctttgtctttagagactgaaaattattttcccttcttgtgcctcagtttctattagttgaattttagagctcaacatcaagatttgtgacaaaattaacttggactctgtaggactgattcgtttgaaatgcaaaagtagtgaagaacataaaacagactccctatcttggccgccagggggtgccctttcccttcgctttactgtctggcactccccaccgcattcagccattttagacagattgtttttgctcccagctaactccattttgtatttgtgacgcaggaataaaaaaaggagttaggcaaaggaggagtctggtttgcagagggagggagactggctgaggcgcagctacgtactcttttactcagcagttgctcatcagggacacaccttgctgcaggctgcctgcatcctgagcaatcgatgccgcaagtccttgccagcggagcacagagcaaaatggtttggctgccggacacctactaacagtgacagagtgctagcttttgaggcagcaggccagggcatcccctctgcctcatctagactctaatcctgggtttaggtgtttttgctacagagatgtttagggcagttttcttaattataggatcagataagaaaagatacccccaaaaaaagaagaaaaaaaggaacccctttcacttagctgtctgggaagaatcaaatgccccaaggactctagggaaatggtcctgaatttttttaaaaaatgttatttttgaaaccgtgaaaaaaatgcacgcacacatacacacatatatgtaaagagactagtatgaacacccctatgtccatcacccatttaaaaaacttaatcaacagctagtcttgtttcatatacctgtatcaactttgtctttgccacccattatttttacatgtatccttgttcatattatttaatccttaagcagttcagaatgtgtgtcaaaaaaattaggacttttaaaagaagataattactaccattatcacatttaaaaaattctttatcatcagatagccagttagtattaaatttcccaaattatcttatgatagttgttttttttaatagttcatttgaatcagagccaaataaagtctacacattgcagttggttgatgtctctataggttctctcttatgctcttttttattttttattttgcaatttatttatagacttaatttcttttaaaaagatctctgccaggcgcggtgactcacgcctgtaatcccagcactttgggaggccgaggcgggcggatcacgtgaggttgggagtttgagaccagcctggccaatatggcgaaacctcgtctctactaaaaatacaaaaattagccgggccgcctggtggcgcatgcctgtaattccagctactcgggaggctgaggcaggagaattgcttgaacccgggaggcggaggttgtggtgagccaagattgcaccactgcactcaagcctgggtgacagagtgagactccatttcaaaaaataaataaataaataaataaaaagaagatctctcaggttgggactgagaagatacaaagccagacttcccttcttgccagagcagagcctcttctttaggatttcccacagaggctattggtgaccaagtgaaggagcaatgccctgccaccttcagagggagaaagggctggactcttacttttctcctgacgtgataatctgttacccaaagtcttgagaaaagtttgcacactgccgtcaacggagaacatggtcatagaagtgggcctcacccgttctaagaattaaaggagagcttttaagctttgggacaactgtgtttggccactgtgtaatagctgcatccctatggtgattctagagtatcagctttttttttcccgaatacttt

SEQ ID NO: 1881890 - DNA, 4001 bp, Homo sapiens
gactgtcccgaatcacctctcccaccttgtcagtgtaatgacatgactcaggtctctgtctgagtctagacttgtagataggtccgcaaacaaatgtctctttctaagtgactcaaaagcacaacaagcttgacacgtgcaaattcatgactttctctttgaaatctggttctctcctgggcttccctatcatgaatggtcccgtgacctaccagctatgcaagtggacatctagaggttattttgatctctgtctcccatacccaccatttccagctccagtctggtgtgcaagtggcccaagttagcagtgaaaatcctgcatggtcctgggaagttaggcctcaccctcttctccaccctcacctgtatcaccttcctcttcactcttagcaccccaatcacacagctgccacttggtttctctaataaactgtgctctgtctcaccccagggcctttgcacaagcaattggccctatctgggaccattccccactccatattcaccccaccctatataccttgttaactttacccagaaaaatctttctctctcatctctgaccagatagaataccctcgataaatatactcttgccctatctcctcttcttaacagttaggtcagttttaattgtacatgcatttgtgtggttacttgatgtattagtctgtttgggctgccgtaacaaaatactacagacggagttggagggcagcttaaacaacaacagaagttaattttctcacagtctggaaagatcaagatcaaggtgccatgaaggttgatatctggtgaggcctctcttcctggtttgcagacagttgcctgtttgctctgtccttacatggcctttcctctgtgtacaggtggagggagatagaaggagagagagagagagagagagaaggagacagagagagagagagaatgatggacagagagagagagagagaagtattaatctctggtatctcttactcttcccctcctcttttttttttcttttatttatttatttattcatttatttttattgatcattcttgggtgtttctcacagagggggatttggcagggtcataggacaatagtggagggaaggtcagcagataaacaagtgaacaaaggtctctggttttcctaggcagaggaccctgcggccttccgcagtgtttgtgtccctgggtacttgagattagggagtggtgatgactcccaacgagcatgctgcctccaaccgtctgtttaacaaagcacatcttgcaccgcccttaatccatttaaccctgagtggacacagcacatgtttcagagagcacagggttgggggtaaggtcatagatcaccagcatcccaaggcagaagaatttttcttagtacagaacaaaatgaagtctcccatgtctacctctttctacacagacacagcaacaatctgatttccccatcccctccccacctctcccccgactctattccacaaaaccgccatcgtcatcatggctcgttctcaatgagctgttgggtacacctcccagacggggtggtggccgggcagaggggctcctcacttcccagaaggggcggccgggcgggggctgaccccccacctccctcccggacggggcggctggccgggcgggggctgaccccccacctccctcccggacggggcggctggccgggcgggggctgaccccccacctccctcctggatggggcggctgctggacggggtggctgccaggcggagacgctcctcacttcccagacagggtggctgccgggcggaggggctcctcacttctcagacggggcggctgggcagagacgctcctcacctcccagatggggtggcgatcgggcagagacactcatcagttcccagacggggtcgcggccgggcagaggcgctcctcacatcccagacagggcggcggggcagaggagctccccacatctcagacgatgggcggccgggcagagacgctcctcacttcctggacgggatggtggccgggaggaggcgctcctcacttcccagactgggcagccgggcagaggggctcctcacatcccagacgatgggcggccaggcagagacgcttctcacttcccagacggggtggcggccgggcagagactgcaatctcggcactttgggaggccaaggcaggcggctgggaggtggaggttgtagcgagccgagatcacgccactgcactccagcctgggcaacattgagcactgagtgaacgagactccatctgcaatcccggcacctcgggaggccgaggctggcagatcactcgcggttaggagctggagactagcccggccaacacagtgaaaccccgtctccaccaaaaaaatacgaagaccagtcaggcgtggcggtgtgcgcctgcaatcgcaggcattcggcaggttgaggcaggagaatcagggagggaggttgcagtgagcagagatggcggccagtacagtccagcttcggctgggcatcagagggagaccgtgcaaagagagggagagggagcccgtggggagagggagacaggggagagaggagaggggagaggtgagagggagaggcatgttttatttcttaagcatacaatgaggtaacaatttatttctagagttattttcaaagaaaattagtactttataaatagaatatgtaaactcaaatgcccaataatagtgcaatggataaatatgttattatacagtggaatatttattatgctgtggaatatcacatcacaattagaatgaagctctatatctacaacaaaagaatgaatctcacaaatgtaatgttgagtaaacaaagctagatactaacgagtacacagtatacaaatgtgtatggtatacacttccatttatacaaggtcaaaacctggcaaaactaatctttggctgttagcaatcagcataggaatttgccttaggagaagaatagtgaatagtaggaggcacaaagagagtttctgaagtatcggtaatgttctgatccttgatttgggtgctttttatatggggtgttcagtttgtgatagttcattgtgttgtgcagttagaaattttgcatgtttgtgtacctatggttcttcaattaaatattcactattagtcaaatctaaacaaagcaagccactaaatatgtaagaaattaactgatggcaagtttaggcacaaaaaaaagtccttataaattagatcatcatgaagacaagaattaccgtatttcattgattttatgatgcacttattttaaattttatcatctttgaaattaaaatagatataatttatattatctcataattaaacagtggtttctctctttaaattgtatataaaataatgatcatttaatattaacattgtactagatttgatgaaatatgatattaaaagctgtactatatgatataaacaaatacctaaataaatgggagatggatatttgtaaggagatgaattgattgttttcatttagaaaatactaagaaaaattttctggtttgtgtttatgaaatttgtttgaagtaattaatgtgtaagcaaaccccaaacatattttaataagaaaaatgaaggaagatctaatttaccaaattccaaaatatattctaaatatgcagaattaaactagaatggacaaataaaatagtgtcatcataaacatatccagatacatataagaatacagttatattaaaagtgacatttcaaatcgaggtggaaagttcagagggaaaaagaaaatgaatgaaatatggctggcccttcaatctgtcactttttgtctatgtttacaaggattatgcatgagaggcaagagataactgggttttggcttgtaacagacaagactgtcaacctccttgcatcaagaataactatctttctccttaggaagtacttgtgtttgcctgaaaacagttattggttcctttcaccttgaggtatggggaatataa

SEQ ID NO: 1881891 - DNA, 4001 bp, Homo sapiens
atcgctgttttaagtcattatgtttgggggtggcttgtatatggcaataggtgactgattacgttgctttcaggtcctctgaaagtggtctgtttttagcttaactcttctctcttctccataatgataattgtgagtttgagctgtcataaacttgaaggtagttatgtgaaagggaggcctgtaggcctaattaagatgctatcaagtataaacactgaatcttgctattctcacgtggctgaaaactcaaggtagtagactttctggtttttcaaaacacgttgcctaaaaacagtcttatgaccagccagcaatcaatatataaatatcaggaagaagtcattttatcttgttgttgtcctattatttaataaaacttaccttcaagaagtttgttcttatgttattactataaaagtactgtctatttccctgacacctgtttgtgaaccaggctttcctatttgttcatttttttttttcagcatacacatttttctcaacaggctattttgctgaaatgttttcagaaacttctattaaaaataactgatgtcttatacttaatagattttcagtaacttcgttaaatgaatgtcaagcacaatgctaatgctgatatttggaaatgatgttgaagtttcaataaggacatctaacgttatggatggtaattcagtcttactgtaaattactacctgactctgaaacttagtaagagtaaatgtagctctgtaagaggaataataaagatataattgtcaaaaaaagtttgttcttgtgtcttggctcaaattccctttttatattttaaactcatattctgaagtctttttccagaagtgaaacttgttggcttcaagtaccctcagggtccatctcttgctctgcaatacaatcagcagtaccaagggcatggtcagtgactttccctgcatattaggcttctattttgtgcttgttttttgtaatgctctgaggagtctaaaatttttaatacttgtggcacctattctatctttttggtaaaatataccaaagaatatcagagacaacatagctcatgagtataggaaagtatctttaagtccatcattaaaataaacctaaggagaacactctggtatcaaaccatttccttagatttcccatttcctttggaaagccactagaaatttgccttcctgcttcacaggagagagaaaagcagcttgttcccagcaaactaataaatacaacctacctggaggttcatttcaatattcgttaaacctctctttagtctccttcatccacaattggtctatccatgtgctattctcagttcagtacctaaacttgtttactccatctacaaccactctccagaagaagagctctttttgcctatgttattacctcttttattgcctcaagacttttatttctaatttctaaccagcttgtcaatttattcatacacattatattaatatgtgataacttttacgttatctccttttcagagagataccatgtttgtagttgtttcagattttcaacccctaaacttgaagaggtggctaatcgatgagaagttttggctctatgtatttgtccagggagcctgctaatatgatatccattaagtgccatctctatttttacacaaaaccgttttttaagaaagacctccctttttctcttactatattccaaccatatcagtgtctcattcctaactgaaagcagccaagtcccctacatactcattatgtacgccttctatagatcctgttagtaggcaagaaaaagggggcatgtgtgtgcatgcactcccagccgccgggatgagctgtcctttccattccacttggctcctcaccataacaagtcttggatattttgtgtcatagtactttgaaatgtccaagagagaaataatccttttttgctattgtttgaaccattcagactcaacaaagacattttgtaaatgatgacatccctttagaacatgattctagaatgtaggcatctgcaattttttggttgctatggtaatttgggtaggggtactagttgaaaagtggacatagctttcgtccaaatatgagtcttggatttcctgggcacatggtcctgccagtggcactacagtcaactaaacagacatattcaaaaagtgaagaacaaatggaattccagattaataatgatgagcccaaggcaagagtaggaaacacagaatggccttgtatgcacatgatgaattgttatccttggtcctagtgactttgaaaaattaataaagaatgctaaaatgcttaattcctagtaacccatcaaaagaaaggctactttccaagaaaattactctctgcatgatattatatacgcacaattaatttcagcataaaattttgaaatgcttatgccaaggccaattccaactgaggtgattttcttagattaagttgcaatgaatgtcacatttcaaagaaaattacattgtgatataaaataaaaaagtcctattgcaaaggcagatcacagctccttctataataaaaaggaataaaaaagaattctgattagtaagaatgagtaaaatttcccctgtattaaaatgtaagatacatgaggttaatttttaccaataaggttctaaaattgctgatagaaatctcctcatttatacatgtaaactggactacatgttgtgtgagggaaaaatgaaggattcagcaaggaacaatgcacattaaatttatggttgcaattttagagtttgaatggaagttgtttgaacattggtcttggagctgctctccagtggtttcaaacatggaaaaaaataaccagaaaggggcctgaaggtgaattaaaatattgacattcattttgtgtgtacctgacactgggcctggacaactcatcaaagaattgtaactgtctatgttggacttcccccaattgtgtggtggacttactgaagtataattacctgggttgcttattgaaaatgcagactccagactttaccttgaatactctggatcaaaatctctagtgggtgcagcttgagaaaatgcatctttaacaagctgtcagggtgattctgatgcacgttcaatttgaataccactcccttgtggaacattagtagatactctgttgcatgcagttttataaaatacggtttcttagatttaataaataccacattgataagagtagtgagaaataggaattatggccattattcaggtgcaaattgctctgggtattagaatatggccaaagtattatatatacttaatatataaagtctgtctcaatcattctctttcttcaaccttaacttgatccaggcttgacaaccagacttctctaattagcaccaccagcagaatccaagaatctctaatttgtaaaacttgtcattgccatattttttttgccttttttgtattcagccagtttaaagttcaaattcatttcatactagatgtcaacattttatgagcatttattcatgcatatttgcttatctgcctccctggaaagatagaataggccgggtggctggtggtatctcatgaaatttgatgactgggagataatatatactttttaaatgtcatgcatgtgcatattgcccattctatacattgatcaaattgatttcaaaatgtaataaaaattagctctatattctatatcctacctaatattaaactccttaatgacttagacctctgaattttcttttctaaccccagtaagtctgtatagaaaatcaaagttccataaatgttgttgaacaggagttttgaaacagacaaaagtaatttcaaaatgcaggcttgtatttttaaaaacatgtattattttgaaacttaagtatatttcctttgaagtgctgcattgccttttgcaaatgatattattagactggacatctttcagtaccaataacataatttaccctgacactctttcaaggagataacaac

SEQ ID NO: 1881892 - DNA, 4001 bp, Homo sapiens
tggtggaagtaggttctgaggataatcagcagtgtcttccagttaaaatacctcagaggtgctagtacactttcctttgaaaaatcaggatgaaccttctcagacatgaatagcagggttgctcctactggcaaagaagatgcaggagaatttagaggttaagtgtcctcagcttcatcaggatctaccctacaggtttcattccgattttcagaatctcattccttcctaatcaattccctcagtttagcagaagatactttgcctggttgggaattcaatttgcactgtaattctgccactctcaggatgagactccagatttgattttctgaaacctcaggctgatgacaatgggagataagtacgttcctccaggaagacatagaaggtttcagatcatttatgtggagcttgaacttggaatttcaagccctgagttcatcatttttctttactttgtctaccacagttacaagcagtcatcctcattacatttattagtttgactaaaatattttaagctatcatgattacctagagatttgccatttatgaatatttgattaggaatccagtagtaatattttacaaatctttttaccgtattacaccatagactatcattgtcttctttaccactggaaagagtacttatgccttaaaatataatcaatattttatattgattgtcagaaacccaataccacaaacccagatccagttttttgaactggtaaaacccttggaattacaccagttgctagcagtggaaacaagcaaaagcattgcttaagtactccagagattttgttctttttactttatttgacacaacctggaggcagactattgagggcttgcacggtggctccatcatgctgtccgttgtcccaattttcctgtttcttttttatcttttcttaaattattgcaccaaacttactctccagtaggtggctttcaagaaatacttcatatttaaatgcccatgccctcatatttgcttctgcattcacagatgaaattaagtttcttcttaaaagtttcaaatgcgtgatatcttgtgggttaaaccactgaaaagaaaacattagacatctgaggttgccctggaagaaccacagttctaattgcttaattctgggacaattcttcagacaattcagataaaaggatgaaatagctactatgtatactccctgcagatatagcaaaggacccaagcccttgtcaaatccatgaaagaacttgcctagtagtctgcagagctgggtgcctggcatctattccgttttgtgagttcttatactgcaaggatgttgcacacagccaggattatgttatatacagagatgtgtgtgtgtgtgtgtgtgtgtgtgtgtgtgtgtgtgtgtgtgtgtgtcagagagagagagagaaagagagaggtgtaaggtctgaatcaccactaattatacctgcctgctcctgaaagcaggacgtgcaggagtgggaatgacaaggatagggtggatgtcatagatacacaatgaaagagagcatagtgtagatattttcctccaaataagccactagatttcttcttatctggcaaagtaactgctagggaacatgtgaaaaacataagtaaaaagaaacaaaaagagaaaagaagagaagaaaccaaggatgaaaacagcagaaatgacatcctctgcaaatgcagagaaggagggagaaccttgaatcacctataattacccctgcctgctcccaagagttgtggttttaagtatcacctggcaatgaggcaccctagcagtaagctttctggggactacagaaggacaggaaggtgctgcctaaaagaaagaagacaatgtgctgaatactaccttacaaaacatgggagacaagttttgatgctgttctagaaaccaaaccattgccagcaaaacttctggctggcttctctcccagtgcaaatggcttgagctttcacagtcactgagatttcctaggcaacaggagtgtaaacttgagaaaaggcagaaccagagtagagattgacagtgagctgagccaatcaggctgtgaatctgcagcagtgatcccaggtcctccaattaatactaagagagtggaccagggcccctgaggaagacaggtaagagggaggaggctaaggtggcttgggagggaccagttttcctagatgcaggagacagcgtccatagtttcagttcgaagcaactggtggcaaaaggttagcatttaaggtaaatcaatgtttttatctattctatgatttaatgtttttttttttcttggtatgtcttagctgagaaaagaagacagtagatgttactctctaaaaagaaaatctaaaagtcttttgagagttcttggactagagaagccatcactaggctgtcagtgcaagaggaaagagcttggtactgggaaagatttttgtaatctttgcaaaaaaaatgcttagataaaaatgcacaaaaataaatttcattcagtaaaggggaaggaagtaaacattactgagcagtcattaggtactaggtatttgagtgtgaagggtttgggtgaattgctctaacgatcctgatgaccactgataaaactgagcttcagggaggttcagcatttccaagtcacaaagcaataaaacatttcaactttcattcagaccttgctttgtctgatacttaaacttatgctatttctgctatacactgacaactgagaatcagaataaaaatcaggatgcttattaaagtgtacatacatggcttgttcaaaattatatcaaatagttgatttgattcatcagagacttgagggggtcctttacgttctcattaaaggacaacaccaatgacccaggcagccatctctattgccttcagtctggggagtatttaaaccatattaagtagatgaaattcttacctgttttttttttttgacttattttttcctcaaatcctacaaccacaaaaatctattttgttattgaaagttttaaatattgagatttgaatttcaggcatacatttgtatttatattctgataaaaattacccaatagcaatgacaatgataaattctaatagcaataaaatagcctcctgctaagccctgatgatatggtgatagtaaatgcaaaggatacagctctacctcgtaaggaccttatagtctgtctagcagggcaagtaattcgaaaacgaattacattgtcttgcaatgtgaatgctatttggacttcaccacatgatcatggaaggatgggtgggacttctctgggccaacaggaaaaagaaggtgtacctgcaagtgtgactacatgtacaaaggcacagagatacagaatgctatggtgtgtttggggaatgtgagtgagtagagatgcaggatagattttgaacggatggagaattactagaaatggctggagacataggaaaggccaatgcatgaattcaatgctaagaactttcattttacctgtatgcaatgggggaccatcaaagggtcttaaactatatcatgaagttcatgttttcattttctaaagattgctcagtcttttgaaagacaaagtacagagggcaaagctaggggcaggaaaccaactaggagacatttgcaatggtggaaatgagaagtgaccatgtcctaggctgagtcagtatccatggcaatggagatgagggaatggaaatgcgggatgtgtcaaggtagtgaaactctataggacttagctgctatttggatgtaaagggttaggaagagtctaggataatggtcagttaatgacccaggtaaatggtattgctgtttcctgaagcaaagagtaaggaagataggtaatgaatttggctctggaacattaaactgaaagtgtctgtaggtcatccaagtgcacatgttttgtgagaaatctggctccagagagtgcctacattggaataaagatttgttagtcatcattgtatcag

SEQ ID NO: 1881893 - DNA, 4001 bp, Homo sapiens
cctttagccatctcagttgtaggatttcattctaagatgcagctcaacctgtaacaggaaaaaaaagaacaatcaccaatttaatgcatattttgagtttaggaggactccatctcagatatccaaaacttataatctgaaaaaaaaatctatgtcataaaagcaagaaaatagagtaattataatcagggaaaatggaaacttccagaagaaagaaccagtttcatctgtggctccagacaaactgggcataccccagtttgcaaagcattacaaaggagacagctattgtaaagtgatgaaaagtagacttccctggttgtaactaccttgtcataaaatgccatgcctgactcaccctagggctgtcagagcacagtgtagtgccaggcatatagctggtgctcagtaaatacttgttgaattgaaagttgttgatagcgctctgcattcattttcccctttaggtagcctgtggcagggtggtgagcctgggatggggacatctcacagcccagcagtaggacaggctgttcttcctggaggcaaaacaggttagggcagcacatggtcccttccgtctgagtctgagtctaagtacacactcacttttcgtctccgccacagaccagctgcatgatcttgggatccacttatctgggccttccagcccttctctagcagaaggaagcatcaagcaccatcctctcaaaggtctatttaaaaattctacaatactgtgtatttagatttataaaggacttttctttttcaccagttgctacctgagggctgaagcaaggggcaagataggggaagataaatcagctctgctcttgtctcccctgtgcctttccagttggaagggcacagaggacccagtgtggtcccacctgggaggctgcccacctggtgtcctttgtcctgttctggcaagaaaaacctcagaactgaagacaggctgtaaagagtggtgaaaagcactgccagttagttaccttattacaaatttaccttagatgaggtaattcactaagcaggtcgcagggcttcagtgttacactcctcccacgggcccccagtagtcagtctctagagtttggcttacttagtacaggtgaccacattctggtcaaagtcagcagagccatcctaagttagtgttctgtgatatcggctcaatgttttgtggttgttgagactgattacctgttaaaatgacccatatttgagggtcaaatattcaggagcaagaaatgaaaagaagcagattctgatttcaagatttcaggttttaaacatcaggcccaaatccatactttcattttgttcagtaaaaagtaaagctggtgattcttagaatgaaaatgcagtgttttccacttgaagaaatcccaaacttgcaaaattagataagttagagagttacgtttttaattataaagggattttgctttctacagtgactcaccctatggctcccgcttcctaggaatttaaagtattatttactcccctgcccccacaaaaattcagatgccattttatattttataaaatcaaacagaagatatttgactatatttcaatataaataaaacatggcatatctctcttcttgacttaagatctcctttctgaagtatggaagtcttgaaattctatcatatttactcacccaaaaaacactgagcaggccccgttctacggcaggcacagtgctagtcctgagggtatatcctggtcctctgagacttttctcttttcttctccacgacttccattctctctgtgtcctccagaggctggggcgtattgtgggtctgatctgctggaagaggggctaattatattaggatgacaagtcatgcccttcaagacgagcattgaagttgaagttatggtaaatggtcaaaataaacttgcaatcagaggttgagaactttctctcatggagattggccaaaagcagtggttctcaaagtgtgattcttggaccagccacattgacatcactggtgagtttgtgagcaaagcaagttccggagcctgacctactgaatcagaatctctgggaatggtgtttgagaaattgtgttttaacaacattccaggtgatttttatgcacattaaagtatgagaaccactggcttgaagttaattaggcttcatgtgggcaaagctctgaaaaagtcttctttcaaatcctaataatattaccaactgagttctgtcagctgcccagtgataaccctggtttaatcttcaaaatcacacaagcatctccaaccaagttatttatgcaaagttccaactcagagagaaaaatagcaaattctcagtgatactcaaaagggaaaatatttggacaggtaattttaggaatgggctatggatcactatgtacaataatgaagttgagcaattaggtttggaaagccacagcacagaaaataattaacccacaaagtaatcatcttggaagtcccaaagctaatgattaaaataaacctgaaacaaatgattgtttaacttttaagctgtgcttgttttagccacagtgtacttcaggtgtgagctcctgggaattcctcctgcctgccgagattggctttaggacgagggcatgtgtccattcctctgcctctccttccctggggatggtttctttgagtatcacagagtagcactccagtttgggtcgaggaggttggctgagctgctcgactctgctggcactgaggggcatcaaaccccagaatgcagtctgcagctgtggtgggcttcagccatattgaatcctatataaccttggaggctgggatgcacacttcgtttttatgcagcttgctttgcactttcattggcggtttattattgcaaagcatgatgctcccctcccccactcgcctctccacccaaagaagtgaattaataactagaaaacgagagagaaatgagatccagaagggtctgggcttctgaatgtcactgtgagcaaacagcggtggagagaaaaggttcctttccatctttatgtgcagtgctgtctgtgcattgacttgtttcctgacacatgagccatggcttgaaaggaattcaggccccagcaaattttgcattgcgcttcaatgtggcctctgggattgaataagggcaaatctattatactgttgccatggagaccctggcacaactgctgataaagagtgtctgatgtttggtaggcctcatagcatggtacataccatttaaaggacggtgtgtgtgtgtgtgtgtgtgtgtgtgtgtgtgtgtgtgtggtgtttagcatgcatgtgtgagtctgtaagggtgagcatgcttgtgggagtgggtggggtgactgggggaggggagcggagaacagggtgcagttggggaggaaggaagcgtggctggcttggcatgtcatgaaggaatgtactgtatttttacaaggaatttgtaaatactttcttgcctctaaaaattaatcctgccctctaagaatctacatgttaaacagatgggggcagcagaagatgcacagactctccccttggtctagcaaaattagtctttaattcatctgaaagagaattaagctaatacaataaaagtaaaaatgcgctcttttgcgtcctttgacgaatgctgcctcctttcaaccgtctgtctgaggatcaatagtgggtctgtaaggagcgccagcatttgctagagcaggcagtgagatgatggattttaatcattcacatgattttataaccacgaaacaaagaaggcggatctggcttccacatgcataatctcagttttgctgtttttgattttgccagtcctacatgcaattcctgtctggaaggtgcatgtcccgtttccaaattccattccacacctccatgtttgcttctcagtgaccgatacgggcaacttgtgtgtttcattggggcccttttccccattagccccagacctggagaggggtggcactgggaag

SEQ ID NO: 1881894 - DNA, 4001 bp, Homo sapiens
agaggtcatacaaatgcctgagacagaaaaagtcgatttaattatctgcggggcccagggattatgaagccagccagccaaggaagaactaccctatctcctcactcctcaccttttgtacctccagtctacactttaatcccactgagttaacttgcagctcacagctccagaaaagtataaggagaaagctgaaatcagaggaatcgtgccctccactgccagcttgcagtttaaagcacacccaagctataattaagattaccttctgacgattacataggactgcacgttttacctattgaaataaaactgttttcgcaactaatcatgatgaaaatactttttgttatctgtgagtaatctaaaaatacatgggtcaggtcaagtcttcatcctggggcaccagggtatactcccaccgtataaagacacaaacataaaagcaatgttttgatctgaatccaatccacacacgatgcttattctacatactcgtgtacatgagaaccatttttccattgcaacttttcttgtcaaaacatccttctacttacaaggaagattttgcttaagtccttcctttatccttttttttttttgagatggagtctcgctctgccgcccgccgttctctcagctcactgcaacctctgccccccaggctcaagcgattctctcgcctcagcctcctgagtagctgggattacaggtgtgcaccaccaggcctggccagtccttccattcttagttcttgaggttatgcagtgtctttgccctgtgcttctcttgtattatgatccaaactcctttgtttaaaaaaaaataaaacacctaaatataatccaaatgtgctaataaatgtgaaacagcctctttctctgaaacaagttcttcagtaaaataattctgtaatgtattgctttgcttttcttacatgaagttatgctattacaaaattaagtttcaattacaggcaaggttaaactctgcaagcaacccaaaactcaaaaagggctgaatgataagtcattcaggtaaagacaaaagaatggctccttatcattcaacttaaccaaccttctaaaggttcctccatccccactgtctattacgctcgtggtatccttgtcttacacacttatcactatctgcaattgtctattatgtcaccttccacaaacatacatacagtatatacatgattgaaatctgtcagggcagggtctttgttttgttttccacttaaaagtttctgggcctagatagcttttgacacatagtagtcactaaatagatacttgcttcatgaatgaagggcaccatttagtcaataaaagggaaccacagaataggtaaacttccaaaagtatctagtgttgtcttttaaactaaactccccattcctcactgcccaatctcgtgacctcttggcaaactggtttttctttgctgctctaacatgagagaggtttatgaaaagtaaagactagcctaaattttgccaaatccagaattttaaaatatatcttcattctctttggcctcagccacatgtgactgagtgcccccctcaaacaatccccttccttggtttgtgtgactccatccaattctagttcctgggctaattctgcaaccactggagtcagagggcagaaaacacatctggttttgctcccactgtatctctaacatggcttggcacacagtaggtgcaccatacataaatatgtcaacaaatgaacttctccctctctccacttctgtctccaatggacatctccccaaatcttactttgagactctaaattatctttttgtttttggagtctgtaaattcacaaatggtttccaccaatactaagtcaaggatagttactgaagttcatcgatgaactcaagccctcttgcttactctgacttctacatgcctatcaaatctcagtgttctcattttcatgcttaaattatacagaaatgggaagcttggaagttagctactcacttgcacattcaagttttagatgttttctgtagagaactcccggacagccccacagccactgccttagtctgtcatgattttcacatgaactatttaagaacctgttacctagtttccagcttcaagactcatcacatgcacactaacactttccacattcatcttgctagaataactattcctaacattctggtttaaatcctctgtaatttctcaagacaaattcttcataatctgatcgctgctcttccctgaattcttttcttaccaaccctacaccccatccttctaacctgacaaccaaggtgtccagtttcatagttatgccctcctctgactggttaccattatgtcagctgtttcattgctggcaaagccacttaccttctctctcatcatgattccttcaagtcctccctggctcagcttaaatcttagcctggcttcacctattgagtgacaaactcctttccaatgctctcacagaaactcatgcatttatccatcatagtgtgtgtgtgtgtgtgtatatatatatatatatatatcaacaatatataattgtgtctcaattagaggtgaggcctctgcagctcaccgcaacctccgtctcccaggttcaagcaattctcctgcctcagcctccctagtagctgggattacaggcatgcaccaccacgcccggctaatatttttgtatttttagtagagacggggtttctccatgttggtcaggctggtctcgaactccccacctcacgtgaactgcccaccttggcctcccaaagtgctgcgactataggacgtgagctaccgtacccggccgccacagattcaacctttctatttttgtaactttacagaacataaccagttacatgtggaaacaggtagtctgctttgacagctgggggcaaatcaacctgactttgtgaactaagatgggagggaagtaggggctggagggaggcttttcaggcagaggacagagttgaaaagcagatggggtacttaggaaaaataaatttaacatttttgcacaccaacatataacactgcagagaagataaaagcataatttctgctgaaaaatttaaagtataatgggtatctatacataactataacttaaggcaggactgaagtgctgttaaagatagaaatatagacaataggtggggtgtggtggctcgtccctgtaatcccagcactttgggaggccaagatgagaggatcacttgaaaccaggagtccaagaccagcctgggcaacatagtttaactccatctccaatgcaagatccactgcttattttgtttcatttgaaaatttgagtcattagttcaaggatttttttttttttttgaggtggagtctcactgtgccaccaggctggagcacagtggcatgatctcagctcactgcaacctctgcctcccaggttcaagcgattctcctgcctcagcctctcaagtagctaagactacaggcacatgccaccacacccagctaatttttgtatttttagtagagttggggtctcaccatgtgggccagggtgatctcgatctcttgaccttgtgatccgcccacctcggcctcccaaagtgccaggattacagccgtgagccaccacaccggcctcaagggttgtttatatgggggtcagggtaccttcactagacttagacttctgaagcccaaactggccaaacttcaccagctttacattatacccacagcaactcagctgtctttcaaggtcattgttcaatcttcaacagactatcttcacttgaaaatttgatgatgacagccgggagtggtggctcacgcctgtaatcctagcactttgggaggccgaggcggcggatcacgaggtcgagttcgagaccagcctggtcaacatgttgaaacccagtctctactaagaatacaaaaagaattagtcgagtgaatctccatctctacaaaaaacacaaaaattagccag

SEQ ID NO: 1881895 - DNA, 4001 bp, Homo sapiens
gctctgcatggctggggaggcctcaggaaacttacaatcgtgatggaaggcacctcttcagagggccgcaggagaatgtgtgccagcaggggaaaatgccaggcaattataaaactatcagatctcgtgagacccactcactaacacgagaacagcatggggaaaaccaaccccatgattcaattatctccacctggtctcacccttgacacatggggattattacaattcaaggtgagatttgggtggggacacggagccaaaccatatcagcatctctcctgattttccaaatgcaaatgtcttatagtctcttgctgaggaatatacagttgccgacttgccctttctctgaccaccccacacaaacaccatattggaatcagacagaatctgaatgccggaactagaatgcctcctcctttagggaagtaagctccataactcctgtccacattcctaacctggaagagtgaccccttccctccagaggtgctgatcccaccatttttgctaaaataggaagctagggtggaaacggagagaggaatggtgggtgagatattttgttttttcaaaggctctgcacagtatcttcaattagataaagtggctgtaacttttcttctattgacactgccctctttcctttattctactgcctgcaaaagaaggcaactgaagaagcctcaagtaccagggcaggttttggctagctgaagaaagggtaaggtataggggggaagactggaggtgaccatcttgggagtgggtgagaagtgagagcccaaaatgggtcttcttacctctctggtacattctgtgctcttctctggtctgacatccgcccaggttcatccagaaaaagatggaaatgatttgaacaggataagctagggtgaggattagacacgatgagttcagctggagacactcatggtagagtctggaggtctctttgggggatcacttccaaaagtgcagatttttagaaaaacgagaaaggttctggaaagggatgttttccttctgctcaatggcagtttcaggtttcctgtaagaaaggagtttgtagcgtcagtatatttgacaaatgtgggagagggaagattcaagagcttgaaattgcattgcacttcccaaagatggagaagacatcagggatgaatttcaaaggtgatagaaatcgggaactgccctttgaggatttcaaggggagagggagcaaaggcctcaccatcaatccacacgtcctgtgctagagtcttgcgattcttatttcccctaccctcctgcaacgattattcccatatatcaaggccatctgacagagttaaccatcagaattaaatagcagttcccacagagttccatcccctggagaggtacctagctgccggggcaggcctgaagcctcggtcaggaggcattgagtctttcactctccacggaggtcttggactgagaacttcaagttccaaagggatgaggtgtcggcttcgcccttaggagcctggagggctctgaccaaggagaagggcggagcccagccactggaaggtttgtttcttgcagtggaagacggttggcgacccggatggcttttgttaccagggccagcccaatccgcccgattctcggtccctatactgcctccttttcccatgcgcatcgcaagggatcggttgatggggccctcagtatgacttcgctaggaaaaataaaggtcttcttaggcgggaggggactgatttgaggacggagggtgggagtagtgccagcagcactttgtcgtagtggcactgggtgggcagttatcagttgcagtccgctcgtttctcagtgcccacggtttctcactgacagtgcagctcgtttctcagagccggcggatgttcatgggcagcaccatcgagccagaagcagtatttgtcctggtaagtcatttctcaactgccgaagtgtactaggttccagtcccgctggtttctcgaatctgctagtcccacacgagcaccaataggtaaacccagccggcagtttccggctagcactttcgctatttgaagacattaggaagttatgtggtggctccgtaccctcctttctccatccgaggccggggtcctaaagtcggtgtcacggtggcagcacccagcgttttgttggctctttcgccagcagcgccgagcggggggttttctgtcacagcacttgttgcaccgaatttctcggtcgcagaacctctcttttccgagggtcgacattttctgcgtgacaacaccgttggttccgccaaaatggatgttgtccttgggaactcctccggctggcgtcactcttagggtcccagcaccgccatttcgccaagccgagttctcttggtcgcggcacatcttgttcctcggtgcctccattttctcggtggcggcagcgctctggtagccgatctgagggatttggaatcgcagccagttgcgcagagtctggggttcccgggcgacgccggcgctgggcgggggagcccgccgctcctccgagccagaggcagaggagctgcgcggacgccgtctcttcacagcgccgcgagcgccgacgcacgggttcctgctcggcctcctgaacccagtcccccggcggcgccgctggcgtctctatcgcaggcccctgcggtttcgcccgtcgttggcttcttggtcctagcaagtttcgatttcgcggtgcccgctatttctacctcttgtccaaataactagccaaaatgtgatttctcagcctaagcaagtcccgatttagggcatcggtctagccctggctgcgatttcttggtcctaggaagtcactgtttagctgtagcaaggcagacttaaccgtgcgatggtgacttttctttttctttggttctttttcttttctctttctttcttgatacggggtccggctctgtcgcccaggctggagtgcagtgccgcgatctcggctcactgcaacctccgcctcccgggctgaagcgatcctcccaccccagcctccggggtagctgggaccacaggcacgcgccaccacgcccgggtaattttttgtatccttcctagagacaggatttcgccatgttgcctgggctggtctcaaactcctgatttcttagtctgaccaagtcagagtttagttatttcttaccgtagcaagttgagagttattccagtttgcgatttctggttgtaacaattctggctttaaccatgcctacataattttagtagtagcaaattcctgttccgtaataggagcccccattatagccatgcgtgcggtttataactcctgtattaatctaggtactgaagaatgcaatttaaaaaaatttagcagtgtctggaatttttaaatcataccaagttagaattcgcaatagtctcgccctggctatgctggcgatttttcactcatgtagaagttggggtacgtcggctacagataattgttggtgtcgcaaataccggtttaaccatggctgtttcttcttaatccgaggaaacttcggataggcgcaagaggcacgggtttagtgctgacaaatataatggtaggatctcaccattcgaccctgtttgcaatttctttctgtttgtaggatgctttgtatgttttgtatactcaaaaaaaaaaatttttttttggtgtatcttgttctggcagcgaggttatcagtgtattttgttttaatttctatttgcttttaaatttttaattattttttaatttaaatgttacggtatttttttcttacccactgtcttccccggtagaataaatgtggcgtatttcttctactgattttcagtgtcacgtctcaggttctttctaacttgccttctcccgtgagcactgaaggcgagctagttccccgccgctagggttctcttccgcggctctgctcttacgccgagccagcggtttcgcatccgcactttcgccactaggggcgactccgtgttttc

SEQ ID NO: 1881896 - DNA, 4001 bp, Homo sapiens
tagtttctggctcttttcctttgtagccgcatttcctactacgttccccacccatcattcctttcaaccacactggccaatgacctaattcttgaacccatcaggcatgtttccatctcagggccctgtactagctgcactttctagaataccattcactgatactggtatggttcactcctcacttccttcaaacctttgctagaagaatgtaatcctttcaataagcattgcaaacaacactcctcacctgcccccacccccaccaaatacattgcactgatgatcttcacttctccagctgtttttttcccccgtgtgcttatccccttctaacacatcatataatttactactatgattatattttattgtctgtctccctgttagagtgcaaacttttgtttgctttgttcattaagtatcctgagcacttagaacacagcctaacatataaaaggcaatcaataaaattcatcaagtaaaactgactgagaggccagcagcctggattccagtcccaatactgcccctaccatgctatataactttggctttatgtctgtttccttgtgtgtaatataaaagctttggatcatattagatagcctactttccatggctctgactcagtcctttctcatccgtaggctgttttgttcattgccagtcttactccacctttcctctggcccagactgctccacccttgattaagtatactctctttcccacagcctccttccttggttcataatgttgatgatcagtaagtattgaataaattgaagttattttgattcactcacaaaaaaccataaaggcactttctgacaggattatgtcttttggtgttaattggtctctagctctaatttctaatcctaaaatctatgctgtaatactataagaatttaaaaaatatcaacctaggatttctatgatacattctcaaacagcgtatttattacttatttacacaaaaaactgtcacttcaacttagataaaattgagcacctcactttttaaatattgaatatcggtttaaagatctcaagtttttatatcctccttttgttaacaatgtagaaaggatattttagattccactagcaacttctcacagaagatattattaatgaaactgaagtattgcattttatttctaaaggtcagtttaatagacttgcaatttcaaagtttaaccgtaccatctgttttaacttaaaaatatagttataaattctttttagcaacatttgtgttttaataccctgaagaattattacaataaatccaaattaatattctggtccctaattacagaagagtgaatcaataaattagattacccgaaatgagactttggtgacttcttagcagatatttagtgagcacccattatgcacaagtattgatttgttgctgaagattaaaaattaaatcagtccctttttaagaggctcacagattagtaagaactcgtgtttaatttataatgggttttaatacaaggcaaaatttaaacacacttctttgatagttttatttcccttttctttctgtcttccccagttaaatccaagtaaaaatacacccccctttcaaaataaatatcattaaacaaattgtctgtatttagcacagataaatatatggaattattttcccaaagatgaatagtaggtcacgagtgatgcttgcataatttttaaatataatcaaatatactgaaaaacatgctagtactgtatttccaaaagtaagtttctattcctagaactaaaacagaaaagaagtgttgtgagatacataaatgaagccaataaatttaaccaagggcttaccattttcctgcaggatgtttataaatagttcctggcaaaggaggttgccgtatagggtcctacaagtaacctaggtggcagcatctcctcccagcgtcaggtctaagcacacaagttcttccttccatctacaaacgcaggaaaccacgactggagaagttatatgattggctaaaccatgaatgacgcaacataacccacgcccactgagaatcgtcctttcccagactggctcagattccgctttccgattggtccctacagcaagagggcaaggacaattgcttaagttgacctctgggtccggaatcgcgggcaaagatggcggcggccaggtgttggaggcctttgctacgcggtccgaggctttcattgcacaccgcggctaatgccgccgccacggctacagaaacgacctgccaagacgtcgcggcgacccccgtcgcgcggtacccgccgattgtggcctccatgacagccgacagcaaagctgcacggctgcggcggatcgagcgctggcaggcgacggtgcacgctgcggagtcggtagacgagaagctgcgaatcctcaccaagatgcagtttatgaagtacatggtttacccgcagaccttcgcgctgaatgccgaccgctggtaccagtacttcaccaagaccgtgttcctgtcgggtctgccgccgcccccagcggagcccgagcccgagcccgaacccgaacctgaacctgcgctggacctcgcggcgctgcgtgcggtcgcctgcgactgcctgctgcaggagcacttctacctgcggcgcaggcggcgcgtgcaccgttacgaggagagcgaggtcatatctttgcccttcctggatcagctggtgtcaaccctcgtgggcctcctcagcccacacaacccggccctggccgctgccgccctcggtgagccttggattccgccccagggcggaagggagagatggggattgtactgggttactctgccgcagatttacccctcgtcatttctttctctctgcttcgttcatgttttcctagtcctttcgttcctatctggggtggcctggttttgtaacagtcactgcgttaggaatctagagactaggtgtgtgtggctgcgctaacacctaccagctcttcaactctgaaagcctgagctctccaggattccagtcctggattctactttgtgagtgttcagccaaatggaagagcagtggtgatgaagagaaacgccacttaagagagtggggcgggccaggtttcctgttggctgttccaccacaaagctgtgtgaccatgtgtcacatggctgagtagtaacttctttttaccttaattttaaatttagtatgtcttttctttttctttagtaacttttttgcttaatttttcgcgttttacggtagtagttctttgttgtagaattgtgaagattaaatgaagtattaactaagatacctaacgtttactcagtatttatgtgctaggccctggttctaaattttatatgtgccaacttattaatgctcacaataaccgttcacgataggtagcaatgttttggtaaatgaaaaaaagacaaaaacgtaacaaactgaggcatagaaacgttaaatgtgtctgcctgacaccctatagctaagagattagggggtcaaacttcaaactcccattccaagttcctagtaaaaaatcagcagcttccgtgtaactgttcagggcggacatgaaaagtaattaacgtataaataattttaaaaattattgtttttgacgcattcattattttatatcttctaccaagtgtatgtcttaatatttattgaagtaatgttaggactgtagatgtgtgctcaacctagccttgttgtgtgcatgttttttcccttccccagttgagaaagaagtggtcttgaggaaagcgtcatggacttagactactcctgatggatggcctagaaaacctgtttaactttgtcaagacccaggttcttctcctataaaatagagataatgaaaagtatacatacctttgggagttattgtgaaaattgaattggatgttcataaaatagccctatttttatttatggtgaatgatattcttgttaatcttattttcttttattactcctaatgaggaatctct

SEQ ID NO: 1881897 - DNA, 4001 bp, Homo sapiens
ggcaactccatccaccctcatcgccccctctccacctggctgtccttacctccagccggacaccaagccagctctgctgcaggtgcaaaggggccacctgccccagcccagcttccacatgtgaatgtcctgtgctctagacagccaggacctgctgccacctgcttgctggggcggtgagcaccctcaggcatacctgttcatcacccacagatgcccagccctgtgcttaccccacagcacatgcacacaatgccccctggatgccacaaatcgtttctagcagcaaatgagtcagaagggaatggacccaaagtctagaccccactccacccccatcctgctgaggttgtgagctccaggggagcagaggcagctaaggacacgggccatggctggtccctggcaaccttgtagcaccacctggtgacccagcagtgagcagggtgcttgaaacaccactgggcaggtatcactcacacctacaccgtggagcagcccattccaatggcaaagattcccgattacactattaaataagaaaagaatgtactttttttcttttactacatagagatgttaagcttctataaatcaaaaaacagggccaggcatggtggctcatgcctgtaatcccagcatgttgggaggccaaggtgggtggatcacctgaggtcgagagttcaagaccaggctggccaacatggtgaaaccctatctctactcaaaacacaaaaaattagccgggcgtggtggcatgtgcctgtagtcccagctgcttgggaggctgagagaggagaatggcttgaactcaggaggcagaggttgcagtgagccgagactgcgccactgcactccagcctgcacaacagagcgagactcccatcacacacacacacaaaaaaaatcaaaaaccagataaatgtaatagcaaactgggtgaatgtttgcagcaaaattacagagaaaacatatccttcacagaggaaaagctcttactaatcaagaaaacaacaccataatggaaagagaaatataactgtagacattcaacgtagatgtcaaccttgcccatgaccaaggaaacaaacactgaaaccatcatgagactttgtttttcagtttgctacagtttggaaaggaaacgagcttgcccctgtgtggctggtgggcatgtgggcatgtgggctggcaacagctttctgagcggctgcacctctaagaacaaaagcagttccatcctcttccagggaagaggaatgtttcaggaatcacttagaaacataaacaggaatttgtgaaggaggccacccaatacaatgttacctgcaatggcaaactaaaagcaatgtagctgcttgatgggaagaaatggtgaaacccatgtccctacatttgtaccttcaaggaccaggcagaagggtaaagtgcacttttaaagaatatttgaacattgagaaataaaaatacaatcccaagacctccaactgactaaatgaaccccttcttggccaaggggactccagagaaaccttaaacactgggttccaagccatgaagggatgaaatgccagacagacctcattatgccccctccctcactaaccgctgccattgagtttctttcctaagggtaaacagaaagcccttttgaaagatttgccagactccccacccctcgtgtagttttgacacaacaaccagccagcattccttcctgataacagatcctgactgtggactggttctagctggtgtagaggctgcacacaggatgcctctgtgtccttcatttcaccttttgacctacagagcctcatttcaatgcacttaaatgtgaagtctccaccccaaagtgaacacaggacacatgtaacacacatgtgagctcactgtgcatgcgtgcccctcacccttgtagagtactcacagtgcctcctgtagcctctcagccaccacggtcagcacattcctgtctcatcctccccaccctcaaagtgcctgcttccggtttagggtggaggccacacctcccagcctgtggatggttacttgcaggctgcaactctttagagaaataaagctctcccttccatgtttatgaatctcatgaatcttcagttgacaacatataaagaaatgagcatgaaatgattttcagtaaaataagtaggaaacaaaactgcagataattaggtgattatcttgggagatgggaatctgtgggggggggagggaatttttatttttctcttcacatttttccacatttttctaatttttttacaatgatcatacagcactttcataacaaaaaataataaacattttatttcacaaaactataacctggaaaaagtgataaatgtctataagtgaatattccatagcggtaagaatggatgaggcatttttatccacaaggcagatcttcagaacatgaggcactgctactggtactgggcatggctttggctgctctcccagtgggggtctgaggtggccctgggccatctgccctcacctggctctggggcaacaggggcaggggtgggagaggcatcaggtctgggaaaaggcacagtccacgggctccactggatcaaggcagtgccctccactccatcgggcctgagtggagatggcctcactggcttagctctgcccaagcaaatccaccctcgtgttgcctccaaggcatccgccaggtcctcacctcaccccctgccccaattacttatgttcttctttttatcagaaaaacattcgatgtggccatattttcaataatagcttgagtcagtctcacttggttgtgataactcagaagactggtgatcagagagaaagaggaaaagggggacgggggagaaggggaagagtgagggacgggggagggagggaagagggagggagggagagaagagcaggacggtgggaggaggtttcttggcatgcttcctgctggttcagacccagtccaagtttcctgaacccatgttctggaatgtctggcgctgccacaagatgaggaggagacccagccacaggcgtgaggacatgggtgcatcctcctcatggccgacccgagttcccaccaggcacaggacttcgttaacagaagcagcttctcaggcaaatcacacagcacccccagcccctgctgaagtgcctcctcctctccagctcacccaaggagccggagctttggctgcactggtgctgggggcggcttcaccccgtgagggtgccactccatgggccactgggaggttgttgtgcagtcctggccagtttacagaacagagatccaaactttcacctaatatataagacaggaaccattttcatttgaccagagagggcctcagggggatcctggccctcagctcccaggaagaggtcctctccccgcagcatccatgggaagtgccttcagttgctccagttcttcacccctctctgtatctgccctatgtctgcagcttggcagggtgtttgctgcttacattttgagactctcggaaacaaactgtgccttctaaacacacagtggaatctgacaccaatgatgcagtccagaatgctttcttcccctggtgacaaactttccgagtatcttacattagtttagtggggccttccagcagctgtcccaactcagagacagacctgcaggcccatgggccaagacagagcccttccccaccaaccttgaccttggatgaaaagcatcatccctgtttgctggaagtgtgtagtaggatgacggatgtgttggcagagccaggcccatgctgtccagggaggcatcaatgctttgcggtgtccagacagtttacaaggcccaagaatgctgctcccttggtgaggcaaccacctcgtgctaaaaatcccctgacaagtcaccaagacttgaagggaggaggctctctggagcatgagccaactctcccagatgctaacttggatggctgtgaacccagtcctgcctcagccat

SEQ ID NO: 1881898 - DNA, 4001 bp, Homo sapiens
aaggtggaggcacctggcggtctgctgactgcaggtcacatgtgtattctgctttcctggcagaaaacacacatttgtgtcatcttgggaccctcagggttgcctgttcctgttcacggtgcctgaattgatggctgatgggaagtcccacttctccttctggacctacacaacagaccttggcctacgtcagtcttatcaaccattgcaaataaaacaagcctccatcccctatttacatagtggaccaggatgcttggtctatgtcaatcttatcaaccaatgcaaaccaaacaagcctgcatcccttatttacgcagtggaccaggatgggagactaggaggaaaacttttctataaaagacagcccctctcttggttgtcatggagcgcacctttgttttgtaccaaggactgtgtctccccggcttgcaaactactctactatttgtagaaacaaagtctctcacttaacctaatacttttttcttggtactttggttagcaatggggattgtagctatcttgtactttggttagcaatggggattgtagctaaagtgccactttcatcactacgacgctgattgtcttcagttgcccaaggattaaaatgtaaccatgatgaatttcgagtcaggaaacacgtcacagtgggattctatttccctggattcccttaaagacacggacacatactcactcagggcactgatgaggctactaaaaggaataaaagacggtatcactatggggcccttgaggaaacagttctgcgaatcctccacgcctcattctgtcacgggagagagtctctgcacttctattttcagcaggccaacatttctctgtgttgcttgtgatgatcttatgaggggcctggagaaatatgtacacatagattttagcatgagtcttgcagcactgcgcttagcagagtgtcttctcttacagagcatccctgcgcttggagttggggcgtggaggactgtccacttcacctgaccccggaatgtggcccagagctactgacaagggccgtcctttgtgaaacagaggactatattgtgctcatctccagctacgtgtgtgcgtgtctttgtgtgttttctgtgagtgtgtgtgactgtgttttctgtgtatttcctctgtgtgtgcttcctgtctgtgtgttttctctctgtatgttttttgtgcatatgtgtgagtgtgttttctgtgtgtgtgttttcctctgtgtgtgtgtgtgtgtgtgtgtgtgtgcgtgtccccaacctcaccaagcatagctcagggacctctgtgtgttttctctctgtatgttttttgtgcatatgtgtgagtgtgttttctgtgtgtgtgttttcctctctctctctctctctctgtgtgtgtgtgtgtgtgtgtgagtgtctccaacctcaccaagcatagctcaggaacctcagttgtcccttgaaaacaccgtgctgccaggtactagacacaaatgtgactttaaacgtgacctttacgctcaagcatcttgtagtctagatgaggaagagagaggaatggaacaccacatcctcttcagagccaggtgctatgggaaagttcctggctgtctttgcagaccacacaccaagacagctattgtgatcaccactttatagtgaccagaatgtgttcagcaaggcagcctgcccacagcctggagaacttacaattttttccaggcgtgatcaaaagcaaccaaacaaacaaatgttttcactccataaactgatatgtgccagggagacttgtcctgctgtttatggaatgtgggggcacttagagtgggggtgaaggcttggctcagaggaaccagcagctgtgttatcagagacaaagggaagtgacaacacagtaatttacaatgatccctgcccaaattatctcagcactccgactaagagcagtgttcctgggcaaggagaacacacaatttctcacctgctgaagaatgtggaagccacaggcagtgtggctggaagttcccatcgtccctccatgagtgacttcataaagcttccatcaggcacctgggcctggctgccctcctgctcggattattctaaatataaacaaacgacccccaaggcccgtgctaactcaatcacacttttacatgtctcaggccagtctgctgtttagatttcctggcaatatccttgcaagtcttctgtattcctttttggatgtatcttcatttactgttacaatttttctgccttccttttgcctccttccaggtgaacaagacaataatctaagaagacattcatataaaaattaatggaaccaactgcaggaactgccaaatgttatgttgctcacagaagttttgactttgaaagataagcagcttctatttattccatgctccaattagggcaaacacaaaacattttctatctgctaagatatatgtattatatatgtacatatatatgaaataaaagtataaataactgacttaattctacattctttcaaaatgaggaaacaggtctagcttctacaattgttctttgttttttccattatttaagcaatttcaagaacttagaagtttcccctgctttgtaggaaataataaagtaagatcccacgtactccagtttccctcactggtaacatctttttttttttttttttttttttttttttttttgagacggagtctcactgtcacccaggctggagtgcggtggcgcagtctcggctcactgcaagctccgcctcccgggttcacgccattctcctgcctcagcctcccgagtagctgggactacaggcgcccgccaccacgcccggctaattttttgtatttttagtagagatgggatttcaccgtgttagccaggatggtctcgatctcccgacctcgtgatccgcccgcctcggcctcccaaagcgctgggattacaggcgtgagccaccgcgcccggcccactggtaacatcttgcaacactgtagtacaatgtaacagacaggaacctgacactgacacaatccaggctcagaactttccatgtacaagaatctccctgtcgctgtttgatgtccacacccgcttcttcccacccaccctcctcctgagcctctggcaaccaccaatctgttctcaatttctaaaatttgatacataaatgtaatcacacagcatgtaactttgtgaaatcgttttttttccctcaacataattcttgggaggctcactgatgtggctgcatggatctatagttcattcctttttattgctgagtagtattccgtgatgtagacagacccgtttgcttaactgttcacccattgaaggacatctggtttgtttctagtttttggctgttatgctaaagcttctatgaatagacatttttattttttgggataatgacccaggcatgcagtgcaattgctgggtcaaatggtagttgcatgtgtgaaagctgtcagagtcaaaatggagtcacttttgttcaaacaaataagccctgacaaatagagccagaaaaggccttggagggaagattctcatgaataaatgactgacagcaagaactatcataaaaaatggcaaaaaacagaaccttgcacaaaggccattgcaacccctgcacacacacacacacacacacacacacacacacacgatattcctgtaagaacacccccatgcctctccaacctgggactggagtccgtcttgtttttgacacctgtagccaagggtaattatctcaagacaattatgtcatcttcctcaatttccctttaaaaacttttgtcttctttgacctccctgaatacacacattgtttgctatggcatatgtctcccactgctacgtcctattcctgaataatatcatttttctttaaagagcctctctgttgttatttaggttgacacgtttccctaacaaactacaaaactgtgctgggcgcggtggctcatgcctgtaatcccagca

SEQ ID NO: 1881899 - DNA, 4001 bp, Homo sapiens
tcaactgtattaaaactaaatatattgtttttaatgacaaatagtcactatttagtaaaatgattactgtgctataatagaacaagtccttagcccaaaattaaatggccacagattgacatatgcataaagcttatcaactatcacataacacattttaacaaaaatcaagaagactaatagatgatctcttcttctttttcttttgtgagacagggtcttgctctgtcacccaggctggagtacagtggcacaatcatggttcactgcagcctccacctcctgggtccaaatgatcctccaacctcagcctcccaggtagctggggtctcagtcgcatgccaccattcccgcttcgtgtgtgcgtgtgtgtgtgtgtgtgtgtgtgtgtgtgtgtgtgtgtgtgtagagtctggtctcaaactcctgggctcaagcaattctccctctttggcctcccaaaatgctaggattataggcatgagctaaatcgtaccaaagaaattatattttaaaagtaaagtcaaaggtagaatttaagaacaaaggaattctatttctatacttactagtcccaggtagacaaacaacacggccttcctcagcctctacctgagtcgtttcagacgagtatgagccatgagaaatcagagctgttattttctggttgaaactgacactttaggctactgttttcatttgcctgttgaaagaataacttagctgtattaatcatttaaattaaaattaaacatttgaagggaaaacatggggagcagacaacatctacctcactcaaggaggcaggtaatcaatgtaaaaggaatgagaaaaatcaccattggaaccacgggtgtaagcaatgtttccaagagccttcagcaatgacgctgaaaccagctcgtgaagtttgccggggagtaagatgttcacagtgctttgatgtctcattccacagatgactaataacaaaagggaaaagctaccctcacaaggagatgtccagttgacactatctcaaccaaaattattaaacatagcatcagcaatcgtgggacaaacagacgcaaacatctcctggtgtgaggtggtaagtacgcaacactgcctaatctgaattaggcattattccctgtttaatctggatccattcatgagaacactgtttaatctgtattcttgccaaaatgctcaatctattctagtcagaagaaaaaagcaaccagatatatctagattatgggtcactccacaaaacaaagagcctagatttttcaaaatgtttcatgtattgaaagaactactccaaagtaaaagaatagagagatgtgacaaccaaaggcaaggttaatctttgattaaactgtggatctaaaacaaaaataaagaacattttggagacaattaggtaaatctgaatatgggctgtacatcaaattactgtattatagttagatggtagaactgtaattacatagaacatgtcattattcacaagagataaatgctgaagtgttggggtaaaacaccatgctctttgcaacttactttcaaatgattcagagaagaaagtacttatggaaagagaaagaaactgcaaaaggtggcaaatgctagccactggttgatctgaatgaagaatatgcagatgtctattgttttgccttttaattttctgtaggcaagggaaagataggaaggagggaaggtgcaggcatttcttatcaattcatacctgtaaaaaacagagttaaaagaaaaccaaaggcttaaaattcatgtaaacatccagtgagatcaatagtgattttctgtcaaatttctgaaaagccattaagactgtaacatacctgactaggatcacctgtaggtaacttaaagtactttttctggaggttccagtccttctacttcgtatgctttattccatcattcctggaattgccagttgttcaaaataaacctctaaatgatcatcgtaagacatttcatcatcaatatcatcctttaataaaattaagaaaaaataaaacaggctctaaggcagtgactaaacaataaataatttgtaataaaaagggctgagatataaatgagtcaataaaattaagaaaaaataaaacaggctctaaggtagtgactgaacaataaataatttgtaataaaaaagactaagacataaatgagtcaataaaattaagaaaaaaataaagcaggctttaaagtagtgactaaacaatttgtaatcaaaaatacccatcagacataaatgagtcaataaagtatacaatttttttttgagatagagtcttgttctattatccagactgaatgcagtggtgtgatctcagctcactgcaatcttcacctcccaggttcaagccatcctcccacctcagcctcccgagtaactgggactacacgtgtgcaccacctcgcctggataatttttgtatttttttttgtagaaatggggttgtcccatgttgtccaggctggtcttaaactcctggactcaagcattccacccaccttggcctaccaaagtgctgggattacaggtgtgagccacctcgcctggcctgttttatacttgacatgagaaaactgttataacttcagtcaattataagtcattataaaaaaatatttaacctctttgagaggacaggacagaaagatcctgacacgttatcaaagcttagggtaggataaatgtgccatcacaaatgaatggggaagagagcaggcccttcagaaaatggtgtggcaaatggttacctctatcaaaaaagtacagacgagcctatcataagagaagtaaaaggaagaaagggaggagagagagagaaagagagaaaaagggagggaggacactgcagaaggcttcaatgttgtaacacccagctcggcaaggataagataaaccaagagctctcagtcatggtctaagttggcactggctttttttttttttttccgaggtggagtctcactctgtcacctaggctggagtgcagtggcgtgatctcggctcactgcaagctccacctcctgggttcacaccattctcctgcctcagcctcctgagtagctgggaccacaggcacctgccaccacatcgggctaactttttgtatttttagtagagacggggtttcaccgtgttagccaggatggtctcaatctcctgacctcgtgatccgcccgcctcggcctcccaaagtgctgggattacaggcgtgagccagtgcgcccggcctacctttttagaggttaattttgcaattaacattaagagtctcaaaaacactcatcacctttgacttagccatttcacctccaataatctagcatactaaaacactctaagatcagatacatttaggtcaataattctttatccaccaattacacaatccaaaaaaattttaaaaactcttttggcagcacaagctgtcctcaataaatgtgatactatttgtagtttctatttataccactcagctggccttcaagccatgcatacttttaatgtaagtagccccagcctacttctctgggcttatttaccaacgcagcctcccacagatgctgtaaacctgacacagaaagcccctggccgttccccaaacactgcccacatgcctcccagcagcgcctttgctgatactgtttctgcttcctgacacgccctccttctcgcacgtctaaggcctggcacgggccccatctcttttcgtaaagcttcagccatacctgcctcagaggtaaatttctgacccccatgattcccaggcacattttggtgctgctggttgtacacaacacaatctgaaatgtggttctgcatctcttctttgcacctggctgaggtctcagagagcagaggctaaatatttcatggctccctcaatttctaaacacagtgctgtatattgagtggcacctctaggtgactactttgtaccctaaatgttaaactgagggatgagtgaaac

SEQ ID NO: 1881900 - DNA, 4001 bp, Homo sapiens
tgcacatgctgaggtcagcacggaggcgccctcgggcaccagcatgccctcgggtttgcagcttgtcaaatatcccatgaaggcaacctgaccaaatgtgctctaacaccactggaccaatggaacgtcttgggctgaacagatgcagccttgcatccaccgcctgccaccaccctctgtgtacaccccctgcacacacctctgcacacaccccccctgcacactgttgcacataccccctgcacacagcctgtgtacactccctgcacagatcccctgcacacaactccctcacacatcctctgcacaaaccctgtgtataccccctgcacacacctctacacataccttcacacaccatgtatacctcctgcacacacctctgcacacacctcctgcacacaccttgtgtacactccctgcacactgttgcacacaccccctgcacatagcctctgcacacagcctgtgtacactccctgcacagatcccctgcacacacctcccacacacatcctctgcacaaaccctgtgtatacctcctgcacacacatctacacacacctcctgcacacaccttgtgtacaccccctgcacactgttgcacacacctcctgcacacacctcctgcacacactgttgcacacacccccacacatagcccctacacacacctctgcacatactgttgcacacacccccacacatagctcctgcacacacctcctgcacacacctcctgcacacactgttgcacacacccccacacatagaccctgcacacacctcctgcacacactgttgcacacaccccttgcacatacaccctgtatataccccctgcatactccttatgtacagcactgcacatactccctgcagagaccctgtgtgcatcctctgcacacaccccttctgtatactgtctgcacacaccccctacatgtacaccctctgcacactcctcctgcatacaccccatgtacaccttctgcacacactccctgaacacattctgagtacacctcctgcacaccccgtgtacaacctctgcacacaccccctacacactcccctacacactcccctacaccatccacacacactccctgcacacagcccctgcacacattccccatgtacaccctctgtctgtgtataccctcgtctactaccaccatacgtaccccccaccactaccctgccttgtctatcaccccccaggctgtgacataccagggatgttgccaacgagctggtctaatctggggtgagggtttctgggtgcccctagacaccaggagaaaggcggggaggggacacccctgggggtctggattcactccaccaggcgctgggccacagtggtacggtgacacagtagatgtcttgagcaggattaaagtcttcccaataaacaggctgaactctgtcttccttgaaagctctgtagaaggacctcacaaggataaacacagcgagaccctccagggcgcggtcagccacgagccacagtgctgggcctgtgacatctctggaggttctggggtggagaaggaccggccgtggggagtgactggctggggagaagctcagctcccgcccacctctgggaggcccggggctggacgggaggtgcagcagacaaggctccgggcgggtgctggggtgtctggaggggtccccgcgggggggtcgggttgggtggggagtctaggtgagtcgggggtccccgggggcgctgggttcagggtgggagcggagtgtggatggggcagggtccccatgcccaccaccagccgcgattccaccgcgcctactcggggtttccccgggaggacaccgcgtgtgtcaagggccggggcctagaaggcggccgcgcccagggaagccttgacagggagctatctggggcgggggctggggtcgcgtggccagtacctgggagaaccgccattcaggagaaccccccgccaggctcttggttccgcccacgcagtcccgccccctcccccagccacgcccctcgccccgccgcgcaggccccgccccgtcccgccaggctctcggttctgccgacgcaggtcccgcccctctcgtagcctcgccccgcccgccgcgcaggcgccgtccgagggctccgtttgaaacatggcgcgggctggccctcggctggtgctgagcgaggaggcggttcgggcgaagagcggcttagggcctcaccgcgacctgggtgcgccggagggcgggcgggggtgcaagcgtgaggtggcgggggggtgggtgccgagcttcccggggcggcggcggaccgtgggcaggcgggacccgtctacgcaggcgccgcgggcgtccggaacggtcgcgggcgagcggggcgcgcgtgtccaggtgagcgacccaccccccgtgcccaggtgcggcccctgcccgcgttcgggtcccggcgtcccggcccctgcctgtctatcgggtcactggttccgtgactgggggttacatccgctgagaagagggagccggccttgctgtccaggagcgcagcccgccctcccgctggggatcacctccctggttctcctgggcccactctgtggtgattgttgcgctcggccttcttgaggatgttggtggccggtttccttctttttggcttatttttgtctggttttggcgtcaaggtgaagccgagctcataaactgctgagaagtgttgccttctcttatatttagaagaggttctgtagagtgtgtgctcattgtttgaatgtttcctggaattttccagtgaaaccatatggacatgtcaatttctgtttttgaagcttttaaatgacaaattctgtatctctggttgttagagaaccgttcatattagttcaccgcgagtcttggctgtgtggggttttgtggcattggcttatttgagctaacttgtggagtgtgtgtgttgagttgtttctggtgttctgttgttagcctgttaatgtctgtgtgtggtctgcaggtgttactggaccaacaggttcagtcaggtgctgtgggggccacaggccaatacactgagacagtggggtttgcagcagagaaagagtttaaggctggcaggggcccagcagggaggtggaaggaggcctcaatccatctccccaaggagatctgagcggttttttttttttagacggagtctcactctgtcgtccaggttggagtgcagtggcacaatctcagctcactgcaacctccacctcccaggttcaagtgattcactcagcctcctgagtagctgggattacaagcacgcgccaccatgcccggctaattttttatatttttagtagagacggggtttcaccatgttggccaggctggtcttgaactcctgatctcaggtgatccacctgccttggcctcccaaagtgctgggattacaggcatgagccacctacacccagcctgagctgggggttttagaggaacaggactgtgaggagctggaagattggtgttgtcagttggtggaggtaagggccatggaattatcagggtgtggaaactgcattctttggtgaatccgcttgcggggccctttagaccagctggcatcagtccccaggtcctgaaagaatatctcaaatggaaaacttaacggtttataatgtccaggttattatctgtagagtggttaaggggaactgtaacctcgtgacaaaatccaagtgatcctgaggcagtaggcaccacagggctctgaggaagcaggtgagagggcagctgacctcgggacatgccgagtcctcccttcttccctgattagtgctacaaggtttacagggatatcccttttctgttcctgatgttgataatctgtgtattctttcttttttagtcttgctagaggcttgtgaatgttattgatagtttcaaagaaccgactttgggtttgatttttctccagtgtttttctagtttcaaatttcattgatttctgctttttttta

SEQ ID NO: 1881901 - DNA, 4001 bp, Homo sapiens
cccaatgaaatgtggaagtgttttgtgatttttatcttactatagtgattgttttataaacaaagaaaaaattaattcaggattgcagatatggtaaactattaaaatagtttgggtattaaaatatgaaataattgggtattaattcaaaatccaagagttgccattgaacaaacctgtaggcataggtaagtgctgaggtgaaagtgccaaccaaagccgttagattgaacatttatgcctggagggaatcagtagaggaactggctgtggaccttcacctctgcatcccctttgctttctgctgtagctgggtatcacaaaaacaacaacaaaagccacttatttcttaaagacagagaaaggatagttccttccatttaggcattcctaaattgcctccccggtggcccctgcgctcttggaggaggtcaaggcagagcagaccctcaggtgggtgagcgatgcacttgaccctgaggacatcaggtaccaggcccactagcccccgcaggcgcggagctgcggctgcagccaccagcctagacgtggcgcgcccgcagcaagtggctggacaccgcagaccaggcccgcgtccccagcagcgcggatcccggggccagccgcccaggcagcaaagtcaggcggtcggcttcgccagcagccgatgagtctcatcctgtggattgcccagcgccagggatcaggatccggagaggtgtccaggaggagcagaccctcagaccaggtaggctgtgcactcggtgaccctgacgccatccaagggaagctccgccatcccgcgccagtgcctgagctgcaactgcaaactgcgcgtcctggcacgagcagcggtgggggcgggtgggggaaggagcgagtgactctccaggcgtcttccgctacctgacaccagccaggcagcccccagggccagagcgtcagcgccgaagccaggctcatccgggaagccactccggtggccgcggggtgcccatgccagcaccagatctctcttcggaaggaggagcggggcgggctacacggccaggcgggccctccccttaaggcggggtgggccgcgcgcctgcgattttccgtccgtggtcctggggcagcccgggccagccaggagaacccgcgagcccagcggcgcctgcacctgcggcttccgggagccgggcggctttgcgaggctcactaggtctgagaggtcggaggccgccagtgtcgctgctgaagggtggaccaggcgggatcgcggattctgggctagatcgcagacttggtatcgcggattgggatttggatcggggattttgagttggatcacggattgggggttggatcgcggattgggggttggatcgcggattgggggttggatcgcggattgggggttggatcgcggattgggagttggatcgcggattgggggttggatcgcggattgggggttggatcgcggattggggtttggatcgcggattggaggttggatcgcggattgggggttggataggggatttggagttggattggggatttggggctgggtgtggggcgagggggagtgaaaaggtgacacggagctgccgcggctcaggagccagtggttgggggtctgagaagaactcaccaccttgaagaagttcttcggctttgggagccgcaggggccggcggtccggggctccctaggccacgtctacaggggttcggggtaccgaatcggaagatccacagggcgctgtcaagggcgaagccgcggaagtggagcgctgcctggagcgcaggagcagagacctggaagccggggacaggcagcacaggcagtggggtgggggctcagcccagggtgggagggggtccccaggcccggcttccccgcagcccctgggatggggcctcggagggcaccctcagaggggtggtgccaaacggagcctcagctgctctgcatcccccataattccccagctggagcgcttggtggagaatgtgagtgatttaactcaccaagctaagcatacacagtgttatttttaacctacacgtttaaaacatggtgttatacacattataggaggtgcctaatgagagaactcattcctctatcaaaaaataccgtgagtcggccgggcgcggtggctcaggcctgtaatcctagcactttgggaggccgaggcgggcggatcaccaggtcaagagatcgagaccatcctggctaacacggtgaaaccccgtctctactaaaaatacaaaaaaaaaaaaaaaagattagccgggcgtggtggcgggcgcctgtagtcccagctactcgggaggctgaggcaggagaatggcgtgaacccgggaggcgcagcttgcagtgagccgagatggtgccactgcactccagccttggcaacagagtgagactccatctccaaaaagaaaaacaaacaaacaaacaaaaaaccgtgagtcattttcagtagcgaaaagctctcacctaaaactgtccgttttacatccgtatccacctgtgtagatcggttctttactgaaggttcttagaaggaaacttggaagtgggaggtgggttctgtgttcctgaatgggaagacacatttttctcaaaatgtgagctctttctgtgattatcaattttacataagccgaatgaaaaaatcaaggttttaacatttttgcatgacacctactgtcttttactattgtaatgacatttgtaaaaattttagggctgggcgcggtggctcacgcctgtaatccccgcactttgggaggccgaggtgggcggatcacgaggtcaggagattgagattgagaccatcctggcaaacacggtgaaaccctgtctgtactaaaaatacaaaaaaaaaaaaaaaaaatagccgggcgtggtggtgggcgcccatagtcccagctactccggaggctgaggcaggagaatgctgtgaacccgggagggggagcttgcagtgagccgccatccagaagtgctgggattacaggtgtgagccaccgcgcccggcctgaaaagtgcatcttcattttacagggaattctttcaaatcaaataatcaaaaactgtaaaagggggcaaagtacttttttgcagatctacaagtttcttatgtaaataggaaaaaaagcctttgcttttctggtataagaatttaaattaaaagaggaatgaaactgttttctatccacaatgtgtgaggatgttttttatactgctgcctgaagtttaagttgctgattactttttaaatagataatttggtggtaagtactatattttaaaaatgcgtatgcccgttacccttcaattccattatactaaaatacccttgggaaatagagatacatgcactttgtttttcacagcacttattttaaaaagaacccatagaatggatcttataagtaaatttcagttgcatccataggatgcaataatatgtgaccatcaaaggtgacaatagatatagaagtacgttgatgtgcgaagatgtattttgttttagccagcgaggaaaaaagaatcagtttgattatacatttaccaaacattaagaatttaatatggtaacttttatttcagtattaaaatagcaattttatttattacttttttatatacagaattcgacaccaaattttggaacttaaaaagaagattcttaaaacttacaatccaggtaagacttctgatagtgaatttctcatttctcatggtggtcctactcttggtttaaaaaaattaagatgtaagattaaggtagttttgaaggaaaagaaaagtttaaaaagatgtgtaaattgcatgtatatatacatatatacatacatgtaaattagtttcttatatttaacttctttagtttggaattaagagttatttaagaaggtagttgtagctgatttataatctcaaacagtattatctgaaaaaaaaaatcatttacttaattatgatcctgaaaatcctat

SEQ ID NO: 1881902 - DNA, 4001 bp, Homo sapiens
cttgcttctttatggaagaccatctatataaacaaatatatacacacaaatacttctgtaaataaaacccaccctactccctaaaataccttctgattgtgatattatagtgtatagtttaggggaaaattatcttctttttatcttaataatccagtttccctttgtacatggttacattcactggtgagttgccaactgagcacttcttgtgtactcagtcacctgaccttactctatgctgaaaatggagggccgggcgcggtggctcacgcctgtaatcccagcactttgggaggccgaggcgggtggatcacgaggtcaggagatcgagaccatcctggctaacaaggtgaaaccccgtctctactaaaaatacaaaaaattagccgggcgcggtggcaggcgcctgtagtcccagctactcgggaggctgaggcaggagaatggcgtgaacccgggaagcggagcttgcagtgagccgagattgcgccactgcagtccgcagtccggcctgggcgacagagcgagactccgtctcaaaaaaaaaaaaaaaaaaaaaaaaaaaaaagaaaatggagaaagaatcaatgcaaagtagaaaactgggagaagcagagagaatccaaaagagaatgaaaagctgaggaaagagtagtttgctctacctacgcaaactactttccataattattactcagaaaaataattttctgtaccagcagttcagcaagtacaccttcttgaaagttttctgttaaaactttcaattaacctgaaccagcctcaggataattcttcctagacgctccagcctgtctgttcaaactacccagatttactcttacttttttctccaacctgtgcctatgcagacaaacgcaccagttctcaacatctggttttttaccttgctgctccatatcacatgaaacacacgtaatacttccacttcagaagccagaattagtatactttcagatgtaactagcacaatcagcccacgtatagttactaacctacccttgcaaagtaacctacagaaataaattaactgggttgtgtaatttcctaactcgtagtattttaattccattcacaaaactgcctcaaattacactttatatatggaaggaggactccattctcaaatgtatgcattttaaaacgatctttatgccacttgaagtttaatccctattcatgccttttttttttcttaacatgatcaaaacgctgtgattccagcaagcgaaagagcattcagatcagctgatgagtgcactgcaaaacagtcgcagctatcccatccccagaatgtgccagaaatagtaaagaaatgttccagcggggcgcggtgctcatgcctgtaatcccagcactttgggaggccgaggcgggcggatcacaaggtcaagagatccagatcattctggccaacatggtgaaaccccgtctctactaaaaatacaaaaattagctgggcgtggtggcgcccgcctgtaggtaatcccagctactcgggtgactgaaacaggagaatcgcttgaacccagtaggcgggggctgcagtgagccgagatcgcgccgctgcactccagcctggcgacagagcgagactccatctcaaaaaaaaaagaataattagaagaaatgttccagcctaaaggggggaaaaatcctaataaaatcttcacaaatccctttcccttcttttcatcctctttcagttcgactttgcttacacaagaaacagctgcctccccttgcggaagtcggaagccaagcgcatttcaaaacagcttctgtggccgcaatttttctcaggctcttacagaatagatttcaaaacagttttaattaattcaacaaaaagttcagctaaacttaggtatcaattggtcgctcagttagtgcagtacgcagaaagacaagaaagtccgcggaatccgctaagaccgagactacctgaagtcgctgtggctagcacttccggtaccggccctaaaagcggtcctaccagaaggaagaggaagtgagtccagtagactgcccaggattcctggagtagctccttatagaacagggtttctctcctggatgtataatttaggagatgggaatttttacagcctccgaaattacgcgtcggctccaacagatgtctaactgtgcggacgagggtgacagccagtgtttttttgtttttttgtttgttttgttttgttttttttgggacagggtctcgctctgtctcccaggctggagtgcagtggtgcgatctcggctccctgcagcctccgcctcttgggttcaaacggttctccagcctcaacctcccgagtagctgggattaaaggcgcccgccaccacggcccggctaatttttgtatttttagtagagacggggtttcaccctattggtcaggctggtctcgaactcccgacctcaggggatccacccgcctcggcctcccaaagtgctgggattacaggcgtgagccaccgcgcccggcctccaggcttcttaactgccattagttgcagcaactctgaaatgagaatgaaaacctttatgaatttaatacatgctagcactgtatttcttcctttaatttgaaggtgactcaaaaaagctcttttcctactagcgtggaaaattcacattgcaaggagctacttccctcttctggtcccaagtactatttccccctttaggaagttaggaacaaatttggtcctcactgaaaatctggatgggggaatgtatatattaagacttcagtgtcggccggcagtggctcatgcctataatcccagcactttgggagtcggaggcgggtggaacatgaggtcaggagttcaagaccagcctggccaagatggtgaaaccctgcctctactaaaaatacaaaaattagctgggcgcggtggcaggtgcctgtaatcccaactacttgggaaactaaggcaggagaatcgcttgagctcggggggcggaggttgcagtgagctgagatcacgccactgcactccagcctgagcggcaaagtgagactctgtctcaaaaaaaaaaaaaaaaaaaaaaaaaaagacttcagtgtttagagaaatccactatattgtgcatgctgttctctctgcatgaattgctgtttcgctccttctttgcctatctatccttgccatttattcagggaagccttttttgactgctctgactggataaaaatctattataggcttttataggttctcagagccaccagatcacttatttgtagtatgtagccaaatttcagtctttcatccatttgtgggatgatttgattaaagtatttcttccccatcagatcatgcttcctgagggtagggatagtgtttggttttacttacagtttgtattcctcagagatgatctcagtttcttggagtagaccctcaatacaattttgttaaataaatggatgttagtaaacactgatatttctacagggagaccagagactatgagtatagattactgcaaaacctaaatagggttgaaatttaagagtttgtaaataaaaattcagaagtaggaaagtgatactctttatcagatctctgtggaccatatttctataaataaaatatagtctttttatcagttaatatctaagtctgagactgaactatggtgatatttaaatgaaagaggaaataaaaatgaataaataagagtccctgtcatccaattactaaaagtctggtgggaggatattagtcggcttcattcaacacaacctgcctttcattccaaaattcatattccttgggaaaaaaagcagagtattgttcagaacatgcttgtcacattatactccagtaatctttattattttgggaaggaaaaaatatgaatgtcacatcagatttagtcacttaacaaaggaaccattatgctccatggaataccatgctgtcatggcgcttatagtatcctgggaaagactatgtat

SEQ ID NO: 1881903 - DNA, 4001 bp, Homo sapiens
tttttaagtgatgctccccgccccaacttggaagaatggtgattcaggcaagaaactgcaacattctggtagaatacaataccacagtagattgaaatcatatgaaggcatttaaaaattccaaaatggttttaatataggagtttaagtagattgctgcttagatgaactctctatttgctctgacctcccaagaaagtttgaagagaaggtacacttaatttcctccaacactaatacttttcccatacaaatgtgaggcttaaatgcagctgctaggttttcccaagagatggcttaattttggaatctgatgaaagaactctttggtccggtggtccaaattactgagacactcagggacaaggagatctgtaaactatgctataaagacatgatgaagatgccaaaagcaattgcaacaaaagcaaaaactgacaaattggatctaattaaactaaagagcttctgcacctcgaaagaaactattaacagagtaaacagacaacctacaaaatgggagaaaatttttgcaaactatgcacctaacaaagtctaacatgcagcatctagaaggaacttcaacaaatttacaagacaaagacaaacaaccccattaaaacgtgggcaaagaacatgaacagacacttttgaaaagaagacatacaagcagccaacaatcatatgaaaataagctcacatcaccaatcattagagaaatgcaaatcaaaaccacaatgtgataccatcttacacctgtcagaatggctattattgaaaaggcaaaaaatagcagacactgacctggttgtggagaaaaaggcacacttatacacagttggtgggagtgtaaatcagttcaaccatttgtgtcctttccatgtggaaggcagtgtggcgattcctcaaagacctaaaaacagaagtaccatttgacccaacaatcccattactgggtatataccccaaggaatataaatcattctattataaagacacatgcatgcatatgttgattgcagcactattcataatagcagagacatggagtcagcataaaagcccatcagtgatacactggataaacaaaatgttgtacatatacaccatggagtactatgcagccataaaaaagaatgagatcatgccttttgcaggaacatggatggagctggaggccattttccttagcaaactgaggcaggaatagaaaaccaaacaccacatgttctcacttacaagttggagttaaatgatcagaacacatggacacatagagaggaacaacacacactggagtctattagaggatagtgggtggggaggagggagaggcttaagaaaaataactaatggatattaggcttaatacctgggtaatgaaatagtgtgtatagcaaacccccatgacacatgtttacctatgtaacaaacctatacatgtacccctgagcttaaaagtataaaaataaaaacctctacccttcctagctttaatttcttggtgattccaacaaatatgataaactttccaaatgttcctcttcactcagtcatgctctgtgggctgtgctgtgaggggtagttcaacagcagcaccttggtagcagaacagtctatgtctgtccggaattatttccatgctttgcaaggcctacgtctacaagttcaaaatctgccgtcatttcagtgacaaagtcaatcaagtccattcttggatattaagtaggtcagaaaactctttggttttcagcacattctgaccagattgtacagacccaacaaagaggatatttttctctttaactcccttacaatttagagaggagaagccccaaagtagattgtgcaaatattgaggggtataaacacagaatgtatagaaaaagggggaaaatgttagaaatgctagaaataagaaagaagtacatattaaaaagagacatttcaaaaacatctttctctttaccaagcaatttgtttccgaactttttcgtggctccggctatagccttcaggaaacttgatgatgtcatttcctttcaattggccagttacataaatgttggaaaacagccatttaaaacagccctcaaacagatggccatgtgtgtaaatgccagaaagtgagaacagccatttgcagttatttatttatttttttaccccacacatggtataatgtttattttacagcctctcttatggacttgtgtggatcattcttgtcatttttctaggaaaaaaaaatcccagaggaagcagtcacaaaatacaaaagacaaattatgaaataatgaaaaataaggtaatgaacagaagtgagcatcacgttgggagaatataaaccatcaaagagtggtccatacagtgctattcaaatgatcaaacattctaggggaaaaaaaaatctgtaactgtcaggaagtttcaagcaaggggaatttttcaatgaggaagataaatccatcctatgatccgaaagaagttaaaaatggaatgcctgcatggtttttaccaaaaaaaaaaaaaaaggcacactttatgtatttacttttattccttcaaagcaaacttaaatgtagctacagagttccttcacaagcactgacctacatatccccttgttccaagtacatattgatgcaatcaagagaagtttacacttttgtaactgtgaagaatttcagttatgcataataaaacacagcaaggagtttgagccttctcagcttcaaaaactaaattctgttcttgtctgcaagggctgatactagcatttcctgtcctttctactagtgaaaattgtgttattttaatagctagtacagcaaatgttacgcagtttcaaagaaaagtaagttaattctttgcaaattctatcaattggcttcctgtgtttaatatttaattgaaatattaaaatatattttaaaaataagcttcctgtatttaatactgtattgaaatattaaaatgtatttcaattaaatattaagaacatgtaaattaaatatatatatatatactcatttaaatccagatgacatgggtgtcaatagggagagaaaaagtaagggtaagctaatcattgtccttcttttgatggttttcttctttgtgaaaatatttatttcccatggggattagagaattcaatttccctttcattggtgaaatttccacaagtatgtagctatgcattctaaattctacttcagtatatagcagcaaaatgtcactgacttatttgttcacatataattattaaacatcaaatatggaccaaaagttgtgctagaagtgggtgataaagagataccaactgagggatcatttaccaaaacaagtccaatattttatagactgtctatttaaatattacctttttttatgcttctacctagttttgagctattctaatacttgaattacaggaaagtatttggaactctgctatttcccatgagacttctatacctcttgggtcagggaaggacagttttggagaccctgctacctttaggtaggattatgtcctcaaaaggtttttgtgcttactttggaccctgctgcctgaactccaccaagcagagtaataagttccatatgcccatttttttgaagaacacattttcaaagcagcaaatgttttgacggattggctcttggagagcctgaatactgttatacacatcgtttagcatttcacaaggcccctactgttaaattctgggaatggggccagggtaacctacctactggtgctctaagtaacgttaaaatattgagaattcttaactatcatgcttcactaagacatatttggaatgtgagaatttctttgctgccatggaaccatgtgaatgtgtgtgtgtgtgtgcacataagtaaaagaaacaggcccttagagtcaataaattaacaaaaaatctcaatggtgggacttttaaaatatttaaacttttaaacctttcatctaatgtaggtgttgaattctg

SEQ ID NO: 1881904 - DNA, 4001 bp, Homo sapiens
cagaggcccctcccagctcaagactgggagctcctccttctccccaccacaggctggggtctcctcgcattctctttcagggaagctgagaaagactatgaaatgtaatcctgtctgtctcctgagtttctctaataaagaaaacaggatagcaacccccctccccgcggctcctccaatcctccttttctgccatagatttaagatttatttattcccatccttctgactgtttcagcaagggccatgggtgagcaccagctggaaaattactgcttcaactttcattgtttaaaatgcttaaatgacatgcgagaaacaggtttttaggtctgtgatgctgagaagggttggtagcaaagtaaagccaggttgcaaagacctagaaaataagtgctacaatttaccagctcttccatatacccggtgcaggacccttggcctcagtttctacagctgacagagagggcgatactgaacttcaacagccttaaaaggaagtcctggacaactgtacccatttttctggcgaagagttctcttggtcttagagaaaggtctcgcccctgaaaggaaggctgaggttccctaggggagagtctgctctgccctcaggagctgggtaagtacacggaggggtgagccgaatggtgagaaggcattttaggctaggactcggtgaccttgggctgcctgcctctagagtcccagccccagccctaggccagacctcagccctgggctgggagcctttcattggttcctctgacaacagccaagcacaatcctatagtggcgtaggaagaaaaagactgccacacaatctccccgtgcggccagaacagcggcaagacagaccttacaagggactcagggccaagccctggcccagactctgctcttatccacgcatcaaagccaccccccgccccggacttcccggaggctacaggctcctccgttccagggaggagcagggcctgctgcgagggctccccgccttcctggagtcaggcctaatggcgggggcttttcttttcaccggcttgagctgatcctcacccccgccccccaacgccaccatcattaacagcgaagaaaggatccccagccatttccatttcctctgcggctcaagagccccgttgttatttaatcctgaggccaccccggcagcatcctcggcgcagccggctccacccatccacctggccagttctcggccgctcccacttccccggaggggaggccggtgagaggtgggggatattggggaaaggcgcctacaacagcgaagggccgtgggccttcggtggaccgaggctcctcaggccagcgtcctgtgagggctgggaaaccgactgggacagagaaaggacacctagctagggcgacagagagcgggcagacgcccgggcactgcggacattgcactggggcggggggcggggggaacgctgggaggcgagggccaggcttcctctggctgagttgccagaatcgccccggggggtactggagccggaagaggcctgggcccagtcactgtctacacccaagaaatggggggaggggcggccagcactcacgagagattcagcctcaggaaaaagaaccagattcactcaccaatcctcaccccaccctttgatatgaatgatggacattttcctaatttttggtaaacgcagcttcaagacccctcccgcctggcgtctctggtctagagcaagagaaggcccccagtaggggtcctcccgcccccccttttgactgcctgcggggggcagagatccccagatctaggtgtgccctccaccaccctgctctcaacccgggatccggaggccgcagcgtcccccaccccccagcgacactgacggttcctgcccaggcccgcagtggcgtgaaggtggcctttacctcctctcgcaggctgggagggggtgcagcccgcgcagctggcccagctgcagcagtcgccgccgccctccattcattaaaaaaaaaaaaaaaaaggcaacaacagcctccactggaacctccacccctctttgtaaaagaacgacggctcctggtggagcttgagccagtcccagcaatcacgggttaagatcttttcccgccccccattcataaaaaaaggagcggagcgcatgcgcgctcagggtctgttgtgcccacccattcatagaatcgcgaacggcacgcgtgcgcactggcgctcccttccctcccattcataaaaaagccattttcccaggcagtggttgcaacatcgccgcggaggtagcgagctgagctgacagcgcggagctggcgctgtggagcgcagggagccttgccggttcctccgaccggcgtctgcgagtacagcggcggctaacctgccccggcttcaggatttacacagacgtggggcgatgcttgtgaccctgcagctcctcaaagtaagtccatggctggtttggagatctgaaactgcccctctctgagccgcgacgcgactccccccttgggctggggcaaatggtgcgctatttctaggcgcgcctcagtgttccttccctcagcctgcgcctccttgagtcgctgcggtgcgccgcagctccctgacgccctcggcccggccggcacggcgccgggggtgttcacagcctggcaccgccgtttccgacccctgggcattgccaagcccggcttccccgccctctgagactcgggaagccccgtgcgtgtcccgggagtttgcctctggcctggcctctttccttctcctgccaccatccgcctcgaacgctggaacgggcgtctctgggcttggtcaggagccaccgtttgggtcggggggcgccctcgctctgggcggctcgcccacctcccagctcggtgcccacggtgccagctttgccgtgtatctcccagcccgccgtagcggcctatgctcgacgtagattttttctttctcttcggagccgtgacggactgaattccctccccttctgcctctccctcgatggtcagcgaggggctggctcaggactgggcattcctactccctctccttggcgaggcggttcctcgccgtctgacctttgctccgctgccgcattttatgctatgcaactgccttgcagttgactttttcttgcctggcctctgtaaggcctgaggctcctcggccaccctgtacctccctatcctcgggcaccgagctgtgccaggccccggagcccccaggccgcgctagggctgcggtgggggttgaaggtgcgtttacataacaccaggcgtgtgggagctggaggaagaggttgcgaatgtaggagagataaggctcctgctttccctccttccttcttggtggtaccaggcttgacatcacagagaagaggatagagacggtatgttctgacaaattctgaatcgccaagaccccggggacagtgagctgggtgagggcgggtttggctagccagggcagctagagcttggctccatcactgggtccagggctgtgcccagttccccctccatgcagacgatcaaaaagcatttagacagtagctgctcttgtgcaagaagacggtttctcaattctccttgattgggggcagggggttgtgggcaggagaggcaggggagacagaaaatggttgcgtggcttatagggctgaaggatgggcaagagaggcgaaatgggctggaggggctagatggtaggcagagtagggagctgctggctgcctctttcaccagctgctggaggggcatccatattgccaaggcctctgtgagggcaggaggccgccttctggcgcagcaaggcttccgtaccccccagcgcggttagtgctggaaagaagagtgtacagtggggtgcccaaacctagtggcatccccttctttcctgcctccaaatcagtggcgtgattctctccagttttgggagaggccagacacactggaggccaaagaacttgcagaggggcgggagcaag

SEQ ID NO: 1881905 - DNA, 4001 bp, Homo sapiens
acattccatataaacctgtgctgggttacagtcctcatgtgacatgaacaggctctaaatcttagtgcagggcaaacaggaatcacctgtcatactgagtacatttaatcaggctctcctaaatattaattttctgctaataagatataagttgaggcattgacaaaggaatttacataaatttcatcagtttcatattgtttatttctaaaaaatgaaaatgatttttccataaaatctgaaaaaatattttgggtgtactagataatgtatagtatattgcagcaatgatgttactagttacattgtatgtaattagtaattaactaagtttttggtttttgttcttgtggcttatcaggattaattagttgtgtacaaatttagttaattcacttattaattgactaattagttaattcattaattactaattacatacaatgcctctgctttaaacttgttggtgctatcccattgtctgtaagattaaagctcaatcaagttcctcaaaatggtttacaagacctattttcacctgctaatttctacctccctaacttcatatctcctttgccttgcatcataatcacaaaaaataccaaattgctagtaattctcagctcatcagccattcctttctttcttaactttggccatgtgcccctctctgcttagaatggctccttctcccttctttgcctgataatttcaatgtatccttaatcagcccctcctaataccacatctccaatcatgcatggtaggtactccttctttatgtcattgctgagtttctatctttatcactatgcagataagtgtaagtattttatatatgaatctctctctctgcaacataggcacttctcaaggtagtgagcagtgtattgttactctttgcatactcagtgccatatcattgccagtgtttggctcatcagagctaacaggaaatgttagctggttgaataaagtattgaatagagaaaagtcatcatctcagataatgaaggtgaaaagtacactataactaattcatggtgataagccacaagaacaaaaaacaaaacattatgtgattacttacttattacacagcttatagtagaaataagatgagaaaatctctatgcagatcatagaaaagaactgaagctggtttgatattactttggttccttgattcaccctcctcttctctacacggcagccatgtcactgtccttttttccctgattctttctctgataatcagatcatcatttcatgaccaccttttttcacagctaactttccttcttctcaacatttatacaattttctgtttatgctactggcttgatatttaagtataaccttgaactcttagatatcttttctgtgtcctgttttttctgttagatcataacctcatgaaaaccaatgaaaccatgtttctgatacatttgctttctctgtaatatctggcagtgactcttatagatggagaatatcttgcaaacatgtaatatattcattatgtgacaacattggagaagaaagagctagaattgagaatcaagagatctgaggaaaaatactaagctttgggaccttgggcaaattatttaacttctgtaatcctcagctttatggtatgtaacagagtggatgcaagaagagcatgagatcatgtctgtatagagcttcatcaactgtgaaatgctcttcaaatagtcagtaattctcttagctcattttctgttgctgtaactgaatacttgagactggataatttataaagaaaataaagttatttctttaccattttggaggctagaaagttcaaggtcgagaggctgcatctgctgagggcctttttgctggtgaaaacattctggagagtcctgaggcattgcagggcatcagtctcttccccgtgaggactttgcataaaaactgttgaattgagtaagacttcacctttttttgtaacacagagctctgacgcaaagagtcattatcaaatcatcccatgaactttaggaagttttttaaatgaaagcagcaccaaaatccagctggatttgggtctcagagcagagggcatacagggaatagtgatactttcagagaaactgagttgaatcttaaagagataataccagtggccaaactgtatcactaaaattgcttctttattaggattttctccctaatctggaaaataataagggccctgacataacttacccagaacattatgtatagttatttgtttaattaaagatgagggaaaatcaattctaccactacatgcaatattttggtagagattgtctgcttaaaaacaaaacacatgcacttcatttggacttactttcaagaaaatattcggaaagaaacttaccaaaagggacataatgttttcttccactacttctaaaaatagtagagctctaaactttcctcttttcttcttccaagataaaagtgttaacagatatatacaagccataggcaggttttgagatttgatgtggttgtttctgtttgtttgttttttaaaatgagagatagaaggggaaagaagagagaaatttggcacttttctcagcagtggtttagtgttgtgccttcttcccattctttggcttatgatttgggaaaggcaaaagcagctagccagaaggacttgacactcaattccattcatagcagcagctgctgcagaccccaggtgagagaaattttcatttctatgctgactctgtattagtccattttcacgctgctataaggaactgcctgaggccagtgcagtggctcacacctctaatcccagcactttgggaggctgaggcaggcagaacacatgaggtcaggagttcgggaccagcctggccaacatgatgaaaccctgtctgtactgaaaatccaaaaaaaaattagccaggcatggtgccacatgcctgtaatcccaactacttgggaggctgacacagcagaatcacttgaatttggcgggaggcagaggttgcagtgagctgagattgcaccactgcactccagcctgggtgacaaagtgagacgccatcaaaaaaaaaaatcctgcctgagactgggtaatttataaaggaaagagtttaattgactcacagtttcacagggctggggaagcctcaggaaacttaccttcatggcagaaagaaaagcaaacatgtccttctcatggcagcagaaaaggggagtgccaagcaaaagagggaaaagcccctttaaaaaccatcagatctcatgagaacttactccctgtcacaaatgagcatgagggtaattgcttccatggttaaattaccttctatcaggtccctcacgtgatatgtggggactatgggaactataattcaaggtgagatttcaatggggacacagagccaaaccatacaattccacccctagaccctcccaaatctcatgcccccatatttcaaaacacaatcatgcccttccaatagccccccaaagttttaattcattccagcattaacccaaaagtcccagtctaaagtctcatctgagacaaggcaagtcctgtccacctctgagcctgcaaaatcaaaagcaagttagttacttccttgatacaaggggcatacaggccttgagtaaatatacccattacaaatgggagaaattggccaaaacaaataggctacaggccccatacaagtccgaaatccaatagggcaattattaaagttccaaaacaatctttgactccatgtgaaaggattcacattcaggtcatgctgatgcaagagatggtctctcatggctttgggcagccctgccactgtggctttgcagggtacagcccccttccagctgctttcaaaggctggagttgagtgtggccctcttctcacagctccactaggcagtgccccagtggggactctgtgtgggggctccaaccctgtatttcccttctgcactgccctagcagaggttctcca

SEQ ID NO: 1881906 - DNA, 4001 bp, Homo sapiens
caaggcatcactggaaagaatattaaatgtggcattgtagctcaaaaaaaaaaagacaactgaactcattgcccatgtcatgttctatattcctgactagactataagctccttaagggcaaacactatgttctgtctaccacaatattaccagcacatgcctagcacagaggaggttctcaaaaaatgcttatagaatcagtgaatatcctatagggtcctcagaataagggaccatcacaaggttaggagaaaatgtcaagaaatccctttctgggaaacagaaattccaggttacccctagtgaattcaaccaactttgaagtttggccaagcctttaaatagcattgcatgatttcaaatttggaatcctgggcagcaatttcccttcctgaagagctgttgcatgttctatgcatagtcatgctttggcttgagtttatgaggaacagaagtttcaaaaaatctgactgagaagtataagctaaaaggctcaagtaccagttatacttttcccagggccagtaagctctcaaagagctcaaatccagggatcaagctctccatcaaggacttggaacataatgttattttatcactttcagaaataataactagagataatttctggttgacataagactcacaacttatccttgagtgaactcttttcgtgtctcagttcctcgaatggaaaacagtcaaataagcacatatacagtcaaaatcttcctccaaatctgtgaggttccctcagtggagtcagtctcattaagtcactgctattcagttcaatagcagtgaattaatccaatttgacctttggattcagataaacctgagattaggctttggctttgacatgtatcagccacgtgaccttgaacagaacatggtagctctcaaagccttagcagccttgtctcttgctgggaagatggtaaatgataatgtgtttaatgtgcttaaaccagtgtcaggcacatgcgaggcagtcagtaaatagtgacttacagtgatatttctgctggcttcacttgcacatttcattcaaaacagttgaaaagtccagtgtgttcatggtgttttaactggcagttgtgatctgaagtcaaccttcaactaagtggattagtttatcaacttccaaattataagcaaaattaatctgaactaaggcaatgaagtgatacaggcatacaaatgaaacatctgtcctgatctctgccttggaaaaattcaaaacactgtaattctattattcttacaaagattattttaaccatttattttaaaaatcagcattgctattgcatcttgactgttctattgtccaaactttctgtatctattttaagacttaaatataaagcatgaaacaggtttaattttgaacatagtgagcagatgaaatatcactcttttcttaaaagagattcttagcaggcattttaaaatccccatcctgtcttgttttcactagatcactggtcagtactcgacagcttcaagccagataatttcaaaggttcaagatgtcagttagatcccactgaccacaggtagatccatttgaattagaaaaattctaacactgacgagagaactctttcctaatgttaggtgtggctaaggatctgtttgagctattggaatatgggcagtagtttataagtatcagaatacaactttctgtgtcccccttctctttgccaggggcagctcgtattgatctggacatgcagcgtaagcaaaataactttatgtcatttaagccactgagattttagggctattcgtttctgcagcatagcctagcctttcctaacaagatatagaatatatataaatgcagttgatatgtgtaacagacatactcacggagccacacacggagtcctcccatcttggtctacaagtaatttccagaagttagtggtttggtgggatagagacaaagctcagaactacagtcaatatcagaataactttaacacactggcagaaagattcagacgcatctcttctatgtcatcatgagagtgagaaacatgattcctaaatctgtattcctggctggaattctcatctgtcaacaggtgtcattgtcaccttgaagagaaccagagcaggctgtctctccctcatcctcgcgcactctcctggtgagttgtagagctggggctgacctcaaactgagaactccttgggatatagcatgtatcccaagtagccctcactctagggaggtttttttttttttttttttatctgtatctcaagtccacaaataagcactcaaggttgatgtcaatctttgacacgtcatctattcccaagccagcctctccatgaaggaatcagtgatcttccaaatgttttcttttcatagctgaaacaaacaataaatattatttattattttagtaagaagcacatgatctaaatcccactagtaataaagataatggccatttgttgagggcttgttatttggcactatgacatatatcattttatttaatcctcgcaacaatttgattaggtagtatattattagagttctccagagaaacagacccaataggatatatatagagatacattaggagatttattatagaattggctcatgcagttacggaggatgagaagttctacagtatgatgtctgcaagctggagaaccaggaaagctggtgctataattcagtctgagtttaaaggcctgagaaatgggagcaggagctcatagtgtaactcagagtatgaggcccaaggccagagaagctggagggtgaagatgcttgctggtgtcagtgtcagagtccaaaagcctgagaatcaaaagcattaatgtccaagggcaggagaagatggatgtcccagtttcagcagagaacaaattcacccttcctctgccctgtcgttctattcagattggacgatgcctgcccacattgatgagggtgaatcttctttcctcagtctactgatgtaaatgctgatctcttccagaaatatcctaacagacacacccagaaataatgtgctgccagctatttgggcatgccttagcccagtcaagtggatagatacatcatcggtaggtactgtgatttccttttttacagatcaaaaaaccaaaccttaaagtggtcaagtaacttgcttaaggtcaaccagcctagaagtgggaaaaattatgcaaactcaaaaactgttctttgcaaggaggcccgccttattccccctcctggccatatattatatctcaatctccacacccaagatataaaccctggagttttccttgtcttcattctgttgccagtgacttgattacatcatttctggtctgacaccagtagggctccagtatgttcccggggagaactgggcccccaacacctgctaatttcttcctgcctttgcagaggagagcctgggaacttaacctaagaaaaaaactaaacaaagtgatccaaggagaaaaaaaaccctgggatgaagaaaagttattttcctctttgataattctgtgtaactagtaactatggaagagaaaactgatctacgggtttgttagaaactctggggcctgaggcggaaatagacactgtgagaccgagaagggggtggaaccagaggctacagccaggaaacaaaagacaggaaacaggatttctttttgccaatgtccaaaacaaagctgatggggagtttggcaggaagagggaccaccatttcatacttccagtggaaaaaggactaaatgctcaaaattgaagatatgtgggaagggatgagtcatggagaaacggtgatacataatcttctctttctgagaacagtcacttaatattcctgcttggcattcttttattatttgacagcagtccttgtgcctctctatgggaagccaggaaggggccagaatcatctcatgctgcttagtatgggacgcacaactgggaagctgcactctcttctcctcccct

SEQ ID NO: 1881907 - DNA, 4001 bp, Homo sapiens
aaagtagagctaccatttgatccagcaatcccattattgggtatctgcccagaggaaaagaagtcattatataagaaagacacttgcacacgatatttataacagcacaatttgtatttgcaaaactatggaaccagcctaaatgcccatcagccaacaagtggataaagaaaagtggtgtttatattactatgtacactatagaatactactcagccataaaaaggaacaaaataatggcattcgtggcaacctggatcaggttggagaccattattctttttttttttttttttgagacagagtctagctctgcctcccaggctggagtgcactggcgtgatctcggctcactgcaaactctgcctcctgggttcacaccattctcctgcctcagcctcccaagtagctgggactacaggcgaccaccaccatgcctggctaactttttgtattttcagtagagacagcgtttcaccatgttagccaggatggtcttgatctcctggcctcgtgatccatctgccttggcctccgaaagtgctgggattacaggtgtgagccaccgtgcctggcctggagaccgttactctaagtgaagtaactcaggaatggaaaaccaaatattatatgatctcatttttaagtgggagctaagctatgaggacacaaaggcataagaatgatataatggactttggggatttgggggaagggtaggagggggtgagggataaaagactacacattgggtacagtgtacactgcttgggtgatgagggcaccaaaatctcagaagtcaccactaaagaacttactcatgtaaccaagaaccacctgttcccctaaaactattgaaataaaaataataaataaataaataaaaataccccacaagagttatttagtggagtaggaataggcaaacgtttttcacgaagggccagataatgaatattttagactttgcaggccatgtggtttctgatgtaactattcacctctgccatttgtagcacaatagtgtcactgaaaatatgcaaatgaataaatgtgatgtgtttcaaaaaaaacacaaaacatttgtatataattttttaaaaagtcgtgatgggggttattactttttgttagtttgtatcattaatttatactaaatgagtttttactttagaagacctttctttttaattccgaagttaaagtaattcaatcaaactagatgactagtccccttaacttgcatcccagttgtctgtaagtttaaaaagcatgtttattcacctctcaatcaggagtaataaatgccctggcagctaaaaagccattgtgtttagaatttgccaagtgcaggccctggcacctttatgaggaagtacattccagaatcaagtgccctgcacccagctgcctgcttccccacccagaggaggtcagcatcagggcaggcagccagagcattcctgcaagtctaaactgcctcagaggagcttgggtaaagccagaaaagggacggcaggaggaaaaagtgccctcctgttacaaccctctctctgacaagttcttggcaactcacacagttggattcctgtcaaaggagatcgtctctgctgtaagtaggcaatgaagacagaatatttggatataattcataattagctataagaaaagtaatgggtgaagccatttgggatggatacacaaggctttgattatctgatgcagcattttaagttcttaaaaatatctcactgaacacacaaatacttgcagcataatctttgaactattgcaaagcaagataagatgacatttttggcattcccattctgcctctgtggaaggggctgcaaacagagtgcataaggggttgtgaaaatgatttctgagaggatggtttgtgcacagtgtgcaagaggacagctacttaccgcttggaccaagccagttgtttctgtgcagcggagtggacctagtgttgatgtatcttccagtgtttcaagagaagtacaaaatctggatgttcatgtgaacttcctagaatttgaaatactagcaattaattttattataagaagactttgtgtgctaagttaaacatttctgatcaacagatttggcttgagggctgcttccctggaaactctgtcccttgacagagctggtgtgagtggttgatctaccatgtgacaggtgactccatctgccctggggctcacactatgtttctgcagcatcctcagcaatcacgactatgtttgattcaaacactccattactccagacgtgagcactttgtagttagtaggtcagtgggccaactccaggggatgatggtgccacacagctctggaccccccatagtgaatgattcccctgagggtagctaaccagcatctattgttgacccaaggtaggtgcagtcaaagcagggaagacagagaaattattcgatataatgaagtacagtttcatttgatgaagtatagctctgggctgctaagaaatagcaatgtcaaaacaatagttatttattgaacacttcctctgattggcacattgtgtcagatgcaagtcagcagaacctcagtgtggcttgtggcagtcaaatctgtgttttgaaggcagaggaaaggtgagttatctgaatagagacggatgtatcagtgcgatccagtaagctggatcctggtactttgctggttcagcttcagtaatccatgtactagacatgtaatattataaagtcacttagccagcttgagccttgatttcttcatctgtcagatgagttgctgtcatggggatgtgtctgaaatgggctgagtatcttgtcagaacttgtagaggcttggtacactttagtttccttctcctaaaccaaaaggatgtctttctattcacagtgtggaccactgtgaatccatctgtcaatgtctgaggtatattcgctgtaatggcatgaacttcatatacaaaggatgatgttattatgttgaggtgctgtgggcttttgagagtgaggggtaaggagaggccattcaagtacagtgagaggggcttggaaaggaaattggacactctcacttaaatctagaacattcagtataaatcgagtgtgaagaactgggccagtcagagcatactatgtgaaggtttcttctgtcctgcctgcctacagattttagcaccccagggcagctgttgggagcagtatcaggatcacagagttaggaagtgtctttcttactatgtttctactcttcagagtagcatttagtccaagccttttttttttttttcattgtggtaaaaccataacattaaatttaccatcttaagcattttaagagtaagttcaatagtattaaatatattcacattgttgtacaaccaatctctagagtgttttcatcttatgactctgaaactataccccgtaaacaccaattaccccttcctgctctccccagctcttggtgatcgtctttctactttgtttctatgattttgactactttagtacttcatataaatggaatcatctagtatttgttcaagccatttttcttctctgatttttttttttacaccaacatctctaccctcctctcctccccacctcagatcttcactgctctccagccctcttgggattttctatgactatgaattggaaagaacaaacttcttacagtgtgttcattaacagtgatgacattgtgtgataattttaaagttcacacagttaatcattccatcttctatgtaaggtggtttcccctatttgaagtaattagctgccaggcctacctgagtgcatttttcatgttaagcagacaataggaacagagaagacaaagaaaaggcaaagctgaaagggctcccagaggggaagcaaaattgttgaatgaggagcgcacagaagctgtggctctggatcagggaattcaaaagcaagtccccaatctctgagtttgtccaggaagatattagatcaa

SEQ ID NO: 1881908 - DNA, 4001 bp, Homo sapiens
catatgtggcgtaagtgattgatgcattttcttgaacatttggagagaaaatgttaagcaattaaacttgtaaccaatttaagattttttttagtacatgtgactgtattatgaagaacaatgcaaaatttggagcaatttacaagaagatggaacagttcaagtaaatttgcccatgacactagtgacttcaggctcttttatgtatgcaacctaagtgatgaatagggaagtacgtgtttatggaatctgtcattggtggtatttcagtgggaaaatgtgaaaagctctgattttgaagggttgccagagaaagaggaacaggcagaggaaactgaaagaagaattttttttttttttttttttttttgagacggagtctcactctgtggcccaggctggagtgcagtggcgcgatctcggctcactgcaagctccgcctcccgggttcaagccattctcctgcctcaccctcccaagtagctgggactacaggcagctgccaccactcccggctaattttttgtattttttagtagagacggggtttcaccgtgttagccaggatggtctcgatctcctgacctcgtgattcacccgcctcggcctcccaacaggcctgaaagaattttaacaagcaggatgagcataaaggcaaagtggggttgtcaacatcaaggaaacagagtgttgggaaacaatggtcgactttgtcaatcgccaaagagactcccaggaaaaatgagggcaacaaaagtatcagttggatttaggaggccactgcttacccaaagagttcaggtagaattgttgggaggtgcagtggttggagaatcaactccgtgaataatgaattgtgttgacacggtacataatacggtatttctgactacattggcggcatttcactaagtaattactacctgaagtgcctaccttcagtaaggcatcctgttgttggatggggaaagagaaggaggaaataactcttagctttacctgtactgtgcttctgagacccaggtatggaccttcactcccaatttactatccatggtctcatccgatgttcagtaactgggttctcctttggcagggagtagggattgcctgagaattaaaaggggaggggagatttctgaactggacctcttaggttatgactagattgggtgcctgaggcagcaatggggctttataaggcttctttacgcttcatttaactaattgcttttttgttctctcttattcagtggagttccaatctgttcggttgtggagaacgaacctgagaaaaaggatctttcgcagggtagtttttgggggcagaggctgatgtgctgcaccccctaatcaggggtatggttggctgcagtagtcaagtgagagggccgcaaagggaaaggaaaagtcgagactatcttagggaaccaggagagtcgctgtacctctgaaagatctacggtttgtctggtctgtaaggagcaaacacggtggaattcctttccagatttttctgggcctcgacctctggcttttggggtacatgccaaaaaaaaaaaaaaaaaaaaaagcgcagggagagtccactagcctcggtgacagttccccattgcggtttcccctcctccacccttctttgcgagctccttccctctgcagagagttatcccgccacattaacccctgactcacagctggaccgccccggcccgcagcgccacgtcccgggtggggcctgccacggcaaagcagcagtccggcctcgagcggcccctcgggggcggcggggtgggcgccaacagcagtcaggcctgacaagcggcgacctccaagggtgaggcctctgcgggcccccgactcacgcgcgtccgggctctgcaagcgcggtggggagcaggctgctgtggtcgcggggactgggttgcggcgcgccgcgtacgggacggccccaaactctcgacgcccggggcaagacgcccaccccctgggcgctctcgctgggccagaaaggaagacagaaaagccgcgggctgactgtggtggcgctcgcctgcaggcaagtaccgggcgctagggcgggggccgccgccgggggcgcggggtgggctggggccaggccgccaggggcgcggggtggtctgggggccaggccgcctgcgctacctccccagcctacccgacccgacggcgcgggtgctggcgctgttgtccccagcggggcgggcaggcctttccgtcacttggcttactctgaagggaaaatccacacagctgtctgcctttttgtttcattttgactagaaaacccattttcgaaaagacacctcagaaccataagcaaatagcccagagtcttaaatgctctaaaggctctgcatgagcccctgccaggcacacagagccagtgctggaggttttggcatgggttttcctacttggctttttgtgcaaagctaatttggataaaaataatttgactggcagctgtgagctagttttcagtgtattaggacctctccagctttccacggtagtaaacttcttaaagaaagtattttaaaatattctcatatttattattattttttaatttatccttttaattttgaaaagcaagggtgggaaaggctatatgatctggaggtaaaaatacaccattatatagagttgaagtgtcatcccctgaacccacattgcacgtctacacaggagaagaacttgtccttctccaagtgtttagtattccttagattagtgtttttcaaacaagcctgatggtaagacgcatttgggacttttgtttaaaatgcatccccccacctctgaaggtttaatttggtaagcttgatttccagaatctgtatttctatttttttattgtttaatttaattttatgttctgggatacatgtgcaggacttgcaggtttgttacatagataaacgtgtgccatggtggtttgctgcacctatcagcccatcaatccttacattttaatattttgaagtagtaggatggttataaatggagttaagcaactccactttatatctcattcaaatcagaaaatagataagcaggtatagaatattgacacctacatttgaagcaaagtaaatgtgacatgtacgccttaccgtatggaacttgaagtataaaccatgtttacactgttgaatcatgggcatctgtgttgagtcatttgttccttatgctattcttaaaatgtattcatttaacaaatatctgctgttaaatcttctgtctttaatcccccctagaccacacatcccattctaggtcccgctcccctactttgcttctttttataacaaacaaaaatcctctttgaaagatttaatctaagtctccattttcattttccctgtttcttcctaccccctctcatctgaggctttttgtccccattaccccctgcatggtcctgatgttgccaatgactgtcttgtgaaatccagtgtctgtgcacagttctcatctttcctgacccctcagtaacatttgatcactccctcctcaatattcttttttcttcactaatgttcttcactaatattctttcttcttcacttggcttccaggtcaccatattctgcatttcattctgcttcattgtgtctccaggcttccccaccactaaatcttagtatgccacagagttcatttcttggccatatttttctagccatactttcccccaggacaatttgtatcccaagccatattccttggctataaataatatctatcagctgatgacttccaaaattttattcctagctttagttcgcttctgagctccagatgtatgtgtatgtccagctgtttactcagcatctccacttggaagtctgataggcatttaaatttagtatggacagatagaactactgatgccagattcaccaagttctccctctgtttcccctcagctccctcccttatctcaataaacagcctcagttactgccattcaa

SEQ ID NO: 1881909 - DNA, 4001 bp, Homo sapiens
accttcttccaacacaaatgatgataattcgtcattaaattaggatttcaaaaaaagttgtttaagaagaaaaaaagattgtctcaaactgaatgtttcttagtataaaactccattttctcactaaataccggattaatgctgtttaaattgcattgctggaatgagtcggggaggggagaattaatgaacttctactaagcaaaaatgttcatcagctggagaagatctaaattaatgaggaagaaacactaaaaaacagtcatggcaggccagctttctctagaattatattattaacaaaatgcaatgaaacggcaattggtttgaagtggagaacaaagaacaatcaaggagaaatgcagtggcctgtttcattcatagcatccccgaaatgtagagtgggaaggaaaccctggtgagtttatccttgataagtaaccaaaataatactaagagcaactgttaaggattttacgtatattatctcatttaaccctcacaatccagtagtgtaagctctgtctccatttcaccgctaaggcaagtacatccagagatgtttacttcttgcccacacagcacagccagtatttaaacccagatttaacatcaaatcctgttcccacaacctccacaccacatactgctttactttggctagcctctggttgaatatctcagctgccaggagatttactacctcacaaggtggcccaattcagcatcttcccgaattgaatattcctccttgtaactttgtccaaaagacctccaggggtgtccaagggagaaaatacaattatgggttcttagtttctgattctggttaggccaccaaaacccctccctcatccctctttttcacttatcactagagacagaaactaaaaaccatggctttcaggctgctaaaagtctaaaacaaaacaaaacagaacaacaataaaaataaggcaggttgggcaagcttgatagactctgaccccacctccactcacccacagtgtgttccatcatctcctccttccctatggcagcccttcagaagtttaaagtcattgatcaccgtgaacattcttacctccaggggaaaagcctctctcatccttttccttgttctccatatggcaaggtcttcagctccttcctctcttactcacattcttcagaacacactcaggtttgacaatgagattcttagagaactgaacccatatttccaagtgtatcccagccagaagagaatgcagaaggaccatctcctcccttattctaggcttgctacttctgttaatgcactccaagagcggctcatctgtatcagcagccgggtcacatattggcttatgatggacttgctcccaaatagctaggacctctctagatatttttcacacatggccttcttagctagtgtgtgatcagctgaattgttcaacaattagttggttctaagcagaatgcaattaaatagatcccaccagacaaaaccaccaaagaaaactccagtgttctatcccactcgaaatccttttttcttcatgaagtgactgttatcagttggtccaacaggaatagaacatcctgttcaccaataaaataatcactgctccttataagccctgaggcctttgttttatcaatcatttccatgtcagtaacaaaaactaccattttaagcactgactatgagatacgctccaggcaagttgattaccctaacacttaatgataatcctacacgttcagcattataatttcctttttccggatgaagaaactgagccacagaggagtttagtgacctgctcaagggttcacaactgtcttaacctttttttttcctgtcagtgccaggtgtattagtccgttttcacgctgctaagaaagacatacccaagactgggtaatttatgcaggaaagaggtttaatggactcacagttccacatggctggggaggcctcacaatcacggtggaaggtgaggagcaagttacatcttacgctgctggcagaaggcaaagagagatcttgtgcaggaaaactcccccttataaaaccatcagatctcatgagacttattcactatcacgagaacagcacagaaaagacacgccccatgattcaattacctcccaccgggtccctcccacaacatgtgggaattgtgggagctacaattccagatgagctttgggtggggacagggctgagattcaaacccatctttggtactggatccaaagctcacactttttcccccacaacacaatgtcttccaagtccaaaacttcctgcattggcccatactgggctgacaagtttctatctacttacgtaacttcttatttgattgtcacaaacaccctaggatttggggacaggataaactaaaggacttgtgcaagtcccaagggctggtcttctttccgagttctcactggttattctcttcttgtcctgcatccaggcacagaggcccctcattctgccttgttaatctatgttcttgtttcttgccgaggatctcagagctcagagggcctctgcaggtcagagggttggaaagggccaagttactcccctgcagagaaaaccaatcaatcttatgtcgacccacctgctctcaaaaagagcagctgatcagccacagctgataaaaaggaggtgatttaaaggtcaaatgaaggctggatgtctatctgccctccttttgtgacaaatgtatctgagatgtgagcacagtgagatggtgttattttaagatgggtggcttatcaggaagactgaattcacccagcctgtgtcagctccattttataaaatgcagtgtccaggagttacaaaaggtaaagcaatggggtgaaatgagcactggaataggagtgtttttccagaatacatatcaaggcttggcaccagctactggtctttgggcctactgcttgagccctttgagtctgatgtggttcatctttaaaatgagattatacaagccaccatcataacaatgctatgataagaaagcagaattgcctcttggattcctagtctcgtgttgtactatacaagagatgcaagaaccctcagaaagcagctagcaaagctggttataattagtgtaatcctataatctcctccaatcccctagcaatcaccagcacctctctgaaacctcagttcaccaggatatagtctaaagaccagctacctaacagtccatttttgaaatgggaaaactgaggcccagagaagtgaagtgactcaaagccttgaagtgagtttattacagaatcaagactagaatgcaggactcatagttccagtttagtgcacttttatttatttttttcgacagggtctcactctgtcacccaggccaaagcatagtggttgatcacagctcactgcagcctcaaccttccaggctccagcgatcctcccacctcagcttcctgagtagctgggactacaagcatgtgccaccacatccagctaatttttttttatttttttctttgtacagtcaggctctcattatgttgcccaagctacaatttctaatatgacatgctagtatggcttgttcctctttccatgtgtaactatatgtgtataatatacaatgttctacaaagtaactttcaaactccttagatccctaagactccaaaaatgtgacagtgacaagaaaaggcaggattcttacctctgctccaatcaaggcaagtctgtgtttttccctaaaatctgttaatagtgtcagctaacatttattgagcacttaataccaggttatatgtgagtatttttaatgtgcatcatcgtacttaatactcccaagagactgtgaggtagctgttagtctttttcccattatagagatgaggaaactgagggtgagaaaggttaagtcgcttgttcaaagccatccagcaggaagtggagcaggagtcacacccaggtagacttacccacagggcctttaccagcaacc

SEQ ID NO: 1881910 - DNA, 4001 bp, Homo sapiens
agaaggaactggagatattcaagagacaaggagactttctctgtgtgctcccagaaccagaatccctacttagtccctgccagattccagctggatgtggcctctctctaggggcaagagacagccagtgggaatcctgggaaagtagttccttctcttttggctccaactcactcccagcctgactacatgtgtgcaactgggacatgcaccccctgccggtgttggatttggagtctctcaggtactgcccatggtgcaagttgaagataggtcctaggagaggatgagctgcctgcttgtggttgccattgatgaggagataccaaatggttaacggacttgcctacctaagccatcaggtctgtggagagaagcgcagtgaacccagtagcaacaaatacttacctacagaacactgtccccatcatgaccctaggaaggcttttaccttcttctctttataaagaaggacatgtaggcttggagaggttcaacagcttacccacagttctgcagctgccaaacaacagagccagaatgagtgaatcatgactgctcccttgaactgcctagttcacccacaggtgccacactaagacccaggctattcttctttgcatgacattatacaactccttcttttcttattaagcttgggtgcatttgactgcccaaactctaactaaaagttattttatgtttcacatggaacactaatgaacataggtgtgtttaaaattatcagagctttgaggaaggtggcaaaaatgactcatttctcacctctatctacaaatggcaggggtggtactttggggctttggagtgaagtgaaatcacagttgcaaaattcagaggtgttggcttacaaccagggaactggttaatgcccactccaaaccagaaagttccacagcccctactccttctcacagatgagacatgtaggtcaaatcaaaacttagctctggtgttaccttgttctcatgggagaatttcagggggcagataaagcatgggttttaggatccttgggatacaacataagaactacacattactaaatactttctacatgccttttccttggcatgaattatctcattgaatttgtacaccacacttaggaagtgaagacttttcgtaggcccattttatagatgaggagactaaagttaaagtagatgaagtaacttattcaagttatgtgaccccagagcttaagaggataactgttagaaatattctctcttccactttgattacctttgtgatggctaatactgagtgtcaacttgattggattgaaggatgcaaagtattgatcgtgggtgtgtctgtgagggtgttgccagaggagattaacatttgagtcagtgggctgggaaaggcatacccacccttaatctgggtgggcaccatctaatccacctgccagcatggccaggatataagcaggcagaaaaacatgaaaaggctagactggcctagcctttcagcctacatctttctcctgtgctggttgcttcctgccgttgaacatcagactccaagttcttcagctttgggtcttggactgacttccttgcttcttagcttgcagatggcttactgtgggaccttgtgatcacgtgagttaatactactgaatggactcctatatatatatatatatacacactcatgcaatcatatatatatatttatatatatcataaatcatatataatcatatgtttatataaatcataaatatatatatttatgactgtgtgggtgtatatacatatggatacatatatacatatacatatacatatatatatatatacacacacacacacatgtatcctactagttctgtccctctagagcaccctgactaatacaacgttacattacacgtacctgttacactggatggagtacttgtggtctgtggtctaaagggaaacctgattctgccctgtttctcaggctcttgaaccttggcctctgaggccgtgggagtcctgaagagggagctcactcagccccaagaggaaggaagaacctcatcatttccccaaatggagcctcccacttcctcacctccaaatggatttggaagaactcctgggtttgtttggcttggaattaagggtctgaaagatagaaaatgatttgggggctgtataatttcgagtctggtcaggggccccccactgtgggtagaatatatttttaaaggccaactctgactgactgggtggaaccttcagttctttctgtggctaaaggaaaagctttgtgagctagaactagccacgcaggaatatgatgtcaggtgcagtttcccccacagggcaaaattgtaatgcagaacatgggattcagtcaaatatatccacttctacaacttgcctggagttcagggctaaacatgaagacaagcagcctctaagttttctctccaaatcatggtgcagcattttggaagtgagctaatctttagagacagatgatttgataaatgcaatctctttattttgttcattttacaactgaggatactgagatgtgggggcttggcttttccagggtcattccttgagtgacaggtctgggacttgaacccatgtctctttaactcccttgtccaaatcccaacagttgcttatgtccaatggctcactcatgcctttgtgtgcttgatgctctcgcctagctcagggacattgggcaaatccatcctcatagtctctcttctcagaagagaatatgatgttcgggctgttgtgtaggcttaaaaaatgattagtgtctcataggtgggcgttgaaacacctagttccctgcttccatgaaaataaaacagaaacttctcttgttgcaaatctttccaaaaatgtgcagccacatccatgccttagtaagtagagtttaatgagcataacattttcacattattcaaggtgcacaatacctcaaggtcatcatcctagaggtctctgtgtgcagcttataagttataacctagtttgacatttttaattgagttgtcatttgatttttttgtgtttataaaagtagaaagtaaaatatctggttaattgagaggtatgggtttgttaaatccttctgattagttgaggtcttttcacagtatatggactgctcaatctttgtcctaccagcctcctcagacaagttgcaaagaatatttattgacatagactttttgatatttataaaaatactgtgcattctctttagccgaggccatgtccatcgtaaatcaaacaggaaaaagataaaacacctaagagactgacacctagcctagaatatgaatctccctgactctccagcatgctctcatcttttgtcaggttctgagaggctgacggaatcaggcagaaaaggattttgacctcttcccagaccgggtctgctgtggtgcccagtgttgctggccctgcccaggagacctgagagctgcctggcattacttcagcttctcaagtttccatatggacagcagttccagtgggagggatcggacacctgtttttctccctcacaggcaatcaggttcctcagtctgtagaaaggcactgcctctctagctccctgtatcctcctctctgtgcccggtgattgtctcataaatcagagcttttgtcttccttcctttaatcaaatagaacatcaacaattaaatgtattcttaatgtaatcactcttttcttgttaggccccgggaagcaagtctccttaagatgtctgttattgtttttccaggcttgttttcagggaagggacagaggccttttcaagctaggttaagtaaaggggaattcatgttgagatggatgtggagcaatgaaaaaggccagaggctcctggaaatcctagaacagaaagcaaggtatagctgggtcacctgaaactagaagaggattcaagggagcagggggcaggggctctagcagccatggccggagattctagaagat

SEQ ID NO: 1881911 - DNA, 4001 bp, Homo sapiens
ctccaaactattattctttgaaactgactatctggagtgatgtgaacccctctaccaccactgttgggttgatatcaggaagcacagagtccacaggctttcatctagccaggaaaaaggaaacagagcttattttgaacaggaaggaaaaaagatatgtgatgaaagtcaaagaaacaagctgcctaaatccttgacaaagtagagatgaaaggaatgagcttgtgaaataatgtggatacctaaaaatcatgtttcaatcatgtttttaattgtccattctatccagaacgtttgttgcaaagtctaaaaccttcctttacaatgaaaagagaaaataccgttctaaggcatgcatctataaaacggtatttctcaggcactaaggaaaatgcaagctctagaaaaggagtgatgtgggagaggcacacatggcttcaactgtgacagctgtctccccatgcaaccaaatcagagactgctggtgcaagtggggacctcagaagtcactgggtccaaccctgactttttatagatgacaggcttaaaactgttaagtaacgtgcccaaggtcatgcttggggttgtattgtctgaataacaaatggcaaatggacaaaaacaaaagagatcatagtctaagttactcaaagactttctataaggaaaatggtggtaattatggtccctaagtccacttatctaccaaagcttaatataagacatccaagaaatatatatagatacatatataatctatatatgtatgattgtgtgtgtatacatatatgtatagatatgtatatgtgtgtgtatatatatatatatacacacacacacatttcctaaagcaggaattttttttttaaatcagatattctgtgagacatacttgctttattcagtatcagtttagggtttctcactcagttgttctttctagaaaggatatttgtaaagtccaggatttattctcaaggagtaaaagcaaaaccaaacatttgtgtccctttcatttgaatctcatgtcgagtctgtaagtgcaaaagcacttacatatcagtcaaccaaattcttactgtcaaatctagatgtacagagcttgcaatagagaaatgtagatactttctagtttctctgcattctaccatcttaccccaggagctcaaaaatgactctacccttttctggaaaatagtacaaaggaaaattcctgggttgtttggcttctcatagtcccagaacttgggctatatctgaaagttccagttgacatctgtccagcactgaacactggctccaattcacaagatggcctacccaagactaatctccatctacaagtacccttggaagatgggatggactccatacaggccagaggctgtgcatgctccctgcaaatcttggaacttcacccaggaaacattaaggtggacattcaaaatggtaaaaagactccttctggcctaagcatcccctcacacacctctcaatgccataacttacccataaaacaatcagagttcaagacgataattatttccctaaggccaagttcactatgatctggtctccaagaacttctcgttattatcaactactgtgggccaatcccaactatataatctttataagtgttatattcattcatatttctataagtaatatatcttcttattgcctgcaccctgggcaaattgccttcatatttcccactcccaccccagcctggagaaataggcaacattcaaattgttctctcagccctcatccctctaatgatcaccaacaaaatcctacctgcaaccaggactctcacttcggagtatagtttctgagataaatcaaaatttttcttctccttcttcccatcctttcttggtcttcatttcatacagataatagcatgtagaaaaaacatgaaaggaaaagtgatattcactgaagagcaactcaaggcatatgtgtggacacagggagaggcaacccctcccaatcgggtgggtgtgggtgataggtcatgtgtgtataacctcagatctttgttagcaccagcagctggaacacacttctctctacaaatagcaggctcctggagtttctcagcatcagcaacaagagaacctgtcaaagaagtgggccggagatatcgccctgcttctcatacacataactgaaaaaaaagcaaaagaaaaatatcatttcactgccagcctagtttgagtctatatatatatatatatatatatatatatatagtatatatatatatatatatatatactatatatatatatatatatatatatatatatagactcatatatatatatatggggggcaattatgtgtaccggactacagtactggccagaccccatgaacacctaaggatgaatgaggcccagccccgccctcacggatataacaatttagacagaaagatttacataaacgttcatatgactagctacaaattcctaagccaatgtccaaattaatgtaccaagaacaaccctaaaatagaataatttttattttttcttttaaataaatattccacgtgaaagctatctatttcaaaacacttgccataataaggcaacacattctaattcacagttctgtttttcaagttttgaatctcattgtaactgctttctgagtagttgcgcaaggaggggggaaaacaggagtggggaagggaggagtattttctccctaaaattgtttagaattatagacttgtgatggtaatacaaaagacactgtatcttaatcagttctatttctttaaacatttctatagacaatatatcttcttattgcctgcaccctgggtaaactgccttcatatcccccgctgcccagcctctgcctgccactgtttctgaagggtgtattcatcccaataggctcaatgatgtccaatctattcttttcaccagatgcagagtcaaatctaatgaataaaacagagggtcaagcctggcaatactactatagggcagaaagcaagtatggctttacactgagagtgtggttgtcaaatgctgcccctgacagcaataccaccagaagaatcacttcaatgttttaagcaaaaacagaattgttgaaataggtgtataatctcctatgttaatctaggcagaccatgaacaaaagactgcaaaatctcagtgatacaatgcaaaaaaaaaaaaaatcaatttctcacccctgctgtatttttcacatggattatcacaaggactctactccttgtgatatcgcacaggtctaggctgacacaagccccatctcaacatttgcttccatgatggtggtggcagtgtaagtggatcttttaaagctttctcctgggagtgacacaagtcacgtctgctcacattccattagttaaataaagtcacatggcatacccaacttccacagtgttggaggagtagaaccgtgccaggtttttggcaggagaaaggccagaatattggtgggtagcctctgactaacgcctcccatgtattatcattccttaaagaggccaagaatcatttgcatgtaaattttggaaaattagttttaaaaaacatcctcactattatatggtcactaccatgtgttagatttctttacatgccagagctacaacacagttgaagaagccatttatttttatttttatttatttatttttttacccaggctggagagcagtgttttcatctgggctcactgcaacctccgcctcccagtctcaagcaattctgctgcctcagcctcgaggtacctgggactacaggtacacaccaatacgcctggctaattttttttttttttttttttttggttgagctgagattttgccatattgcccaggctattcttggactcctaggctcgagtgatccacccaccttggcctcccaaagtgctaggattacaggcggaagccaccacacccagcctcaagaagccatcttaatgcttgtggttca

SEQ ID NO: 1881912 - DNA, 4001 bp, Homo sapiens
cctggatcttccagaaagatacacacccctgctgacaccttgattttagctcagtgagaactgtgttggattgcttgcctacaaaactgtaagataacaaatgtgtgttgttttaagccactaaatttgtgataatttgtcacataatagaaaactaacacagagccctttccaaatcgcacatttatgagcaaaatgaattatagttcaaaaaccaccgtgtttggggttgatttgttcctccgtgatagacaactagaacaataaaattaagctcaggataattaatctttccaagtgacccaaaaagttcaattccttggctgtggtatgacatttttcgctgtgaaaaccttcatggtcaaaatgtcaccagccattcccccccgcaggcttcctggacatcacttgtctccttgccaccccctgaatctgctctcccaggggtttcaagtgctctctttgcatcaaaccccacgtggtcatttctctgtcctcattctcagtggtgacattgttgaccaccacttctctttctttctccaagaagaggttcttacacacaccattatttcaatgtcaacacattaaaatccaaacatatcattcttaaaaataatgactacttaaaaagttaatagtacacaatggcaaaattaacaactttttagtaggctgtcaaacatttttatgaatgcctaagcctcttgttttaacttacttgaagatgtttcacagatttaattttctatgtttaagtatcttttttcagtggaaccataaatgcccttttaaattagtggcagtgaaagtagttatcctggaaataattgtattgagcaatgaagttttacaacaaagctattttaatcagctgaaataacactcttctctggtcattatattactagagaaggagagttacattttcaggcagggataagatcacttcagttcttcaaaaggaactttcgtagtaagtcttcccacaaagtctccaaagtaaagtgataattcactggaaaataggatcattctccttcattcctcctcatttgttgaagaccaccatttcttgatgtttttaaagattgatgatttaaagaaagtccgtttctcctgagtgaaaccagtgagagatatttcaaatcttagagaaactccctctggcctaccaatccaaacatagattaggtgcaagcatgtttaactttagaatataatgaaccaagtagccttttgactcaaatctctgtgatactcccagaagtgtagctgtgagtcagaagagatagcagggaaaatatatcacaaggtgctatttgtttctaaaaagataaacataaaatataaaatgtgtgttttatggtgctgtgtggtatctacaacatggtcccatttttgtttcatgtatataagccttacggtaataagtctggaaggacatcatccagatcattagcagtggttatccttccatataataaagacctttgcaccaaatattgagtgtttataaatattgctcaaatatgaagcaaacatgaatgtatttccctgtaaaccaagtctcaattgaatttttgtgttcttattgcaattttaccaaataaggagaattgatacagtgtgaatcaaaaataaaacaaaaagaggatttgaaactaggctttcattattaggaaagtaaaaaggacttccaagaacacttggggaaacctatcaatatacaaagataaaaaagtcactgggtgacagagtaactggtctgtttccctacgggctgcaggagtgagctaataaggatacaaattattctgttgggctccaaaaaaaaaaaaaaaaagaaaagaaaactgtgaaggtataaaataactctaccagttagcactctgtagtaaatgatggaaaatccaactcaaacttgcctggttaattagagaaatatattggttcatgtagttgaaggctcaaggactaagcttcaggcataacttgattcaggggcttatgcaatgctatatgaggtcagttaatctccaagttttgattttgtcattctctgagtgttggcttcatcctgaggctgtctcccattgtgacagtagcagtgtcaagcctcatgtccttacatcactggattctgtggaaatgtgaatgctcttcttactcaggagcccagccaaggtctccccatgtctccctgtctctgattgggttagatgcccatcatcaaccccattacttaaccagaagaatgggatatgctaattggttctcccagtttctcccggacactgaggaaacagtcacacgcatacaaatatggcagaacatagcggggtagtttcccaagggaaatttaatgtattagaaagtgtgaatgtttgttaggcaatagtgtccactataataaactggtatcagatgttagtacgagactttttttattgttacatgatattttataaatttacggggtatatgtgctatttcattataagcatagaatgtcagaatatttaggatatccattacttcgagcatttatgatttctatgtgttgagaacatttcaagacctctcttctagctattttgagatatgcaatacattgttgataactagtcaccctactctgctaactaacattagaaattattccttctatctaactgtaggtttgtatccgttaaccaacctctcttcatctccccttgccacacacacacacccttcccagcctctgataattatcattatctctccctccacaagatcaaattttttagctcctgcgtgtgagtgagaacatggtatttgtctttctgtgcctggcttatttcacttaacatagtgacttccagtgccatccatgttgctgcaaatgacaggattttattcttattatggcagaatagtattccatagtatatataatatatatcatcacatatatatcatatatatatatatgtgtgtatcatcacattttctttatccatttgtccatcctggacccttaggctgattccagatctttgctactgtgaattgtgctacaataaacatggaagtgcaggcatctctttcatatactgattttatttccttcagataaatacccagtagtgggattgctgggatcatatggatagttctatttttagttatttgagaaaacctcatactgtcttccataatggctaaactaatttacattccaatagtgcacaagagtagtaaaagacattttgagtattgtttgtatatgtgtaaatgagaagtaaagtcatttaggtttataagatggtctgatatgcaagtataaaaaatattcagcccagccactttgatacctaatgagataatgattttgttctctttcattctctgtgtgtttttttcaactttgtctcccacaacatccatccatgcagactttgctgtagcctcatccattggcttatctggattgcttacttctatatcttgatcttcccaattcctagtgcctggaatgtcccttcccctcttcattctctaatatctaaattctccttttccaaagcctgattcatagctactttctctctgaagcaatttagaaataatgaccttttctcctacattttctcataatttttaggttaaaatttgcaatttactaccaattcccactctctagatcatggacgatattattttgatggtggaagtcacgccagctgaccttaatatgatcctaagtttattctccatagagcactcctggaagtccctatcaatcaatcaatcaaagtctgctcataaaatgaaacttactggccgctttgcatgaacactgggtattacattctcattcttttcacttataaccctaacagcttgtatgttatgagtatataaagctttgtccctagaaaatgttcaataaatgggccaggcatggtggctcacgcctgtaagcccagcactttgggaggccaaggcgggtggat

SEQ ID NO: 1881913 - DNA, 4001 bp, Homo sapiens
tgttctgtgttcctttaggaaaaggtcagtcaagtacagccacaaaagaagacacaggagagcctccaggaaacaagatgtgtgatacttgcaagtcctggagagccagttactgcatgctgagagggggccatatgggaggagtgccaaggaagcgggctcagccaagcagtggggagagccgagagagagtgaggacctgtggtcaggtgccttcactggcagtcagggtggagtacacaggaaaagggatttcactggtgcatttgaatgttactaagtcacggttgagggagggcagtgatgggaaacttgtgatagggaccagcgttatcacattagtgtgcctggacacctgggcaaggtgctcacagctcaacaagaggcagcaggaaacaaaataggaagtttaaaaattttttaaattcacaatacagctataaagactcagtaattgttcctctcaaagtttgttttcataacatgctcttttcactatgttcacgctttacttctttaaaggagaaaacaccagctttcagctttaatcatgagcagaaagcttagataaaccatgtaaatccaggccgggcacggtggctcatgactataatcccagcaattcgggaggccgaggcaggtggatcacctgaggtcaggagtttgacagcagcctggctaacttgtgaaaccccgtctctactaaaaatacaaaaattagctgggcatggtggcaggagcctgtaatcccagctactcaggaggctgaggtaggagaattgcttgaacctgggaggcagaggttgcagtgagccgagatcgcaccattgcactccagcctgggcgacagagcgagactccatcaaaaacaaacaaaaaagtaaagccaaatttttctcccttattactttccaaagcacataggctcacttaattcagctattagaaatttctgcattcaagatctcccggtttttctgaccaaattaatgctcttaaattttcctcattctgattgtcaagggttcccagcaccactctcgtgttcagtgattcactagggttcacgggactcagcatatagtcacagctatgatttattagagcaaaaggaggcaaggcaaaattaaatggaaaaaggagcatcgggtgaggcccagaggaaaccaggcacaagcttctaagggtccgctcccagtggattctcacagaacacactaaattccttcagcaacgagttgcaacaacacatggaaatgttgtctacgagggaagtttattaaagactcagtgcccaaggcttatgctggaggctggtcacttaggcactctctgcctagcacttgccaaaatgtcgtactccaagaagaaatgcaggtgttcagcgtaagtcaatcgcacagttcaggcacagtgagccactcatcagttaggcaactgtggaaaccttcctgaaatttaagatttcagatgctagcctggcgccacccttacaagcaggcctaagagagctgtctcaggcctgccatgttaacttttctctgcacactcatgggaaactttgctgtcattcaggactattcagggtcttcacccactgtgacttctttgtagcctttaatactctgaccacatcctctttctgaattttataccttttgtgattttcataccatgctataccatgaaactatttcttcccttttgtgtcagaaaaggggattatgagggcagtcccatggttagggactgagggaggtgggtgaccccaaactataactctttcccctttccctcagtgaatctgaaatcaaatacaaacacacatccccaaaatggaaacccttcagaagaccaaactatcttgtctctattcagaatctgtatcctctcatccctacatctctattcctgccccttgtagcatatctccaacccaggctaaagtggcatgtgccccactcaccctggcttcttcagaaggcatgtgctgcacttctaatcttcatgtttctcacttggccagaggaacgttatggagagaagctttgctacactacgttctgtccgttctattgccccaagattccacattcacgtacttcccatcctcagagcaatcatggcctaattggcctctctcccttcatcacttccatcctactaatacccaacgtataaatatccctaaccacagctgtgacttttgatcacgccacaacttaaaactgtcagtgttgcctgttgcctatttcctaatgaacagaatttcctaatgaataaaactcttggcctggtattaaggtcgtccgtgacttagccacactctttttctagtcccatcttcctctaccgctattcccatattcatttctgaagtgaataagaaagctatttaataatgctcctctagataatttagtcaaactagatcaatgggctttttttttttaatgtaccttttattctccaggctaccttaattgagaataggaccaagaactcatttgtaatgatcagctaaagccaggctctttctcactttgccagcacactggaatcacctggatcccgctcctcggttttctgattcagtcgatctaggatgtggcctgggcattggggtttttagaagctccctagggtttctataatgcacaaccagggctgagaaacactgacacagaaaatctgtctttgcctgtgttttgtccgaaatggactatgggactattacaacagagtccatgcatgttctttttatatctctattccttatctaaagccacagtcctccccttaatctccacttctcctctttgacacctaacccccaatgcctctttcttgagaagccttccctgatctccagtgaacagtattctcaccatccctgaaatgtaggaccatctcgctcatgcccctccgcttctgatgctgctcatctgtctcgcttctcacattattcttgtattgctgaagcccctctttcctcaggtgcttttccaagcacctttctcatacttgatttagcataaaattttgtgttgtggtgttaaatgaaaatttgaaaaatcaaaacgtgatttttaatttttgcaatggttgtgtaatgcttttaatgagagattcacccagcaagtcaagtaaacatattctgatcttcccaagtcatgaattgttctgagagtaaacactcacccctaatcattttaagatctgaatcaactctgggtacatttgctttacttctcactgacaactagtcgcttttcaggcttaggctaccaaatccaaagttgcatattcagaattccaaaacaaaagaaaaccaaaataacccccttttgccatgttgtctcctgctataaattaggctgggtttgcatccaaatgtgaggagacaacaaggagatgagacttgacatgcattattagttggcagtagtttggttttcttttcttgattgcttcagggctaacagctcacctgcattttagaacaggcacctgctaattcaactttccaacctttaatctcaccctttcacccacagcattttaattaccctacaattaatatactcctgattttacccacatggaagagtgggatgggaggagggtgaggagagagactggcttgatggtaatttatcgtccagatacccctcttttttggtccctgggtgaaagtctctattcttgattcattttaataacaggcctgaaaacactctcaccaccatccccaacacaaacacacacacgcacacacagatgctaataaatgagacatcatctcctcgaacagaatcatcagttctcatttctcttcaaaatctgtgcctctgaccaattctccctcaacctcactgcctgaagctaggaaccccatctctaagtgggaggagaagggaaggtcgattggcaacccaacaaagtgacaaagagggcaaaagttctgaagaagttgggagaaggaggaaaggggggaaaat

SEQ ID NO: 1881914 - DNA, 4001 bp, Homo sapiens
ttcactttagttctcacaactcatctttagagcttctttctttctctttctttcttcctttcctttcctttccttctttcatttcaatagctttaggggtacagtggtttttggttacatagatgaatggtatagaggagaagtctgggcttttagtgtaaatagtatacgtcgtacccaataagtaatttttcatctgtcaccccttccccttctgagtctctaatgtctgttacaccactctgcatgcctttgcatacccatagcttagtcctcatttataaatgagaacatgcagtgtttggttttccatttctgagtttcttcacttaggattctatttcatatgtatataatcatatcaaacagaaattattaaacattttctcttttaaattcttattcctctttttcatatttgtacctttgctagagcttttgtaaaaatgttgaattgtgtcaactggtatatttaattttatctgtcttttaatgggggtgctttcaagtttaaccattaagtataatgtctgttataggtttttaatagagatcctttaacacttcctaatcatagtttgcaaatatttttaaagattaatcacttttattttaaccccaaaattctgtatatattaaaattatctcatggttcatatcatttaatcacttaatgaggtgagttttattattggtgcttgaattcttaggacaaaccttcactggtaaagccatattatttattgttatttactatgagatagatttgttttcctcatattttatttgcatgcattttcattagtataatgtatctacatttccttttcttgtatgtcctgttcagttttgattttgttaacaactaagtaatatcaactttgcatcaaagttttactagtttcagaaaataatttgattagtacagcagagagatctacttacttcataatatctctctcaatctgtattttttctttctttcttgataggagatctctgatgatattccagcatattttctgctcactcttacctaggtgtgaccatgccattagctccaggagggctgttgtgctcttatgtgaaatgcttctcatgacgttatgcatggacaatattgaagcgtgatataatggctttgggtctagtcaaagagatataaacagaagggctacaagagatctctaggaaggtctcttaaaagagaaagtgtggactttaagtcttctcctttccttctgtgtgtggcacattggatatgattgttagagctccgccagccatattgagccataatatgatcttgaaaatggaagcccatatactgaagatggtggtggaaaaagattagaacctggctgtctgaagacactgtaaagttggcctggcatgccagccatgaaaagtgtatgtgtatttgtacgtaatgaacttctatcttgtttaagctgctgtgtctttaaggtttttaggcatatacagctgaatctaatgcttattaatactggtagtgtttgtattccttttattttagtcactgaaataatggatttaaagtaagaatgatctattacttagtttgttaacaattttctataaatcctttggctttcaatatgcagtttgtttccttctcaggaaaaggggctcaaggtaaatacagagttactgctcttcaaactctcatggagaagtagatctgcatggcccaaggggtggactgtggtgctcaaggttgtaagctactcagatagaaatgatctacttagaaaataatcagtaataaacccatagaatttcaaagtatgaagtagaaatagaattataaagagacctgagaaattcagagccacagcagtagaactagaatatcattttctgaagttggcctcctgcgcaccagccactttgtgctcatcctacctgatcagcatgatgttatcgatgaaatggcttcatgtgatgttctccagggcatccattagaggagtttcatactgggcagaaatagtcttgccctaataccttccccatgctcaggcattagctgggtgcagttcagaatgaatggccttggcatgaatcccatgagggatcagaagatgcaacagctgtaggctagcagtcaattatctcacctcctcccctggcagcaagttcttttgaaggaaaatctggaaggcataacttcctgactgtcacagagcctaaattcccttttgtctgatagtagcagtggaacatctatacataagtagtgtattacacatggtatattacaaatgctatatctgatagtatacacgatattaaaactgctattaacaccacaactaattatctggttattagattattgattatctagattacttagtgaattatttgatcattatgcatgctctttttcttactgtttcttcttcaattctattttttctgtttttagtttactgtgctgtattcaatctcagtttcctggaattttataaacacagcacacttcttcatcagtaaatgttagattttttttcccattttcaaggatgtaaaaataaaagttgaacaaacattcaaatagcagagtttttacaatcaggcatattcaacccgaatttcataaaataaaaaaaaaaagttctcagcaaacaatttgcaagtatgaaagataataataaagagaaaagaggaggaatcattgtgataataaaacatccatatctcacattgtcttttagtgaaagcacaaaaagtattcctgcccatatgtgcagaaaatgcaggaactacaaaaggtacacttctcatcttgttttgcctctgccaagaccaattctgaagggaaataaaacagaaactgaaagataacaccaaatcttaaaatcttcagagtcttttagggacactaatatctatttgtgttgattatgtgtatagtggcaggatgttatagagtacgtgggagtagaagtcaggagataggaggggatttgtcagagaggcaaagttttaagctctgctgttgtctctttcccgcattgccttggaatagtcttggctagcctcatcttcatataaatcaggctcacctcgcctgtgttagaggaatgttagcaggctagcacaaacaagctattgggtaaagagctaagagaactggtacagattcacaacccttcagctctctgccaaaatttcaaatcctgtctttcatttattttgaagatattatgtgtagattttaaaattatgtatctgttaatgctttaagagtccttttgagtgcattttcattgtctgtaattcttcttagttttcattcaagctgaattatttctatgagtatagttatttttattaaataccagacattgtatatgaacaattatttttaattgatttctcaacaaaacaaccggcaaatcaaacctggaaacataggaaaaaataatatatcaggaccgagtggaatgtatcccatacattgccaagtaggttcaatgttttaaaataatcaatatattttactatatcaacaggctaaaaaaaaactatataatctcaacagaggcataaaaagcatttgacaaaattgaatatgttaatgatatttaaaaaatattttctcagtcaaatatgaattgaagaaaacttcttcaactaaaaatacattgattttaaaaacatgcagctaacattatacttaagggcaaaatactgaatgctttccccttaagattagtactagggcaaaaaaggccaatgttttcacttctgttcaatgcaggtactagctactgcaataagtaagaaaaagaaataaaaggcatctggattggaaaggaagaaatacaacagcctccattcacaaataacatgacagtctgcattaaaaatcctaaggaatgtataaaacagctcctagaactggtgggtaagtttcaaaagatcactggggacaaagtcaatatataaaaatcaattattttcaatatact

SEQ ID NO: 1881915 - DNA, 4001 bp, Homo sapiens
taagggtatttactcaacttacataatctaaattttcaggggtatcactagctttaggcatgtctaaatccagacacttcacattgccagggcttggtctctgaatcttgactgtttcctcaaatgattgctgcattcttaggcacactttttgtacacagtggcaaagacagccccctggcacctctaggcttaactggagggtaggcaggaaaagaactacagattaattgatctcaataaaccagagtaagtgaagccagttggtattatctagagattagagagctaagctgaaagtttaccaaggaggcaatattctcatggcagctcatagggatggagtctccatttagcgtccagtaaaataaactatttcatttttaataccaacctcctctaagcccaatacaatatttttaatgactatggtcacaaaattcctttacttgcctcagtttgcagaaaaataaatgatacatactacagtatcaatgaaaagagaatctttagaagtccaggattctagttctgactctagcagtttgaaaagtcatttaaactctgtttcatcaccagtaagatgaaagtgctgagtaaagtaacctaaggcttgtttcaaatcttgaaatgtgaatccatgtagcgccgacctggctattttaatgtttcatgtttgggtttttgctttcttgataccatttgttcctcaacaaaggaaacctaatcactcagaactctgagaaacactgatcactaaataggtcaaaaacatcctgcaagagatgaaagcattcagaagttttgcagaagataagtagataagccaatagcccattatcttgaacactttggttttcacaggaaaacaagcaagcagtcaaccccagcttcaatacaagctgagtgcccatgtattgatcttctgtctgactgggtcacgggagtcctggtgtatattaagtagaaaaaggactgaaaattacattaattcaaatggctaaatcaatatttaacaacgcagttagtggtcgttgaccttaaatgcacctttaataaaacaaaggtgattcaggccagcctctagcatatgccattcagaaatatgaattaatgcagaacagatgcgttaaagacctctactagcgcagatgcctttgcagtttggtctgactgcaaggagaagttcaaagccactctcttagcacaggcaattcgaattttattcatgtgatgttgtgtcttcatttatcacattctccctgtctcaagaatcagacagccttgatctcaggacatttaaaagcagaaaaaggatttcaacaactatttccccagcaaattattagtaaatctttagtgatagctttgtaaccttgagcactttcttcataagtaaacatggatgttaccagttgttactctagaagccctatcttactatatgatttgtatatatttgcatataaacatatcagttagtacttcacttgcattaaagattattgaactaagcttgcttatattaaagagaatgcaaaaaagaataaaataaggaataaacagaggcaatctcgttaagatgtcagaatcatctcagatgctattagctattatatcaggctcacagatgtgagactttttaaaattgccttgctgtccataaaataccttaagctgtacagcactttagttatcactgccaaggacttggtgataactgtaaggaaaaggtcaatctaagaatctatttcaatacacctaaggcagcaggagactctgtggaattcccaaaggagcccaggagagtttacctgattttgtgacctaagatgctagtgccaaaggcaccatttccactgcatcctggtttggctgcaaggacaaatgtatgataattagaaatctctcctgagacacttccctttgatttgttgtttggtgatggctacagtttctctgcagccttgcttctctcaggtctgtctgctggttaccatggcaaagtggttcaatgcatcctatgagctaaatcagcattctgtagtatccaagctgctggcagtagaacttaagaactgggcagaaagtttccaggctgaatgtaaacgtgattgcttgaaaatatgatcatacacttgaatgggaaaagggacattccccagaacacgatcacagtttctttgtcatcaaggatatggaataaacacctgatctgccttagggccagtcacaagagttctgggcagggagagggctggcaatatatgtgaggctctcccgctaatgctggaactcgaacagaagtcacgtatgacacaaagatagccaagcaacagcttggctcctaggaagtccctctgcctggggcattccacatacaaaccactaggcacaccctacttttcacagtctcttcacagggtcaaaatactctctgaatttaaaaataattgtagactagtcacgagaaaggatgtttagagtgtgagaatgaattctcacctccagcaagggtttcaggaaagcaaaaagaagtaatatttattttatactcctcctggagttaggtaaaggaagcagaaagttgatctttcgtcttaatgatcatttctcctagggccatcatcctttacttgtcaatctaaatccaacatccccacaaaactatggagtccaggttatttgcaagtttgagaaatttattatgtcatttttaggatgaatacatcatatgccacacatacaaatatgtgtattatagtgaattaaagattaataattatttacccatatgtttatcatcttctttaagaactagaatattataaatatctttgaagccctagaacctcctggtttaattcccctcccctgatacctattgaggtgacctttacactgaacttgtgtttattgttgcttatcttcaaagttttatcgcagatgtatgtgtttctaaacaacaaacctctagctacacagatcaaaaaaaaaataaaaagaagaaaacacagattaccgatacagaggatgtcaggggatatcaccagagactccacagacatcaatagtgcattaaggaaacactatgaacaactctaagcccataaatttgacaacttaggtgaaatggtccaattccttgaaatatacaaactacaaaaactcactaaagtagtaataatctaaattatcttgtatctatgaacaaattgcattttttatttaaaattttcaaataaagaaaactttagatccaaacagtttcactagcaaaatctaccacatacgtaaggaagaaataataacaaccctacacaatatctaccagaaaatagaagggaccattttccaactcattgtggagccagcattaccttgatctcgaacccaaaggtattacaataaaactacagacacatatacctcatgaatatagattttaaaagtcctcaacaaaatattagtaaatctaatccagctatatatgaaaggaataatacatcatgagcaattgaggtttactctagagatgcaaggctgaatcgacatttgaaaaagatgacaacaaatgttggcaaggttgtccagacaactggaaactcatacattgctggtcagaatgcaaaatggtgcaggagtactggaaaataattcggtagtttcttataaagtgaacccatataatccaggattctcactcctagaaaggcacccagagaaatgaaaccctatgttgacacaaaaaaacttatgtaactgtttatagaaaaactggaaataagccactgtctttcaacacaagaatgaaaaaacaaactgtggtacatcctaaggaacaacattcagcaacatagacaaatctcagatgcattgtgctaacagggtttctaaacctcggcactattagacttcaggccagataaatttgtattgtggggagctatctcgagcgttgtaaggtatatttgcaggcatcactggcctctacccactgg

SEQ ID NO: 1881916 - DNA, 4001 bp, Homo sapiens
ttaaaagcatatgttttcatttctcttggctctatacatatgaataaattgctgggtcataagtagatgtaaatttaactatgaaaaactagtagactgatttctaaactggctataccattttacactcctattggcaatgtatgagaatactagttgttttacattcttaaaagtatttgatgctgtcagtcttttaaattttaaccattccagtgggaacatatggttttgcattgtggttataacattatcttaacaagttaaccttatcattatgaaatatccttttttttttcctctggcaatgctctttgttctgaagtctactttatctgatgtgaatatactcactccagttttcttatataatagtatttttatggtatacctttttcatccttttacttgtaacctatgtcattatatttaaaatgtttttttcttgtagacaccatatgtatgaattttgctacttttaattagtctagcaagctctgcctttttttttttttttttttttttttttttttttttttgagactgagtcttgctgtatcgcccaggctggagtgcagtggcacaatctcggctcactgcaaactctgcctcccaggttcacgccattctcctgcctcagcctcctgagtagctgggactacaggcgcctgccaccgcgcctggctaattttttgtatttttagtggatacggggtttcaccatgtaagccaggatggtctcgatctcctgacctcgtgatctgcctgcctcggcctcccaaagtgctggtattacaggtgtgagccaccgcgcccgactgtctctgccttttaattgcagtacttagcagtttatatttaatataattattaatatgcttgggttttaaatatgtcctatattttatttaagaaagtcctatatcttctttggcctttttctcttttttcccactttattttgtagtaaaccagttttttggggtttttttttgtttgtttttagacattctatttaatcttctctattcactttttagctacatacttctacctctttttttttactttaattagcttttaatttatttctcagtccttatttgcacaagcaatagcttttgatgtggttgataaatttctcttccttgagagaatttcttctcttgaatcccagggcatcgtatgtgccaggttttctttttctctttcagaccactccttctcaatctcttttgcagagtctttctgattctctgacttctaaattttggggccattctttagttcagtcctttttttctttatatacaccttttttttctctttatatacactccctaggttgtataaaggttttaaatacactcaaatttgtatccccagtttgatacctctccctggaactcaagacctgtttattcaattgcatacttaacatttccacttggaagtctaataggcatgtcaaactcagtgtgccaaaactgagctcctgacattcaccacccctcccttcatctctacctccatgcagtctagatcctcattcagtcttccttattttaactaccaattttcccaattgctcaggcagaaaccttggtattttccttgactcctctcttcctctcacacctcacttctaaccaataagcaatttctgttaattctatcctcaaaatattcattcacccatctctcatcacttccactgccagcccaggcaaagccatcatcagctctcacctggatattgcaggaaacttctaactcacctcctgcttcagcttctgtcccttgcagtctgcttttagcacagaagtcacagtgatcctattaaaacacactttaggccatgccagtcctcacctttaacccccaaattctcttccatcttactgaaaataacagaatgaagagccctttctgttatcttcagggtcctgcatgatctggacatatgactacttcccacacacattttcacatggcctaatatcacatatcaccttttcagaggggactttcctgaccacactctatgtaaatatcacacttctctcataattcatttttatcctactttattttttctctatagaactttctattacctgaaattaaatatttacttgtttattatttgtctatctccctaaaataaaagctctctgttggcactagaacatgcctagtaaacaaatacttcgaaaatatttgctcaatgcatatcttttttcatctttggtattttttttccaacctggtaatttgtttttttatgtatgtctgtgtggggttttttgctaaattctgttaaatttttttaaaattttaattgttatgaatacataatagttgtacatatttatggggtgcatgtgatatttcgatacaagtatacaatgtataatgatcaaatcagggtaattggggtatccatcacctcaaacatttatcatatttttgtgataggaatatttcaattccactcttctagttattttgaaatatagcataaatattgttaaaaacattccaattccactcttctagttattttgaaatgtaccataaattattaactatagttgcccttttgtgccactgaacactagatcttattctttctccctgactgtatttttatacccattaactgggtctttactcctcctcaatccctgccacacccactgctcttcccagtctctggtaaccatcattttactctccaactccatgagatcaattttttcagctctcacatatgagtgagaacatgcaatatttatttttacgtatgtatgtatgtatgtgtgtatttcaatgaaaattctcttcatctatacgtttttggaagacagtgacctgacttaaacatctttattttcaacatatagtgtagacttcccccaaaggatagcttctcagacagtatttcctgatccattgattaatgatagataaaaggggcagatatttttccaacttgtttatttgtttgtttttatatatatatatgtatgtgtacatatgtttgcacttaaactagcaaatattaccttcttatctataggcttttggaagacaacaacctcacttaagtatcctttgttttcaacacatagcacagacttcctggagactgtttttgtatatgtaattaaaaaaaacaaaaacaaaacaaaaaaaacccagaagactaacagtctaattttgaaaaaaaatccacagtcatgtgaatgacagatgattttgggtatgactggggactggaatggacacagagctctttcaattctgtctaacaaagccacagactaatgttaaggaatgtttgtgtgatctctccagtgtggaatcagtacccaaacacaggagtctttacaaagatccaaaataatcataaaaccattataaccacaagccctcttcagagttatcccctcaatagtgaatgctgccttttcaagccaactcttatattgagagaagggttgtaatatctccagcctggaagaaatccctattcctgtggctcatttactacatctctgtggttcttggaaggaaggatggagtgaaagccaccccaggcagttgactgtgaattctagtcttaagcaatgtatggagcacttcaataaactttggctatttagccagccttcgttccctagagaaatactgcccagctatccccaagctctggtagattgtttgccacggacaacttattgatttatggtcctgggcattcttagaactctgctaagagaaggaaaaggcatgatcaccttgtaggagctatgaaggtaaagcctgccttcgaatcctcaggtagcataagcaagagtaccggggggcatagtgtgcatttcctattcttacagggtgccgggcacataggggtcactccatcaataagggaggagaaagaatgaaatgaactgggaggataaaaagcaagaggctcattgctcactggatgtcta

SEQ ID NO: 1881917 - DNA, 4001 bp, Homo sapiens
aggttcaggcagataaagagaaggaggcctaggccttttgccagggctatatgggacccattgataggatgggtgggctttgcttcctcatctccttaccttcaaggatcctctctgagctggagaatatggcccaggcagggggagggattgactctggggacccctttggacctggagcataaggttaagtttggagctttagaaagtttttagcaggccaagtttcaattgtgcatttaaatactatagagactgaaaatgttcacatacctatccccaaaaacctacagcccttcaagtctctccaccattatactcttcttcgacatgaacgctatgttaggaacccctgtgaatgctatggggatcccaaaagatcagaccaatcccttcagggaagtcctggaagagatggcattaattatggtaccaggggaaagtgctcagcacacaagaagtctagattacatgtgtgagagctgggcaggcctcgtgcacaggagataaagcagtgtttgaggacagtggccatgcactgcaggccaggaccacactctttcatccagtttaggaatcaggaagtggctccactgctctgccaagagcacaaagcataactcttgcctgtctctattcaacatgggcatgtgtacttttccatcactgaccccatgagcttcctaaatcaaaggaccaaggaaggccagcagaaaggggacctggatttctggcagataatttccccgaaggagtccttagcagatttggctgcagtcagggagttcctttgagggcaatgaaacagaagttcaccatgtgcttattagaggttacaacctgctaaaaaatgatggggtacattacccagaaacttctagctatttcctttgccagccacaaagatacatgctgaaaagcctgaggagggagacaatttcgtccttttttctttccctttttccttccatctctcccatttccattcgttccttctccttctctcctttctctctccctccttccttcccattttctcttccccttcttccttttttgtcctttctccccaccttccttctcttctccccccacccttttcatatggcagagacagagttaggaaggatttgttcaagccctcctttttaacaggaagaataaaggaggatgagaaaaaccctacaccaaataaccagctaatcaaggacggttaacattgctgttgctttggtagttactctaaaaacaaacgaaccaactacttggggtggggaatgaggggttggcatttaatttgagaaaatttaaaaacgcatcctgacacagccccagtgagagcattcattccaccattcacatatctcgaggactgcccgagagaggtgagcgtgtgagtgagaacagtgcccaaccctggcagcctctaggctagcggccgagagagaagcgtttcagaggccggggtgggagtagagcctggtaccccacttcctggggacccacagcgcctcatttgccggggcccagcgtccattcatccctcccagcgtggaggccgtgcccctccgagagttaccagccccgacctcgcgcacccatattccatcccaccgcccccgcctcaaagcgaagaggtgggcacctgggacgcgcgtcctgctttttctgcccgggctctcccgtctcctccacttttgtccccgacgtcccagaacggcggagcaggacgcggcatcagccctgggagggcgcagcctgcgagcctccagcgcgctcagggcgcggcgaggatgctaaaggactgcaatggccaggatgcagatccccagctcaaattcctgaggaagacacccgcctccctttccctctgtcccctctccgtcctcgctcggacccgctcctccccagcccagacgtcagtgctcagcgctccttcgctcgccactttgcgaggaactttggccggctcccctgcgccaccgggagcgggatgttaatgagagagcgtggcctggcgccgccagcgagccggctcccgggccgcgattggctgcggtgggcggaaagatgacgttatgcaaatgaaggggcggggcctcgatgcgcgggccccgcctcctccctttggggttagtgtgcctgtgtttagctctggggaaagtcaaactggattccatagggaaagcctgcaaatcacttctattttagcaaggagaaaacagaatctccatccagcagggtccacccctctctctttctccctctcctctctatctctctttccctccccccctttcctctctccctctctccccttccccccaccctctctggtgtatctgtctacggcaaccagcgtcctcctcatctacacgcaaaggaaagaaacatctttggttgggagagaaggaggaaaaaaaaagagagagagaggaaaaaacttgcctggttgtggaaaatgacacttgaagtagcaaagccggcagcgcgagttgagtctattgtttcttaaattgccatcagggttttttttttttttttttttttttttttttttttttcttcctgcttcttcaagtgaagggtacctctacaaaaggaaactccagcccctcctgtcctccaccggcctgtgatcattacaaaaaaaaaaaaaaaaaagcaaaaaaaaaaaaaaagcacccaaaccaaaaatcaaccaaccaaacaacccccaacagccaagcatacatctctaattttattattttggtcttttcgttggattttccctttcttctttttttcgggttatcgctcagttttgagcagaggtttacattttttaaaaatttgctttccagcccgccttgatcttctaagtgcgagttcatcgtctgagaaaaaaaaaaatctctggttggcgtttttgtttcttttcttttctttcttttctttcctttttttttttttttaatttttttcaagggggaggagattttccacaagaaaaggttgttttcatgtttgggattcaggaaagcatccaacggagtggaagcagcatgaaggaagagccgctgggcagcggcatgaacgcggtgcggacgtggatgcagggcgccggggtgctggacgccaacacggcggcgcagaggtgggtactgcgcggggaccgcggccgaggtgagccgcgagcgggagagccgggaggcggaggcggcagcggcagcggcagctgctgccgcggggccgggcggcggggtgagtccgcagccgctgcgctccgctctccgccggggctccgcgctctccagccgctctgccttcgtcgcctgcggccggaggacctggagctgtctgcgaggagcccacgctttgccagcactttcccctgcctcgtctgtgactgttttcattttgttttaacccagaagaggcgtctcaacacagcatgttggagatctgtgttttatgtttttatgtgattgctctttcttttccggccggctctcttttcttctttcccttcgctcttcctttccctcttttcttttttctttctttctttctcttccttccttcctttttctttcttttttctttttctttctttttttctttcctccttttctttttcctttttctttctctttcctcttcctgcctttcttttttctttcttccttctttcctttctcccccctttattttcttctcttctccttcctcttcctttcttcccctcttccctccttccatttctttcgttcttcgttctttcctgtctctcttcctgccttcttttctttcttctttctttcatttccttctctcatttctttcccccaccttcccttaatttctccctcactcttttccttcctcccttcctctctccattttctttctcttctttcttcagcttccctcctttctcctctttctcctttccttacctctctggctttcctgttttttcgtcccatttctcccctgagtcttctcttatttctgct

SEQ ID NO: 1881918 - DNA, 4001 bp, Homo sapiens
agttcttttaaactactgagagcagaacaggtgtccacaggtaaaattaccacagaagtggatttcagttttatgtaatgaagatcatcctagttattagagttgctcactggaaaagctaatgaatcccattgcaagaagtatttcagaacgatctggagaactaactcttagaatagttgtagaagacatgtttgcactggctaggcaattagtccagaagatacacagtaatattgatcatgattcattcatttattcaacatacattagtgaacacttcctgactttggggctggcatccctgggtttaagtctccactgtgctacttcctagctgtgataccttgaaccagttagtgtccctgtatctcagtctcctcatctacaaaatgggaataataatcgctcctgcttcagagagttattgtgaagataaaaggagatgatttatgtaaagcagttttgaacagtgtctggcacataatacatagtcaattaatattagacattagtagcagtaatatgtgatatgttactgctgtaatatattgcagccaatggcaggcactgggctagacactggattaccatggttaagaaaacagacatcaatcctacgtttcttgagtttaaagtcagccaagaggttggagggtgtaaaagacagtaaacaaaaagtcacagaaacaaatagtttcaaaatgtgacaatgctatgaagggaaaaaagagaattccatgatagcatataacagagaggaaggagactcatctagactcggaggtacagggaagggttctctgaggaactgacacttaggctgagttgcagtatagacgcatccctgtaccagtgatttagaggagtggcctcacgcttgacttattttaagtccacagagaaagcaagccatctatctgcaagagtgtggcatcacctggcaatctgattcccagtttgtgcatcaagactcacactggcagtgtaaatgtagacaagctctctttgctttagctattagattccatttaatttttctctgaaatctataaacatcaataaatccatccatccatccaaccattcattcaatgatccactggcctatgggagattcaaagatatgtagcccccaatgtcaaaaaattctgcaagggaagctgatgtgtgtataaactcctgtaagtgaagatacatgggagtgatggagggaaatgctatggaattttgaagaagttagaaattcagcaccaatccgggtgtgaagggagaagttgttggaaaaagtggcatgttaaagtatgctgggggattctaagcaaagtgaacgcaaaggaatcaaatcttattcagcatttgtgttctaaaatcaatgcataaagccaaaaaaagtcataaatagaggatagtcaaaagttcccttgaaaatcccttatgagagactgtgttggaaaatgacactgtctctcaagaaatccaatacagtcactgtgtcctgtagtcccaaaatcaattgttgttgcttcagctgaattcgtgagcttgctttaaggggccaagttgtatgaaaaccatgaaatcttccacattggactcacacatgttgtgatgagatgctcatcctgtgggaagaccatagaagaggtgaggaggagtagttgtggccatgtttcctgcaacctgcagggcagcactcaccattcagcatggaaaagcagacagagctgtccctagcagcttagccatcaatttgctctgctctcagcctccctcagtctattcatgttattttttgccaactaaatagttaactgtgcttgcattaaatataaatataataatgtgtccaatgcaacatggttaaaaacccgaggtcagcaaacagctgggctattcaggaaacagctcagtggcccattataactggaagttggggtctatattggtctctaaggctcccataacaaagcaccacaaactcgatgacttaatgcaacagaagtttattctctcatggttccttttggagagcagaagtctaaaaatcaaggggtcagcagggccacacttcctgtggaggctctacaagagattccatcctttgcctcttccagcttctagtgattctaattccttggcttgcagctcctcccctgtgtccttatgtctcaactctccctctcttttattttataaggacaacactccttgagcttagggcccaccctaaatctagaatcatctcatctcaagattcttaacatcttcaaaagccccatttccattaaagtcacattcacaggtactggggtggtggggtggggttaggacttagacgtatcttttggagatctgctattcaacccaatacaaagtctaagaaagagaattttaaaagtagattgaagccctgttttgacagtctttgaatgccaattttgaatgactttgaggttatagttctctttagagttgtgatggtggcaacttttacttacatgctatttaaacatctctctgcagggtctcctcctctgccttactgttcctctctgacaccctggagcccttccctactactttatgtactcatgagggatcctgcaggacaataagctttgataaacttgataaactccaacattgctttttcatgtcctaatcaaaatgcccaacttgtatcatatcctctacatgagtgacgattaatcaactaaaataatcttataagattaaaatactctcatgattaatcaaataaaataaccttattttaaaataataaaataattaaggcactggctcgtcaacattgttagaaattgcacatgtggccttttgagtgtgtctatgttaatgagtgctcttgcttgcagagatgcagctgctgctggggacaccacctgaagcagggagggagaaatgccctaactagctgcttcttcttgtccccaaaatatcattggccaaactcagctagaagccagctgatgcaggagcctgggagctacagcttgcagagataagatccctgtgatacagaacagaggtgggaagggaaagacactatgggaagacaagtgggccctggaccagcaaactattattatccccattttacagaaagggacatggagctcagagaaggtgatgtgattgcctagagtcatgcaactggtgagtatgagtgtggactttgaatccaggtctgtctgaatcataagcctgaggtcttgccagtcttgcctggctctcactaccatcatagaaatttcacttgctttgtctgactgcttggtcaagagatagaccaaggtcctgagaggcagtttcatggctctgaaatctgcaataaaaccttccttggattcaagatctgggcttttataaaaaaaattctgggatacatgtgcaaaacgttcaggtttgttacataggtatacatgtgccgtggtggtttgctgcacctatcaacccatcatctaggttttaagccccacatgcattagatatttgtcctaatgctctccctccccttgccccccacccccaaacaggccccagtgtgtgatgttcccctccctatgtccatgtgttctcattgttcaactcccacctatgagtgagaatatgcggtgtttggttttctgttcctgtgttagtttgtggagaatgatggtttctagcttcatccatgtccctgcaaaggacatgaattcattcttttttatggctgcatagtattccatagtgtatatgtgccacattttctttatccagtctatcattgataggcatttaggtttgttccaagtccttggtattgtaaatagtgctgcaataaacataagtatgcatgtgtctttacagcagaatgatttataatcctttgggtttatacccaagatctgggctttttgaagggcacagagttgcagggctccagcctccttcaggaaagaacccactgagtccgctgctgcaagtgccatcagcag

SEQ ID NO: 1881919 - DNA, 4001 bp, Homo sapiens
taagtttttaatcaaaaacaattttaacatttgttttcatgattgctaaaaacagtatttaaatcacattcaaaaataagcaagtttaccacaaaagcaaataaatgaaacagaggaaggaaaaggagatgaattttacttaagagctacattaatcaacataggagtggttatttgatctagatcaaataatcctaactatgtgtgtttaattttaagacccaatctatttctacccaagactttagatgtgtaagttatctttcttttgtctccaggtagaaagaaaaaaagaagtgctattttcaggcagagaaatgtacaattttaaaaatggtctagcattttcaaattatttataccttaccaacttatattgcttgtgccagatgtacagattttacatctgaataataaaaccatgtgtccttgtctgtgaagctgaaattttacttcagcagtaggaatttgacaccattagtgactactccaaatgtacttgcacatttcaaacaaattcacaagctagaatattctgttctccctcctgcccagggatttgtacatgctacttcttcagcctggatgcttcttccttactcagtccacaacacgtacctgccttttgcctcagcaacatttatttatttttcagctccctttaaatctcacttaatcagaataaaaccttcctcaatttcctctattcctaggccagcatcatttatgatgaactctcctagtgattgcttctgatttggaattcttatctagttgttaaatgtgggggtcactgtgtgacaatttcatttactccttgcctcctctattagactgaaagctagagaggtgatgatgagtcatagatgcttttattcacagtgtcagatacacagtaaggtaggtacccttattaaataataaactggaattatttacttgaaaatatcaattcatttttaaagtactgtgcagcctcttcacttcagtgtggcatgaataccaaattatattatatatcaaattatgttaatagaatttttaaaaattgtctacagcaatgatttatttaatgcatttggccttttttcacttattcacctcagattatgttgtgctcttcacaaaccacctattatcaggatgatggagtctcgctctgtcacccaggctggagtgaagtgacacgatctcggctcactgcaaacttcacctcctgggttcaagcaattctcccgcctcagcctcccgagtagctgggactacaagcgcgagccactatacccagctaatttttgtatttttagtagagatggggtttctccatgttggtggggttggtctcttaactcctgacctcaagtgatccaacaacatcggccccccaaagtgctgagattacaggcgtgagccaccgcacccagcccagataaatgtattcttatttcttccactcttctcaaaactatctacgtttttgcccaaagcttccaatagacctttctctcccgctatttttaacattgattttatcgaggccagtctctttaggagtcaagagcttgtagacactgtccctgtttcagttggtcaccgaaaatactcagtcccctcaacaccccctcttcctcatttagccagattctgcttattttaaacattcaacttccatccctccttcccgctgactacccaccacactctgttcattcgcttcaactctcaattgctattgtacttttatgctgttccacacgatttaccagttactcataatatgtcttgtattattaatggatattttacacattctagcttgcatcccccaactaaaacacaagcttgcagtgtcaggaattgtaaaaaacatttctatatcccaaggcagttccaaacacgtcatggccagagtccagatctccatcagggctgatcgctattcacctatcaagtcttggtttcaaacacgctcgtgaagccttcgtcctctctcagtacctggcacataccggtattatggtcatttcagcccgttgtgttgtcatctttttctgcttttcttttgtctacccactaggagcagagcctgatgaggtaaaggattatgtatcttatcattactatatccttagtatttagcacaatgcctagtggaggataggggctcactatgtatttgctaaatgaataagtcaataatcttggtctcctttcatttatgcaggcataagatatttttcctttataagaagattcagaaaatctggataaattttgaaaaaattatctgcttagatctttaaaacataggtaaaaccaagtaaaatttcttattgacattttgttctgtgcacagagagtaatatagtggttaaatagacttgagctttgcaatcaaacatgtctgcattctgattctgcatgaccttgaggaagttccatagccttcataagtctcagtgacctcataaaaaagtgagaattgactgactacctcacagtgttgttgtaacaattaagtagtgtaatgcatgtagaactcctggcaaattgactagcacagaatgaggcttcagatcattttaatcaattattctttattaaggcaatttaataggagaaaagactaaatgttatttcttgtgcttcacagatgtattccagatgaatatacatttaaaaatatacaaagaataaacacagacaagtagaatacctttgattacacagctacaaaaatctgaccaccttgaaatactgtgtcagggttagcaaacttcctctgtaaggccaaatagtaaaagtttcaggctctgtgaactatatgatctctgccacaactattgaactctgtcatcatagcataaaagtagccagagacaacacatacacaaatgagcatagctatgacccaatgaaacattatttactaaaacaggtagtgggccagatttgccaattattgtactataatggatacactttctctcacaagagaattctaccataggtaataattttatatttgtatatttgtgcaatgatgccaaaacgtaaatgaacagaaatgtttaaaaaacatgatgttttttaaacattgttaaaaaacaagaccaaagcataatgtttaagaaatgtgaatgtatatttccatctttaaaggcatttgaatacagtacatgaaattcaaaacctcagttgtgaattcgctatttaccaatgacaaggtttaagttcttcagtggccatgagtaagttaagtttgtcatcactttttgccctggtgtagtattttccaaatagtaaatgctcaattcacatgtacattaaagtaaatactaagaaaaccctcacatgtaactagacacaattctattcatgtatctttgaaatcaactggagacattatcaattaatgcaaagatcctgggctttcaatccaaagaagcttacctctctgctccagatgctcatcttgctggctgtgtgtctccaggtaagttctgtaatgtggcagaaataatatttgtcttaaagcaatggttgtcagccagagtgcagtttttcccccagggcacatttgcaatgtctgaagacattttcaattttttttatttatttattttttttttttgagacagagtcttgccctgttgcccagtctgcaatgcaagtgtgcaatctcggctcactgcaacctctgcctcccaggctcaagagatcctcccacctcagcctcctaagtaactgggactacaggtgtgcaccatcacacccagctaattcttatatttcttgtagagatgggcttttgtcattttgcccaggctggtctccagctcctgggctcaagtgatcttcctgcctcagcctcccaaagtgctgggattacaggtgtgagccaccgcactctgtctcattttcaccatttgggatgagagacgttactggtttctaataagtagaggccagaaattgtgcttaatatcttacaataccca

SEQ ID NO: 1881920 - DNA, 4001 bp, Homo sapiens
tgcccagctaatttttaaaaatttttttgtggagaccgggtctggctatattgcccaggctggtgatgaactcctgggctcaagcaatcctcgtgcctcagcctcccaaagtgctgggattataggtgtgagccactgcacttggccctgtttttaaaaaagtaaaaataaaaataaaaatgttttattgctgcataatagttgtacctattttgggggtacgggttatatttggacacatgtatacaatgtataaaaccaaatcaagatagttgggatacccatcacctcaacaactttccctcttctaaggacaccagccataccagagtggggcccactctaatgaccttattttaacactattaaatctgcaaagaccctgtttccaaatacagtcacctttacaggtacaggaggttaggatttcaatgtatatttttgttttgttttgtttttggttttttttttgagacggagttttgctcttgttgcccaggctggagcacaatggcacgatctcggctcatcgcaacctctgcctcctgggttcaagcgattctcctgcctcagccacccgatgagctgggattacaggcatgcgccagcacgcccagctaattttgtatttttagtagagacggggtttctccatgttggtcaggctggtttcgaactcccaacctcaggtgatccacctgccttggcctcccaaagtgctgggattataggcgtgagtcaccgtgcccagcccaatgtatatctttgttgtgcatggcatggagacacaattcaaccataagcatgggcaaaggcttggaagggtatggagctcagggcagagctctccaccgtttgccacctcattacccacagcctttttacacatttcccctggtgactcaccagtccttacacctgcccggcatgctcgcacctccagactcttgctcccatagcccccgtgtctgtctcaactgctttctttctcaattaccaggcccacctcttcagggagctctctctgacttggaagtgccagtcccttcctctgttttttttttcttttttcttttttgagacagggtctctttctgttactcaggctggagtgcactggagtgatcatggctcattccagcctcaacctcctgggcgcaagcaatcctcccgcctcagcctcccaaagtgttaagattacaggtgcaagccaccacaccaggcctctttctctgatttctgagactttcacagtctgagggttcatttagtctacagtgcccaggtaggcatctttttacctgcccccttcagcttcctcccttctccatgccaagcccaggatcagggaacaagagaccttgagtccagccggatgccatggctcacgactgtaatcccagcaccttgggaagctgaagtgggtggattgcttgagctcagttcaagcccaagagaccttgagtccagcctctcagccatttccaaatttcctctgcaccctccctgcccaagtttctcacctgtgcttggatgtccccatgaccagggcatctgggccacactgtgtctcccaggagctccctcccactgcttggagccccatggagtccacttggcttcccagtaaccatggctgcagtggagcatgacccacacctgaggccatctgagggacttgcaaatggctccctagcccaggggtctcttttacccacctgccacatgccagaaattccaccattagcaagtctgacagcatccacccctgataaggacagacgccccaaggagagactctgccgcgagtcgctgggccagtacttgctgccaagagcctgacagcctgttgcttggtgacatctcactcaagtccttcaggaaacttgcaccccaaaggcaggagggggctgaaggagatggggctcctctgcagagctttgtccagaggcagcaggctgagaggtgggggggggaatctaaggcagcccaatgaccccaccctgcccaggggagaggctctcaggccccacaagctcagcctcttcctgtctccccacaccccctttattcctgcacctccctggctggagaaccgccccctgcacacactcccagcggctgggcagttagtgacctttggactgggaaagcactggagcctcctgggccccacaccctggctggcattcaccgggagcagggagagtcccagaactgtcactctcaggcaggcccagtccctggtgtcctcaagtagccagtcctgttctcccctttcttccatggggaggagctgggcacagggaagagggctgggccagtcctggccggaggcactgtgctgccacttgccctcagccccacaggtgcccctggagtctgtgcagaggcccggggcagaagccctgggggtgctcctactttcctgccagaggggctggaggataggatgaggaagtgtgctcagtgcaagaccccgagagtcccaacaagactcatttaggagggtgagctagccctgtctaataaggaactatttcaggtttgcagtaatcaagtctagcttgaggctgtcccaaatagtcagataatggaagccaaatgtctgcaaccatgatttggctcctgggcctagctgttcagtgcagacccagtgaggggcctcagccctgcacccagcttccaggcccccacctctacctcaagatatcagtgcaggcccagtcctagtaggtcctctggctaatgaagcctcctggagcccatagccctaccaattccagttagagcccacatagcagacagaacaagatgctttttttttttttttaaatggagtttccctctgtttcccaggctggagtgccatggtgcgatctcggctcactgcaacctccgcctcctgggttcaggtgattctcctgcctcagcctcccaagtagctgggattacaggtgcctgccaccacacctggctaattttttttttttttagtagagacgaggtttcactgtgttggccagggtggtttcgaactcctgacctcaagtgatccacctgcctcagcctcccaaagtgctgggattacaggcgtgagccaccgtgcccagcacaagatgcttttcttttcttttctttttctttttttctttttttaagactatgtctcgcactgtcacccaggctggaatgcagtggcacgatctcggctcactgcaacctctgcctcccaagttcaagcgattctcctgcctcagcccccaaagtagctgggattacaagcacatgccaccacacccggctagttttttgtatttttagtagaaaaggggtttcactctgttggccaggcttgtctcactcctgacctcgtgatccgcccgcctcggcttcccaaagtgctgctgggatttcaggcgtgagccaccgtgcccagcctacaagatgctttttaaattaagggcttcatgaagaatttcgtggttccccagaaagtgtaaggaatgtttagggtttggctaagcctggctttgaacctgatgctaataggggagaaggcatctttagacctgacctgaatccaagtcaggggtccagtcagttgcctggcacagctgggttggtctcttttctcagagacatctatcggctgtgttactgaggacagcaagttgagggttgcccccaccccaggagcacagcccatcactggccctattggcccttcataggcgtggtcctctgctaaggatggttaaattctgccaagctcccatcgtcccccccgtcaaaggggaagagggacattatgcatggtgcagcatggggcttgtggtcctctgtctgaaccttgagcatggcacccatgctgggttggggaggtacatacagagacacccaggggcatccttggagaagggctgtctttgctcggaaagtaaatgctcatttctgctctgtagcaaaatcctgctatgtatccaatttcctcctcaagc

SEQ ID NO: 1881921 - DNA, 4001 bp, Homo sapiens
ccaggaggcggaggttgcagtgagccaagatcgtgccactgcactccagcctggcaacagagcaagaccctgtctcaaaaaaaaaaaaaaaaaaaaaaaaaaggaccgtgtaatcctctgtccagcatctggttggtttgttcattttaggagttgcgggagcttcaggacgagaaggcagagctgcagaagatctgcgaggagcaggaacaagccctccaggaaatgggcctgcacctcagccagtaagaaccccactccccttgtctgccactgcaggcacaccaggctacccaccacatccctcaggccccaaacctacctccttttggcgaacggagggtgggccatttaggagctcagtccgccgttcacggatgagctctcaggaagcccggcctcagaggggcccagcactgatctctgctacccacatggggtgtcagcgagctcttagttaattcaggaagcacgttcattcctagtgaccaggacactcctattccttagcttcatatccagggcctgagggaacagatgggcaatgagaggatcgcttggtcagcctacagtcaggccagagggagcagggctggtttgggaacggaagcctggcacagtagaggtgcactcacccgccttgcacagcacagcccccttcctttcggggaactggccactgcatccgccagagtctgtctgtctctgctgcaggtgctgatggggtgcagaccctggtagttctgctcccctctgacttgacagctctcctccttggtgtcccagtctagataggttgctgtggacgcctgggccttggggtggatcacactgcggactgtggaacttgcccatttgtgtgatgattctgcattttcaacatagtgggtagcttttctcctcgagtcagggcgcatggttgcaagtaacagaaatccaactcaaagtggcttaagcaaaagaagccatcaggaatcggtctctgtctcctacctctgctatcctgtctgcctcacaggtgggtctggaccctgcaggggcaaaacagcactcagcaaggccatctatcagaggaacaaactccctcttctttgtgcatagctgccaggatcacccgagattgaccctgctcccgagtacccatgcctgacataagcaccatgaccaaggagatggggctcacgacctcagcacagcctggtctgcaccagaaatttgtagagtctagtactattaagaaaataggccgggtgcggtggctcacgcctgtaatctcagcactttgggagactgaggtgagcagatcacctgaggtcaggagttcgagaccagcctggccaacatagtgaagccccgtctctactaaaaatacaaaaattagccaggcatggtgggcacctgtaatcccagctactcgggaggctgagacagcagcatcgcttgaacccgggaggcagaggttgcagtaagccgagattgcaccactgcactccagcctgggcaacaaaagtgagaatccatctcaaaaaaaaaaaacaaatagctggtcagggaatctgatgtctctggtgggaatgcggtctgcccactcccagatgcaggtgctggccactcgccgtctctcctgtgcctcttacctttctagactagcccatggccgctgcttcctcccctcccaccctccgccctgcctgccacccactcagctgagtgccctgtgctgctcccgtctggcctgtcaacttgccgtgctctggcccgttccttcccaacccccagggagctccttgagggacgcaaggcccagtgtctgtccccatgctcagagcataggccagctgtgagggcatcccgagagcactcaccagaagcagacgtggaacagagctggcgtggagctggcttctggggtttgcagccagtgttttcctctttacattggatggacagcaaggcagtgtcacaggtcccctcctagtggaccatagacctcgaaactgtggttggtctctgatctttaaaatgtatcattgtggccgggtgtggtggctcatgcctgtaatcccagccctttgggaggctgaggtgggtggatcacctgaggtcaggagttcaagaccagcctgaccaacgtggagaaaccccatctctactaaaaatataaaattagccgggcatggtggagcgcgcctgtaatcccagctactcaggaggctgaggcaggagaatcgcttgaacctgggaggcggaggttgcggtgagccgagatcgcgccattgcactccagcctgggcaataagagtgaaactctgtctcaaaaacaaacaaacaaatgtattgttgcactttgtggccgcctggcactaccggctaacctagcttccaaatcccagtgtgagctgcctggccaccattccctcccagtgagtgctgtgggtgtcacagcatcaggtgtttgcaaacccagacaggactacctgaggagttgcttttgtgctctctcccctcttcccttcttcctcttgcaagcctataccggatgacagagatggcaaagcctcttcgcaggccctacattagctacaggaacagtttccagtttcattggcttgggaacatctggattcttcctaaattgtgtttcccagagttcttgtatgttcagtttgccttgttgacctggcttcccaaggtctgtccatctgcgcagcctcttctcatcctgtcaatctgctggcctatttcctgtttctgcagccggaccaggaagggaaggagctgcctcccgatctttagtaaaagccacagggatttttctaaatgccctgatgctgttttctaatccctcccttcgaagtctagcctgtgtttcccagagacctgccattttgtcactgagatgagtctaatctgatgatagttcagactgatctcagcttttaagaaagacccaggccaggctgggcgtgggggctcaggcctctaatcccagcactttgggaggccgaggcaggtggatcacttgaggtcaggagttcaagaccagccaggccaatatggtgaaaccccatctctagtaaaagtacaagaaaataagctgggtgtggtgtcgggcgcctgtcatcccagctacttgggaagctgaggcaggagaattgcttgagcccaggaagcagaggttgcagtgagccgagatcacaccaccgcactccagcctggccaatgcagcaagactccatctcaaaaaaaaaaaagaaaaaaagaaaaaggctcaggcctataatcctagcactttgggaggctgaggcaggtgggtcaattgaggtcaggagttcaagaccagcctgggcaacatggcaaaaccccacctctagaaaaaatacaaaaattagccaggcgtgatggcatgcacctgtagtcgcagctacttgggagactaaagtgagaggatcacttgagcccaggaggtcaaggttgcagtgagccatgattgcaccactgcattccagcctgggcaatatagcaagatcctgtctcaaaaaaaaaaaaaaaaggatcagactgtttccctcaattgcacaaactgcttcattttatttggtttagttctgccaatttagaccatgttcagtcctgtctcttgtgtaaacaaaggaattgttctgacactgaacaagaatggagcaagaacaaatggctatgccatctgagccttcccccttccagacagcaggcagcagaatggaggccggggagaagcctgcagactcaggttcctgctggggagagcggtagagactagtgcagaacagggccaggtcttggacttctggcctcaggccatcctctcgcctcagcctccctcaaagtctttttgagcccctgcaggctaagcagtgtgttctcgtgccagatgcagtcccaggctcagcctcagccctcagcagacgggagccagtgtgatgaggcaactctgggattgtacagaggcggaaggcatt

SEQ ID NO: 1881922 - DNA, 4001 bp, Homo sapiens
gctcctgcctctgcaaccaaccccacattctcatacttccagggcccccttgcctttgcagaattcatttcagaggctccagctttcacatcaggcccatgggaaagtacccccttcatgccaaatggtgaaagtgcagccttagctctttccccaccttcatacatggcttcagccaatatttcatttcaagattatcttccatagtacacagacagtaaactactgtgtccctccaaatccaggaacacatcaagattcctgattggttaccttgcagcactttacactagattgaagtgagagtgaagcacccagcacttttccggtgttgggagtgagggcagactcccagtacacagaaaatcctctgtttaaatatcaatccttcttatgctcaaagtgcatattgagataaatgtcataaaatcagcccttctctactgcacttgaacatcctgcacaggtgatctcacagcatgtgctggatgggaaagtacttgccctctgctgccttctcagacaaattgggtacagtcacatagaaaaaaactccttttaaatatcctttacttacatctatagatattattctacacatcaaaacatttctataaacatattacctttccataatataaaaaactaaaattcaggttttataaatttcaagatggctgactagagaggtcacatgtaagttctcctcagaaagaagaatggaacgtagaggtaaataatcaaaactcacatagaatattaaagagagggtgccggaactattggagaactcacaggaagaagctaccatacagaaaaagacagaagcaaaaggctggctgagatcaaaccctcctgagggacttggtatttcatcaaaaaggtaaatgttcttggctcccttcacccttgcagcagactgctggtttccaaactttagaggtctcctctgctttcatgagcccaagcactagtatgggtggtgatttggtaactttttgaggacatcacaccagactaccaacttgcacacagtcactcaccctgttcctggacccaagctgtggtagcaggtgccatatttgctgcatacccattgtgagactgttttctgcccaggtaacctcagcccttgtgtctccacattgccagatctcccacagacattccccagcaccagctgggattgtgacagccacacaggcctgactggacctagagaagctgcagaatgcccatggcccaggtctcagggagtgctgctcctaagggaagagagagtgcagcccaccaaggaagtacctcttccctggggcaaaggaaaccagagcacattctttcctgtgcttgagagcttccacttatgcggtaaagttgactgtgtctcttccagcagagacaaagatgccatgctcagctctgtgggaaaggaatatgttccaccccagtggccatatggccccagtgcttgagcatggctgtggagagggagacctcttttttctaccctccccacaactactgcagaaacagccatggctgcacgcataggagactgacataggcatgctggtggatggtcattctaggactgttaggggtggatgtaccccattggcagtgtgcttaccaggcccaggcttgcaaaatggcagggcccttcccactctctacatagagcagcagcattcctgaagcagagaagaggagagcctcaaagttttacgttttgggctgagaaaagaagttccacaccataaccacattggtagagaatcacagagcaggtacctttcatggctctcagattcactgcagcttggagatagtgaggtctgtctgacccgaatgtctggagtgccaggacagaaacatgacaggaaggtgaattgcattcctacctggccaggccgtggagctgaggtagaaacctcagcagaagcctcagcacatttcaccaggagctccctcaaccacccagtcaggtctggtgctcgtgtttaccgttgggatatctgaggtcaaagttgagcttgacagtccagctccacccagctttgtgggtggtccacagaacagcccattggctgaagcaaaagagagcttctctcagtaaacaaagatcaagtatatgcccatctgcttctgcagatagtcagctgttacctgtaaatgccacctactggcctggagattgaactgcacagtgtaatacaaaacctgctgacacaagcgcacaacagtgaggaatgagctaagattcctgagacttcctctatcctgatacccaaggaggcagtgaacctgctcacaaacccacccagtatgtagctacaaccagcatttgagaaagccaccacacaaaagctatctataaccatggaacacacatagaatccttgccactgaaagcatccagaaccaaagtaaaataaccatacacagcatacagcatagtcacatcctcaaggaggaaaaaaattcctttccaaacgaaagtaaattcaaaaaaaagaaagagagaagaagagatagtttatctagatgaaaaggaaccagaggaaaaattctggtaatatgaaaaaacagagtgttaaaacaccccagtgaatcacattaactctctagcaatggattctaatccaaaggaaatctttgaaataccagataaataattcaaaatattgattttaaataagctcaatgagatacaaaagaaaattgaaaaccaacacaaagaaattagaaaaacaattcaagacatcaatgaaaaaattgctgaagaggtagacattaaaacaaaacacacacacaaagaacatctagaaatgaagaattcattgaattacaaaatatagttgaaagctttaataatagactagaccaagcagaaaaaagaatttcaaagacagatcttttgaattagcccagtcagacaataataaagaaaacagaatttcataaatgaacaaagcctttgaggagtatggaatgatgtaagacaaccaaatgcacaagtcatagctatttctgagggagatgtagagaaagttaaaagtttggaaaacttatttgagtaaataattaaggaagatttccttaggcttggtagaaatttagacatccatttctggagaggttgtggagaaaaaggaacgcttatagactgttaatgggagtgtaaattagttcaaccattgtggaaaacagtatggtaatttttcaaagtcctaaagacagaaataccatttgacccagcaatcccattactgggtatatacccaaaggactataaatcattttattataaagacacatgcacataaaagttctttgaaacactattcacaatagcaaagacatgaaatcaacctaaatgcccaccaatgatagattagatttgttaaaaaagtgtaaaaaaaacttgtcagccacaaattttgtattctgctaaattcagcttcatgatgtacatatacaccatggaatactatgcaaccataaaaaaaactcagatcatgttctttgcagggatgtggatggagctggaggccattaaccttaacaaactaacacaggaacagaaaactaaataccacatgttctcacttataattgggagctaagtgatgagaacacattgacaaatggaggggaacaacacacactggggcccattagatgatggagggtgagaggagggagaggatcaggaaaaataaataatgggcactaggcttaatacctgggagataaaataatctgcacaacaaagccccatgtcacaagtttagtttatctatgtaacaagtctgcacatgtacctctaaacttaaaataaaagtaaaaaaaaatactttttatgctactttacataatgaaaatcagaaaactcagggttgatcaactccttgtcatttatgcctcttcaggttactgccattcatagatatttctcatcatcaattttgaatgcaagataaagagcccaaaacctaaaa

SEQ ID NO: 1881923 - DNA, 4001 bp, Homo sapiens
tttattttttaggatttccaaaagatagagctaaaattaagcctagattgagttcatggtaagtagaaataaaaacaacctaaagatttcccctgatatagtcaaagcatactttaccagtacatagttctgagctagagaaatcttttacaggtttacaagatgggtagccacacactttaaaatgttcctctaatgggagctgtatcctcttctccacctgtggcatcttgacccctctccacttcaaccaaggctggattttctctactccctttcttctctagcgatcacaagagctcatccccagaaaaaaatgtcaagtctaatccaacccactaagatctcatcttaaaaactgcaataaaacaaatagtcatagtatagagaacatgtattaaatgatctctattcactaacttgtttccttcaggtttacaagtgaaagcaaagcatactttaccaatacatagttatgagatacagaaatttgttttcacaatgggccattttcccccatttcctcctttaaacatcctccttcttaatgctccctgcattctcctcaagctgtcaagtttaatcaaaacttgttctgatggaaaaatttgctatgcatatcacttctgcataagagaatggaaatagtttaaagcagcggtccccaacctttttggcaccagggaccggtttcatggaagacaatttttccacggatggaggttgggaaaggtttcaggatgaaactgttccacctcagatcatcaggcattagttagattctcataagaagcatacaatctagatctctcgcatgtacagttcacagtaaggcttgcgctcctatgggaatctaatgccaccgctgatctgacagggggcggagctcaggtagcaatgctagcttgcctgctgctcacctcctcctgtgtggcctagttcctaacaggccatggactcataccagtctgcgccatgggatttggggaccccttgtttagaagatcaccaattccaggagcattttcatggaataacccagtgctatatattttttaaagttaatttcaatttttttagagacagggtgttactctgttgcccgggctggagtgcagtgttgtgattcatagttcacaacagccttgaacttctggaatcaagcaatccccccacctcaagcttcctgagtggtggggactagaggtgtgtgccaccatccgtctaattttttcaatttctttttagagagaggatctcattatgttgaccagactggtcttgaactcctcccctgaagctatcctcctgcctcagcctctcaaagtgctgggattccaggtgtgaaccccagtgcaacttcagcatttataaaatagttcaaattcattgaattttagaaattcttacaatctcccgtggtaggtattagtaacttcattatacagataagccaatcagagcataaacaggtcggtggcttgcccttactcacaggcctaaataagtggcagagcccgagtcttagcatacctttcattgaaatcctttctcttagagcacaggtgcctttaaaggagcttaaagtctgagtgtaagtgaacagccctatgcaagagaatttcaggtacgtaagatttgatgaaaagggaaaggcaaaactttttggaatctatcagattttggtccattgtatttaattgaattgttgaaaatgtatctttacaaatatccacatataattgtctgatattaaggttatgaccaaaggattctgatactccatttgatgtataagaggaattctgtggggtatttgcttgaaaagactcttcatgttagaacttttagccagcaagtcatgttgaagcctgctatgcttcttaatgcacaaacaaaacaaaactaaactaaactaaactaaaaaacccactccagcctaattttgttttgctcttttctctcccttttccagtgttgctttttgactctatactgcccttgttgtacttgcatgaatcccttcttcttagcctttcaaggaaatgatgaatggcttcgtatcttgcccatctcactcttctgcttcccaatagctgctagaaaataattcagcaccagtttacttttcagtgtgtgtgttatggactgaatgtttgtgtccccccaaattcatatgttgaagtcctactccccttaggatggtttttggaagtgagacctttgggaggtaaattagcttttaggtttagatgaggtcagtggcccccgtgatgaggtcagtggccccttataaaatgaagaagaggcctggcacggtggctcacgcctgtaatcccagcactttgggaggctgaggcaggagtatcacgaggtcaggagatcgagaccatcctggctaacacggtgaaaccctgtctctactgaaaaatagaaaaaatcagcgggcgtggtggcaggcacctatagtcccagctactcgagaggctgaggcaggagaatggcatgaacccgggagacggagcttgcagtgagccgagattgcgccactgcactccagcctgggcgacagagtgatacttcgtctcaaaaaaaaaaaaaaaaaaaaaaaaaaaaaaaaaaaaaaaaaaaaaaaaaaagaagaagaagagaggtcagagtgctctctctctctctctcgctctctcgctctctctctctctctctgccatatgaggacagagccagaaggtagtcctccatagacaagtgagagaaccatcaccagcaatggaatctactgccaccttgatcttggacttacagtctccagaactgtgataaataaatatctgttgtttaagccacccagcctatggtattctattacagcagcctgagctaaccaacacagtatggtttgtagctagtctgtgtgattttaccacactcctagtacctttcagaaactactgtagtacgtgacgttttctatttatgcagctgtgcagtgttcagttcaccttggctaaatgaacagtgacactttggacactgtagtacatatttcatatactaagatactgtttatttgactattcatctaataataattcattatattccacagtttttaccttaaaagattgtagtgtcaagcctgaactgtgcattattttttaagtctgtgtaattttaaaatgctgcgtttgcactgcattttaattataatttttacccagttcttgcaagcatgattgaggcagctgaatattttattttaagccctgaaaataagatggggcttagcgatgtcttcagtgatcatcgtagggaaagggatatttgcagtagaacatccaggactaccgtgcaggcctgtgggttatagcttgacctacttgcttgcagttctctcactagaaaaggtagtcctccctgctcaggcatttggcagaaagcccaatgaaactacttctgtttttggtgagagcaactgatctgaggaatttttgaatacagaggagagaaatagggcattttccaaggtcccagtaaatataggaacgtggaatgacagcattttggaatatgtatgcagggcaccagggagcatgagctatgtggctggatgcctggtgggaatgactgtcagaagtttcatttacaggctcctgcaggtttcacagagaatcattagatattattttttcaagactgaaatgagataataaaaatatgttgacctaaacactgcctaccaattttctatttctatgtattgcctcttatgctgcaagattaaaaataacataataagaaaaaaataatagcttctatgtattgaagacctaggatggattaggtacagatttaggcctttaatattttatctaattaatccctcacagaatcccacagatttgtgtgcctatttgatatatctaagatgaagcatagacttacaaaaaatagtttctgggctgggcacggtggctcatgcctgtaatctcagctctttg

SEQ ID NO: 1881924 - DNA, 4001 bp, Homo sapiens
aagtgttcgtctgcatgttctctgtattctgtaattaaaacgtaatgctattgtacccaaatcttagacttttggaaaactatgaattatgctgtattagttatctattgctgtgtaataaattactcaaaaacttaatgcttaaaacaataagcattttttatctcagtttctgtcgatcaggaattagagagcagcttaggtgggtaattctagccgacgactggtgagtttgttgtcaggatgtctgtgagaacttcagttatctggaggctggccttgggctgcagaatcaacttcaaagatggctcactgacatggctgttcgttggaggactcagatcctagccccatgaatctctccatagggtatagggcacagggtagctgagccctttgatagcaaccttctcccaaaataagaatttcaaaagggagagcaaggagaaaaccacgatgctttttatgctttttatgacttagtctggaaagcaatgtactatcactttcacgatattttatttgtgggaagcaagtcattaagtataagccataatcaaaaggaggtgaattaggctccacattttgaaggaaggagtatcaaatagtttgggacatattttaaaggcaccacacttgcaaatttgtcttctacaaataaatattagatgtatatgatgcccatcaacagatgtattaatagaaacggaaaattaaatggataaattgtatggtgtgtgaattatttctcaataagactgttaatatttttaatagaaagaaatggagagtgcactttattaagagagacaattaagatctttggagcctgttacgtacccagtattttacctagcatagtttatttaaacttcaaaacaaacataaaatagtggtgtgctggagctggttcacactggcttgtgagagacaactgttagcatctctataaagttccatgcttaataacatcatattggaggtttaaagtcaaccatggtgggagtatcatatactaagggggatcactgatttgtagaatttaccaatttccgttgtataattggccctaatttacagagaaggaaaattggagaatgagaggtttttaaatttgttctaaaaattgtcttgatattttttcttcctccaagcggtagtaaatggaaagaccagagtttgaacccagtgttgaatgcatgtagagctagctttgtttataatatgcatgctgcctctctaagaggattaattactacacattgcaaatcatcttccttggctccatcatgatattgctgtgtttatgataacaatgaggactaactacagctaattggctgaccatttaaggttgggaaataattctatttaagtccagagactggaaaaaagactagtaaatatcaaaaattagaagagctaacttcagtttaatattaagtagaaaaatgaagagagagaaggtaacataggggagaactacagtctgttaaataggaaattgttagaaattagatatatgaaacatctctgcattatccagcagtgtgagaatattttttgcagcacagaaaacactgaatctcctttttctagtttgacatttatctctcaaatatgatattcactacctctaacctcagataaacactcttgaaaaatcattttttatttatacaatttggccctattttgcatatttaaaacatctatattccacacatacatacagagttatgcagacttattcccatgcaggtatccatacaaaccctaatgcacacatcccccaaaatggaagctagcaacatgtagaagatgaagagagaagatgaaattggcttctctggaacaatagtttttcagcaataaccctaatagctcaaaaatgatcacatttagagatactaaattaaaacaccgtgccagagactatggacctgtgcattaaggcacacacatatgaaatctcaccaccatgctagagatgaaaacatgacagttaggttaccatggagacagaagcagagacactagctactaactctgaataccaattaacatctagcacttctttatgttactaaaattggttgccagggcaactcaaaggattggctcaggttatcaaattaattacaaaccaaatctaaaaaagtcagattctttagaattttatgagcgttaacttaaataaattatttatggggattcatgctggtctcaggatggcagctgttatctgcctgtgattctttttatcattccccagtccctcttttctttctcttaaaatatttctcaggcagaaactggtatatattccttaatattctcagttatgcttccagcaaaagaaagctgaaatgaaacttctatataataagttattttaatatatatttattaaaacttaggttatagctacacaaagtagttgatcgctaggtacctacattttattaaggaaccctctctgtctaggtgacagatgctacatatatcttattcagtagttaaaaaatctggccatgtagatattaaccatatttttctgagaaccaagtgtcaaactaaatggttagctatgagcaggagctctcccgaagccttgctgttttctgaagtttgtagtgtaagcaacgacagagactagtagataagatccagcttgtctcatctaaacacagagtctgccattcaatagctaggtaaccttgaacagggcatttaatttctctaattcagtgtcctcatttactgagggatttactgaacatctgactccttctcaccaactctactgcagctgccctgcttcaaaacaccagcctttttgccctggattattgcaatagcttcccaacttgtcaccgcagccagagtgattctaataaaacataagtcagttcatgttatttatcctgtgactccaacttcttagaattgtagtaaggtcaaatgagatatcccctataagggactcagcacagtcccaaacatccagtacacatccattcactggacaactatctactgagtgcctactatgtgcctggtgctggggagagagcagtgaaaaataccaagaaatatccctgaccctgaagaggttcccggaaaacacaaaatgtgttagattgtgttaagtgctaagagaaacactgaagcatggaagacttgcatggaagggggacacaggaccacagaagacctcattgagaagatgacattgagtaaatacctggcaagtgagagagtgagccatgtaaatatgtggtgaaggagcagcccagggagagaggtcggtaaggggcaagtccttccatggaagcagggccatgtttctatgagaagagtgtctgatgagtggcaggtcagagacattgtaaagggagatatgtatcacttagggccttgacggacacagcaagggccttggtttttactatcagtgaaatgaaaagtcaacggaaattaccatgagttgattgtgttttattaagactcttttggctgctggtgacaagttaggaagctattataataacacgtggcagacaggctggtgtgccattatatctgcccatgtatgtactcagtatataactgtaatgttattttattattattttctttcttttcattatttcttaaacaatatagtgtaatgttattatggagggcatttttgtttctcaaagctttccctccaatacactgctacatttcttcacgagagtaaataagaagactgttctctgttccttaatgagaagaattaaatatttgtcaacatgaaagctttgagcattcaactggaagtttttcttatttcttgaaccttacataattcttcctggagtctaagaactagttgtattccatacacatacctggttttaagtattttgtacacatactgtacaaaatgtaacatgaatgaaagtcatggttcaagctttccaagttgaggttttcctttgtctcagccacaa

SEQ ID NO: 1881925 - DNA, 4001 bp, Homo sapiens
ttggagcatttagtccatttacatttaaagttaatattgttatgtgtgaatttgatcctgtcattgtgatgttagctggtgattttgctcgttagttgatgcagtttcttcctagtctcgatggtctttacattttggcatgattttgcagtggccggtaccggttgttcctttccatgtttagcgctttcttcaggagctcttttagggcaggcctggtggtgacaaaatctctcagcatttgcttgtctgtgaagtattttatttctcgttcacttatgaagcttagtttggctggatatgaaattctgggttgaaaattcttttctttaagaatgttgaatattggcccccactctcttctggcttgtagagtttctgccgagagatccgctgttagtctgatgggcttccctttgagggtaacccgacctttctctctagctgcccttaacattttttccttcatttcaactttggtgaatctgacaattatgtgtcttggagttgctcttctcgaggagtatctttgtggtgttctctgtatttcctgaatctgaatgttggcctgccttgctagattggggaagttctcctggataatatcctgcagagtgttttccaacttggttccattctccccatcactttcagttacaccaatcagacgtagatttggtcttttcacatagtcccatttttcttggaggctttgctcatttctttttattgtttttgctctaaccttcccttctcgcttcatttcattcatttcatcttccattgctgataccctttcttccagttgatcgcatcggctcctgaggcttctgcattcttcacgtagttctcgagccttggttttcagctccatcagctcctttaagcacttctctgtattggttattctagttatacattcatctaaatttttttcaaagttttcaacttctttgcctttggtttgaatgtcctcccgtagctcagagtaatttgatcgtctgaagccttcttctctcagctcttcaaagtcattctccatccagctttgttccgttgctggtgaggaactgcgttcctttggaggagaagaggcgctctgcgttttagagtttccagtttttctgttctgttttttccccatctttgtggttttatctacttttggtctttgatgatggtgatgtacagatgggttttcggtgtggatgtcctttctgtttgttagttttccttctaacagacaggaccctcagctgcaggtctgttggaataccctgccgtgtgaggtgtcagtgtgcccctcctgggggtgcctcccagttaggctgctcaggggtcaggggtcagggacccacttgaggaggcagtctgacggttctcagatctccagctgggtgctgggagaaccactgctcccttcaaagctgtcagacagggacatttaagtcgcagaggttactgctgtctttttgtttgtctgtgccctgcccccagaggtggagcctacagtggcaggcaggcctccttgagctgtggtgggctccacccagttcgagctgctttgtttacctaagcaagcctgggcaatggcgggcgcccctcccacagcctcgctgccgccttgcagttcgatctcagactgctgtgctagcaatcagggagactctgtgggcgtaggacactccgagccaggtgtgggatatagtctcgtggtgcgccgttttttaagccggtctgaaaagcgcaatattcgggtgggagtgaactgattttccaggtgcgtccgttacccctttctttgactcggaaagggaactccctgaccccttgagcttcccaggtgaggcaatgcctcgccctgctttggctcgcgcaccgtgcgcgcacccactggcctgcacccactgtctgacactccctagtgagatgaacccggtacctcagatggaaatgcagaaatcatccgtcttctgcgtggctcacgctgggagctgtagaccggagctgttcctattcggccgtcttggctcctccccccttttcttttgttcttaatggtaaataaaataatgatgtatctcgtaatcaattgatgacatcttagaattgataaaatatgctaaacttccttcctccttcttctgatcaagtcacataatatgtaatcttaaaaacatttattttagctgattttgataagcatcacattgtattcacagtattgttcacatatataatgtttacattaaacattatttcacatttattaattataacatgtaatcttatattgcattgatgctggagaaaaaatctttcatttactcccaaatgtatattttcacttcttttaaggcatttattataatagtccaagatcaattgcaagtattcataaatgcaataggaaatgctataaattgatcatttaaagaaatcttagtaggtttagttttttacaacagagctgcattgaacaattactgcacacatacactgtggtaaggctgagaaagcacacaaatgttaacatgcagccccaacctcaggaagctcaacatttgtcacatttaatgacatgaattgataaggattcttttttggttttgtaagagaaaaggtcttctgtcatccaggctggagtgcagtggcacaatcatagcttactgtaacctcaaactcctgggcttaagtgatcctcccaactcagcctcccgaaatgttgggattacaggtgtgagccactgcacctggcctgaatgtattctttctaaggaaatctgaggggtcataaatagcatggggcacataattttctttctttcagatgtaccaagaggaaaaaaaaatcacaaactttgataagtaaaagacataaataatatgatagtgctgcattaagtagtacaaagtggaacacttcagatgtacccagcaaatgctcttgttgaacaaaatagtctgggtgtctgttcatttcactcataattactgagtgcccactctatacttaatatgaagatgtgatgattagttttatttgtcaacttggctagaccacagtccctaattattcaatcaaatgttaatccaagtgttgccatgaaggcattttgtgtgttattaaagtccacaatcaattgattttaagtaagggagattatactacataatctgagtgggcttgatttattcagtccatttaaaggccctgagagcaaagctaaggcttccctgaagaagaaaagcaagccctatgaggtagctattagcattattcctattttacagactaggacactgaggcttagagttcaatatctgcagacttcagttcaactcatgcccaagttccaaactgtccctcctgatatccagccctacagatttcagacttgtccagccagtccccaaaatcacttaggtctatttcttgcaataaatcacttaacatctatttcttactggttccgttactctagttgaaccctgacttaatatatgagaagcaagggatacacaagacagactcaggccttgttcctaccaattgtatggtttagtggaaatgttacaggagaagctaagtgattacaagacagccttatgaaggtaaaagtacagatacctagcttagacttcagagtgttacgagtaagaaaagtttcctggaagactgaagtttaatttgagagttgaaaaactgagtatgaattaagaaagtaaagtgtgtgtgtgcacatgcgtgttgcaggcagtacagtgataaagcatttctagcagaatacctaccctgtgctaaaggctacaggtaagagggagcatggtacaatggaagactggtagaaacttctgcaaaactggtgcacagagagtgaaggtggagtgctgagagataaaaactatggaaatgagcagaagctagatcatgaagtcttgagagtcatgtcaagttgctgggcacacagaagccacttaagggtttttagtatagataa

SEQ ID NO: 1881926 - DNA, 4001 bp, Homo sapiens
atgaatctcagaggcctttgaaaggcattatgcatggaagaatccagtctcggctgggcgtgctggctcacgcctgtaatcccagcactttgggaggccaaggcaggcggatcacgaggtcaggagattgagaccatcttggctcacacggtgaaaccccgtctctactaaaaatacaaaaaattagctgggcgcagtggcaggcgcctgtagtcccagctactcgggaggctgaggcaggagaatggcgtgaacccgggaggcggagcttgcagtgagccaagatattgccactacagtccggcctgggcgaaagagcgagactccatctcaaaaaaaaaaaaaaaaaaagaatccagtctcaaaagattatatactatatgattcaatttctatggcagcctcaaaaagacacgatgaatggagaacagatcaaagggataccatgggccaggtgcagtggctcccgcctgtaatgccagcagtttgggaggctgaggaaggcagatcacttgagatgaggagttcaagaccagcctggccaacactggagacacctcatctctactaaaaacacaaaaactagccaggtgtgggggcacatgcctgaagtcccagctactcaggaggctgaggcagaagaattgcttgaatgtgggaggcagaggttgcagtgagctgagatcacgccactgcactccagcctgggtgacagagtgagactccatctcaaaaacaaacaaacaaacaaacaaacaaacaaacaaacacacgggatgccatgagggagttttttagggcaatggaattgttctgtatcctgattgtggtagtggttttatatgtatattatacaatgactgaaattcatagacctgtaaatatatacagacacaaagtcagttttactctataatgatcacaaaagtaatctagggagcatagctgtgaagtgttccctaataggtcctcccaacctccttctccttagggggtccaaggcctttccttcctctccttgcttctggattctgtctcatagtgctcttctgtttccctcccagtcttggcactaccaggctgtagcgcttcatccaggtcttgtctggggccgtggctctgtgactttgttccacactcttcttagtcaagaacagccaccaaaatctactgggttttcagccagttccctcgaaaaacaagcaagctacaacaaaaacagaagtcatctttgatttctctttcttctacctccatatcctatttattagtgagtattgccagttctgctttcaaaataggtcctgaacctaatccctgcagccacctctgtctaggccattgccatcttaggccttagctactgcaacagggttctatctcgtctccctgcttccacttcttccctgctattgtctattcccaatgcagcaatcagagtaatcccacgaaaacacataccatgtcatttctacttacagtcctcgaaaatcttcccagtgtatttagaataaaagccaagtaccgtcccacggcctccacagggctggcctcctccccctgcttcctctggtattgtgccctggccacgctgaccttcttgctctttccaggatatgtgatgcttattcccacttcagtgctattttttctgcctggaactggcttatcccagaaatctgcatggtcgctacttcagatatttcaagactcagccctaaagtcacttcctcagagagagctcctctgcccgtttgtttcaaatagcttccccaggcttccagtctctctctagccccttaatctgatttatcttctctcagcacttaaccacctcgtgcaaggatgctggcttcccatggcaacatagaatccacactcattacatcctagaatgtgctatgcgacctggttcgcgcctcccctctgacataaccctctgctcctgaggggcaattccctttgccgtgccactccctgtgcacccctctagacacactgacttccttgtgttcccggaacaaagcaagcatgcttccacctcggaatctttgcatttgtgattccatctccctggaatgctgttcctccatagagcttcctagcacattctctgctcaaatgacacttaatcagagactttcttgaccatcgtatataaaatagcaagcccttcatcattctgtactcctcttatctgtcttatttttcatggcatttataactacctggtgtgtgtatagctattcatctgttatgtgttcttagctccctgtactaggctgtcagcctgcagggagccacgactttgttttgtccactattgtctttctctgtgagtctcagcctcattcataccaatgttgctttgaggatggctgggtgcagggaggcactggagtaccaagagccctggagagacccctggccatgcggctgttgttccttgtctgtctctctcacccgcatgtaagctcgatattggcggtgaccgagaggcagggcccagtgcatagtgggtgctcaagaatagttgtagaatgaatgaataaatgatagaggcctttggatatttaaaaaggatgttttggcttttaaaaggaactttccatgttttaaaacctaaatgcagaataatggtatgaattggccagtgaggaattatcttatgtgaagtttactgctaacatttaaacattttcccctgcctagtaaagactttttgatgtcttcccattgttcttagggtcataatgcactttaagatggctcctgcccctttgtcagcccactttcccttgctctgggtctcagtcacacaactctcctttcaatttctcctactcgtgttccctcccagtccagggcctctgcctgcaagacttcctctgtctggatgctctggtccccaccctccccagagttaactcctcctcaccctccccatctccgctaaagcctcagatcttcaagggaagccctccctgacactcaggcaaggttaatgtgccctcaaatcaccaggcacctctgatgtacaccccagatcccaggtgtggcctaacatgtgtttgtgtgattatatagttaacgctcccatgagggggaactgggtctgcctttacttcaccattaacttctctgtaaactagcacttctgcaaacagaataggctttaaaacaatatttgtaaggccaggtgcggtggctcacgcctgtaatcccagcagtttgggaggccgaggtgggcagatcacgaggtcaggagatcgagaccatcctggctaacacggtgaaaccccgtctctactaaaaatataaaaagttagctgggcgtggtggcgggcgcctctagtcccagctactcgggaggctgaggcaggagaatggtgtgaacctgggaggcagagtttgcagtgagccgagatcacgccactgcattccagcctgggcaacagagcaagactccatctcaaaaaaaaaaaaaaatttgtaaaatgaaaacattacttaattaatgatataaaagcgacttttttatatagcctcaagtttagtgtaaggcagtgaaggtaattgttaaaacaaaagtcaaggaaacccgttaagctcttaaccccctggtactgttaaaagatgagagatgctgtagtgtagacaagttaggacaccaggcaggtgagtttccaggggcagagagaggagatgagcttcacagctgctgagacctgtccctctgacttgggcaggcatcatcgttatttgaaagtacaacagggccaaaccttcaatccagtaacacagctggtgctcagatttttttttttaaacaacatcatgtggaattttctttatgtctttctactaaaactcaaaggatgggaataagaatagaagagatcattgaaatcagctcaacataaggtaacctttgagcagtcagctgtgtcccactgtgaactgcctggccacgagtgtgcgtgggggagaagggggtgcag

SEQ ID NO: 1881927 - DNA, 4001 bp, Homo sapiens
tcatcaggatgcattcagtggggaattttccatctatccaaagcagatgacattggacaatagaaataagtgagagagaaagggaaagcaaagaatggaaaggaaaggaaaaaagcaaacgtacaccacagagacatgttttcaattgcccactgtacagctttactagatctcctacaaatacctcaaactgtgtgtccaaaagtgaaccctccatcatttatccccaatgtattcctcctcctcccttttctttcttggtatctgattgtttcctcattcatccagtcactcaagcccctaaactcagttattctccctcccttctaatgactctggtcatcaaatgctttggattacatatactttatgtttctaaaatacatctctttttctgaaaggtcactgccattccttcagggccaacactcatcagcttttgtccagatgagcacaggagctccctactattctcccagcctctaacatttctccatggcacttgtcacagttgcaattgcatttgttatgggattatttgattgtctgctccccatcatcctcttgttctacttgattctgccctcttaatgccaactgttcggttatctaacagtagaacagtgagagaaccatctctaaataaatagaattaggcttttttattagaatctcagatgactaccttctgccttttctcaccctgagaattgtgactatggagtcacaatgttcccctgtaaacctgactcctagaaaaaaagtaaactgaaaggaaacaaatgagaggataaatacatcaaatttcttctcaggtcatcctgagttcactagacctggaatggagcatggtgcttattctcactgttgagttagaagtgtaataactagtctgttagatggtgcccagtgggccacatgtcttagtatgtatccttttctcttctctcccgcattgaacctggactggacctgtgactctctttaaccaacagaacttggcagaatctagtgctggtcctggagctaagtcttgagaagacctggaggcttccacttctgcgcttttggaaattctgagcttccgtgttagaagagttgctacccttctggagatactacatggaaagacctcatgaagaggccatatggaaagggagaagccttgtccaaccatctccaccaaggtcccaggcatatgagagagccaacttggacagtctggtcctgttgagcccccagatgcccacagtctcagttgacaacatgtggagcagaagaactgcccagatgagcccagccaacccagtgaatcatgagaataaggaaatggtttttgcttaaagcttttgctttgaagtggttccttatgcagcagtagatatctgaaacagggggcattgattaggtatgtggtcttctttaattattcatttcactgaactccacttccaggcatttagtatattcttctgtgggttgatattagctattgaatgcaaaacccctctagttcacaatcagcacaagtctttgatttttttttttgaaaggtgaactcatttgacggcccttatcaatatttgaagcccagaaaagcacatacataacaaaaccagagcttcaggctataaatggaattggctcgattcttcttgctcttttctgcatcttgctcttttctgcatcagccttagcatggcaccattagtgatccatgagatagctgtttagggccctgaaatagattgatctgaagttcccttggcaaggaataaagacaataataggtagaaggttgaagaagttttaatttagagaaattttacgaagtaagaaggaaaataaaagaaagccaccaaattgaataatttccatcgtgtttaaagatgctaattcaacccactggcaccagggaatgaatcttatcttgtgttgacattcctccttacataaagtagatttgtcactgggaagcagctgtctggccaggaactgtgtctcccagcaccctctgcatctaggtgtggacatatgactagtacttaccaatggaatgtcagcggaagtgacgtgtcacaatgagccatggcttttaagaagtcattatttcttttccatgttccctttcccattacgctggctggatataagtgacatcaaggccctaggggatggcagaactcccagatggaagaaagctggatgtctgagtcatggcaaggagagccattcaccaactaggaaaccacgtagaaatattccacaggagaaataaacttttgttgtatttgagcatttcaaaacttgaggtttatttgttgtagcagctagcatttccctaatgaatatagttgttcacttatttgaaaattcacatagatttttcatagaggagatcattactagttctcaaattatgggggaagttcattcattttccttcacctctgttcttacatctataaaatagggctaatgctctgtatctccaaggattgttctcataccaaatgagatactattgtattcacaataaatgagatactatagcatctcatttattgaacattaccataaaccaggccctatacaaagcactttacttaccttatctcattgaatcatcccaataaccctatgaagtaatttcaattagcctccatatttcacacatgagaaaacagaagcttagagaagttaagtacttgtcccatgttacacagctagtcatggcaaagctagtaattgaacacaggcagcctgacttcagaggccacatgcccagcaccagtcctctctgactaggacaatatagagcacccagcatggagcctgatacataataaatgaacaataaacacaaattttattttccctccactttaaagaaagagacaatacgaaacctaagtgtaaacatacacatttttggttaagtgcacaaaatacacacatacacaaatttacacaaccttcactttattcacagatattcagctagtatgtttaaactagaagtaaaactagaatttcctggagttcatggacagcactgctgtacaacatacatatgtcatctcaaccaacaaggttattttgtgctcatagcccagctgcagctgcatgcttcaaagaagcagcaagaacactgaagaaatgaatcccaacatgactaatgcattttaaagttgcttgtgaaacattcatgttattgatctgctgcaggaaaactgacagaaaatctagctcagggatggacattactgcaggaagtgcaggaacgctgggtccctaaagtctttctcatttcatttaatataccacatatttcttgaagcaaactagtttaaacacctagtctgaagtatatcttagaaatagactgaaattgatagttttggtcatgcagcactttgtatacctgaagtacattttaaaaaattacaaaaccataatgggaatgctagtgctttctctaaagtcctatcaactattattagattgtctatagaacccaagctcagagtgctttttcaaagaaggtgcagcaattctccccattctaattgccataccaagagtaatctgtcttctgggctttggagctgctgaaccactttattcttttgcctgaagtttcatcaaggcaatatgcttaatcgatgtttgctgatgtttatggtctaatgcctactgacagcaggtgcaaaaagaaaaaaaacgcagtgaatccccatttgcataaaaaccttccttaaattcaccagcatgctgttttgctgtaatttagtagacaggtgatttttcatggcaccttcatgagttgctttctcccctgtcgctggctccatttctctacctgctgttcccagaagctgtggtcttatttatgccacatgtggtagcccctttcagactgtctactcggctcgttgatcaactctccttagtgcttgattttcatattctggtccaggaaacagagtctatccctgagt

SEQ ID NO: 1881928 - DNA, 4001 bp, Homo sapiens
atgtaaagacctgaggaatgttagcactgatatctttccagctacatgatatagatacaaataagtcactaagagaaagtcttcagaatttaccgtcttcatgggattctcaaaaattcagtattctttgagaatacagatctactagtactaatagtttcagtgcatcttaagagaaataagagatacttgggcttctgaagtatccattcaaaaaggatttactaatattaaatgcctatataaactgaggagctgtcaggttctgaaaatatgaagatcagtaaaatgtgactttagccttgaggaactcagactaattggaaagacagcagtaaacagtcaattatacacagtgtgatcagcagcctggttgaagactctagagagtagaaagaagcacattgtggggtgtcctctgctccagtcttatgtctgtcagcatagtattctcttagcttctgtatactgcctacatttatgcgcagtgtgtgtgtagacattgcgtgaaagggcttatgtatgccatctcctcttcatttatgtatatcagcctcttacaggttggtcctattatggaccccatattgcagctggggaaaatgagaagagatttaaggtcatagtaagtgttgtatccagaattcagacccaaaatttttgctctaaaccagtgctctgtatcacccctctcagagaagcctttatctggagcagtggttcccaaccaggggtgattttacctcccaagggacatttggcaatgtcctcagacatttttaattgtcagcactggcatctagtaggtcgaggtcagcaatgttgctaaacatcctccaatgctcaagaaagctcctcagacaaagaattatccagcctatgtcaacagtgctgaggtctagaaactgctccggagcacagggacactcttttgtgtcagccttcaaaacatcttttgcaatacttagaaacattttttaaaagaagagcatggggcaaaaatgctggaccaagctcattaatatctattgaagtgtgttttgtcatttagtgtccctgaatgtttgggataaagtcccaaatgtaaaattgagaaaataatgccttctttgtctacctctgtgggttgcaaggatctgtggaggctctgtaagaatgtgaggagataacgcatacgaaagccttggacatgaaacatcatccaaaactcttggagtccttggtgtgaaaatattaatgtgggccacaagaattagataaagaagatcccacagcaggcttctttttgtttaccccgcctaccttgtcagcttacaccccctcttccttctctttatcctcccatttttgtaagcgagtttgttcctggtatttactgcatggactaagccatttttagatgtattttttgctgaatatatacttttttgatttagtatttcttgccatattacaccagacttaaggcagctaatttaaattatattttttctttatgtactttatacaaacattcatggatagggggagatatttaaataccatgcctttcttcaaaatgaataacaagaacattcagcccccttcattctgccctttcaaggtctaacgtacttgaaggggcaatacttgtagcatttgccacataaatgccaggtagtgtctttccacatcggggctcaccattacctagatctgtagttgccggccatgaagccaaacaggtgtgcaccgtggtcattgatggaacagatgtaaactcataaatttagtttactgaggttttcggtgagtgtggcttcccgtccgcgtgcttttcctatacaaccagcggcgtcctggcggaggagtcactgtggacttccccggagcgttgtcactgccatccctcccgcggtgaatcacaggtcggcctcaggtgcgcgcagcacacacccggagcagccgcgggtttatttatttatttccgggacggatccattccgggctccggggagggggagcggcggcccaggctgcggggctgtcccggcaccggctggggtcgcgccgcggccgcctgctccctttcccgtgagcccccgctcctcaggcgcggccggggctggtggggggtgggggatgcaggaaagctgggggcgcggccaccaagctgtccagggacaaggccctgccgcctcctcccagccggaccctggaagggtccacaaaggtgtcaggttcaagtcctccaataggcccattttttaaaagtgcttttaagtttccgcttttttcaggaggggagggcaagagcagctttttctattcaaattcttttccttgtatgtagataccaaaaggaaactcggcactgggcatgttcggatgtgaatggttttgctgataagcaacagcctccggaaccaaagcctcaaaatagtcgtctcccccgcccctcgcagaagcggcgagtggtatctgccaaacagatgacaaagtacctccgactgaatcccacagacagcgctttgagcagaacgcacggctcaactcatgtaattactgtttatagctggccgagcctgactaggagagggcagacccgagaggaaatcagtttcccggacctttgagaggaggctgtgtgttaattaaaggctaggacgggacgggtacttctcagacatgctccaagttgttcttgagatcacagttcccatcacattttctctggagggagtgagtagataattgggattttttttttatttttggccttgtctttcttccttttttttacctctccccattttagtcatatggccttgaacccacagtgaattgaagagagaaagaaatggatatgtctgaccccaatttttggactgtgctctcaaactttactttgcctcatttgaggagtgggaacaggcttcggcgaacacaaaggtaaaaacgcggggatctctgcctggagagggaatgctttcacttcccaggggcccacaggcggagctgcctgagcccctcaggagctggggttttgtgtattgggtgacactttgaaaagtttatgccccgctaggggagggggtactgtttcaggtatttcttcgtccttgtggtttcctgggtaaccctgataaatgtgcttctcataggttttctccttttgaaatgtggataataagacatttccttgtgagaggtgggggagaaaaagggaaagaggaggagatactttgtctaagtctgtccctttgacctgatcatgtttatccatttcattcacccagtcattgaggcttctggtacttttcgttgagcccttcagatgttcctctctattaaatatttgacctttataagatgcagatgtacgatgcaaggatagcccaggttagctatttcatactatctgtggagaggcagatctacataactttgtcattttgatttttcaatggtttgctggcatttattactaatacaggagtgtccttttcattttgtaacgtatatttgatagaaaagatggggaaagaaaaagaattttaatgtcaagatgaagctcatgccacaagtgacaggcagttccaagagtttgctgacacttgtgttgagagactatgactttgaaggaggcatttctcaccacatttgtgtccagcacagaaaagtaagattgttgtacttttagaggggcacaccttttgagttgtgttaatactgattctttgttttccttcaaaacttgccttgcatgtacatgtgaacatgcatgagagcaactttgcagtcagataaacaggatgcaggctctcagatttggagcttcacaatctctatgcttcagtgttcaaagaacccaagaaaatggttcgttctttttggttatacctgtaactttttgtagtataaatgtggatatgtgatactttagaaaacttagtttttccttttgaagtttttcatggtttcttacatttcagaaacatcctggaatactcacatacact

SEQ ID NO: 1881929 - DNA, 4001 bp, Homo sapiens
gtgggcactttcttggcaacatgggccctgtggccatgaatggcagcggtcaccttcctggatggggctgacttttctctagcctgagccacagcctgagcctctgactccactcagtgtgacctgcagacaattgtttgcggccccattctaattccctcctagggactctcagccatctttctttttccttgtggcaagagatggccaggactttggaatgggcaatgggtttactgaagatcacgtccgtggaatgctgggctctggcgtggtctgacccttgcagtgagcctcttttctcagctatttcatgactctatccagataggagctaccttaggaaaagagcaacacctacgattcctatccatagaatggctttagtcgggtcccatggaatacaattgattacaccctgagctcagatcaggttctacaaattcatgctgacattcctgcactgtagataaacctgcgtcctgtggcttccctgccctaggtgcagctccagctccttccttaactccactggtattccctttaatctgcaggaggggccagtgattgactttgggtgtacactgtccctccacaccacttccctgtcttccatggttttttgtattcattttcttccacctcccaggcactgacccccagtagtgaccctggggggagaccatgccaggaagcacactggctggggcgaccctgaggcatcccagggagaggcaggagccagaggcagcaggagctgaaaggagatacctgttctctgcaggtctgtgctgtgcaccctctgcacccacgaggcatcctcagaagtggggagggagaaggagggatggaggagtcttttagcatagtgtggcctccatcttccctccccaggacaccggggaccatcctgagggtggcctgagttgagggcccctctgcagaggctggcagtcaggcccacatcccgagagcgggacagggacatttggccaggcagttgaagctggaggttcagacggccgtttatttggggatttatgaccttaagggtccctctggagtggagaagagcagctgcctcctctgctcagcctggacacccctcctgcctgttgggacactctgtgggtgccgcctgtgagtcctgaaatgtgcgatgtcctgtacgtgctgcccagctcgatgtgaggcaacgcgctgtccccatgcctctcgcggggcccatcagtcatccctgagcacagactccgcttgccctgcacttacagccgtcacgtcgctaaatggctctgcctgttaccgcagcgcaaatacatgatcctttcactttgcagattccatgtaattgtgcgtggactgtgtcagcttcggatttaattggtgtgtaggctgcgaggcatgaattacagcatgtgtaatttatttatgcaatacaatttaccattaactgagagaggaaaaataaagagaaaaataatatgttttgtactataattacataataaagtttgaattaggaatatcacttggcccacaaacttcctctggcctgagaaagatcagaaagcaacgtcgtctcttcagttccttcctggattctcaggaggagcaggtctccctctaagtgccacgggacaagcgcgttggtggtaaacggagccgcggggaagagtggggcctttgagaaccagctgcattgacggggacatggccagcccaggtcaactggggagagatggagaaaagtaggggacggataaagagaaagttactttttttcttatataaaatgaatcgtgaaaactgctcactggatagccaggccacttactcataaagaaaaagcaagagaaatgcctgccactgcgcctgggagtccattcccaggtctagggccaccccagagctcccggtcaccctcaagctgaaatgttagacgcggagggctggcttcccatgacattttcaccggagcccctggcatgactcaaaatctgtggttcttcaaaatgatgaacatgggctcccgttgtctcctcacgcgggaaggtccaggagcccacacccaggtgtgactctattctgctgcggtgactccggacgtgaggctgggacgagcctgagggagctgcgtgctcgccagcgcctcccggcccacctctgcggtccgtcctccggagcccaccccggctccaccttggctcccaggccggcacccccgggctgagcacagggccaggggcaggcgggttccagagggagcatttccaagggaggaggaaaaccaaagtgcctgccaggcagggggcaaggacagaggggaaacgcccccgctcccagggccgggtgagagacggtggggaccagctcagggacccccacccagaggggccgccacttccacggggaatgctggtcggagtgggctccggaccttcccgcgtgaggagacaacaggagcccaggcttgacgtggcctctccgcctcaaacccgggccgctggctccccgcacaggctggggcggcgtggggcgggcggaagagcccgatccctctgcggccggcctggttgattcgggcccagcggaccctgcctggccctggccctggaggccgctgcggcccccacccagctcctcagcagccacatggcgccggccctcacaccccggggcggcgcacagggcctgggcctgacgacgtccttagggtccctgagcagccgggtccccacggccctcggcgacccggggtccccgggatggagcgaggctctgggccttcagcagacgccggggccccagacgcccctgaaccgagctccagagacatccgagcccaggctcctagagaaccgccccccgccgggtgcgtccgagtcagggctcccccgaaggcggggacgtcgggcgagaagcaactgcaaggactcgcgtgaagaagccaccgggaatcatggcggccgcgctcagagggacggctttgcacgcaagctgtatttttcttcaactcctctgtgtttttcagatcttctgtagaagtgtctgtagtgaccatcagaaaaacaatctgaaagaaagacaggaattgccaccgaccccagggctgcatttattgctggacatttgtcacggtctgagccgtgtggaccggccccgctcagccagagccaggagggctacgaggggaggcggggcagggtttggggacgatttctctccgaccgaaggagtaatggggccatcacgtaggcaaggtcaaaggacgatgtggcggttgcagggtgacccgaggtcacgtaggcaaggtcaaaggacgatgtggcggttgcagggtgacccgaggtcacgtagggaaggtcaaaggacgatgtggtggttgcagggtgacccgaggtcacgtaggcaaggtcaaaggacgatgtgggggttgcagggtgacccgaggtcacgtagggaaggtcaaaggacgatgtggcggttgcagggtgacccgaggtcacgtaggcaaggtcaaaggacgatgtggcggttgcagggtgacccgaggtcacgtagggaaggtcaaaggacgatgtggcggttgcagggtgacccgaggtcacgtagggaaggtcaaaggacgatgtgggggttgcagggtgacccgaggtcacgtaggcaaggtcaaaggacgatgtggcggttgcagggtgacccgaggtcacgtagggaaggtcaaaggacgatgtgggggttgcagggtgacccgaggtcacgtagggaaggtcaaaggacgatgtgggggttgcagggtgacccgaggtcatgtaggcaaggtcaaaggacgatgtggcggttgcagggtgacccgaggtcatgtaggcaaggtcaaaggacgatgtgagggttgcagggtgacccgaggccagcagtcctttgcagagtggatgagctttcagtgaggggtgaagtgtggaatgggactcgctgacgaaagcccactcctccctgggcca

SEQ ID NO: 1881930 - DNA, 4001 bp, Homo sapiens
agctaataatcctggctgtgttttcaatcttagattaacttacattacaaaatctctttcctatagcaatgttttcagtattcatgttgttgatgatgatatgtttagtataaattacatcttccactacattattttatggaagtataaaaagtaaaccaggccgggcgcggtggctcacgcctgtaatcccagcactttgggaggccgaggcgggcagatcatgaggtcaggagatcgagaccatcccggctaaaacggtgaaaccccgtctctactaaaaatacaaaaaattagccgggcgtagtggcgggtgcctgtagtcccagccacttgggaggctgaggcaggagaatggcgtgaacccgggaggcggagcttgcagtgagccgagatcccgccactgcactccagcctgggcgacagagcgagactccgtctcaaaaaaaaaaaaaaaaaaaaaataagtaaaccagatagaaacagttgttccagtgaagctgagtggagttcctagaaagatgacagtctgaatactcttcaaaggtcattcaattcccagtaagcacctgaaagagatactgtgcatagggctccagaaacgggctggcagaagttggaccttcagtgagaattttattttaataatttcttgatttcaaattaatttggctgttcccatctaatacatggaacgaacagaatggttcacttatagttttataccaatcaatttaatcacaagtgatgttttaatctgttgagaccacattatctgactaaacaagcttctacttgcagaaatgcactgatgacctctcctgttccagaatttctctatcttcaactcatgtataatttcctaaatgtgtcctgctattaaaagctaaagatattattccttcagtctctgtgataaaactgagctgaaagcgagcatttgggtctaccatgggggaatatcacggtctcacaaatctctttactgaacctgtgtaggttacacaaggtaaatgtgctgaatgtggtccacacttgcatatgcatattgcccaataatgttcataactgcatcaacaaagcaatgcagcatccatccaccatcctgactttcaccatcatgaggcattcacaccacagctgcctgtcagtctccaggtcggctttctttccatgcaatgtatctgtattccatatgcaaattcttcagtgaatgattttcctgttttgtaagctagactgcacctgtaacatgtgagactgagttaaaaatgacaagcagacaagcacaaggcacattatcttgacaaactcagcctccaaaaattactctgggcctgaattattaaaataacaaggaatatttcattcagctgtgcagaaatgatcctaattgtccactttagctaaatcttttcagtctctgagatcggtcaatttacactggtggcttgcaaattcctcaactcccattagggagatgcacagcagcagcccaatgcaccctcatttattttaataacctgccaagcagacatgaaaatgttaaagttggaaggctataacatgacaggatcctgacttgtcagagccacattataatctagttaaaatactttctttctccctttcatgtctcctcaggtaagtgggaaactaattgtcaaattactaattttgttggcattaatatcaataccaagacaagaagagcatgaactgttgagcgagaggtttttcttctataccttctgctgctgctggggaaattactctggaatcaagtaaagaattaaattggtatgatccatttgctatttggtactaacccgttcttgcaggtgctgtttattaatactgccagttgaacaggccaattctacactatctggcttggttttggttcttattgtgcaggtcatcatgataataaacaaatatgaagcatttactttgtgttaatgaagcataaatggttatatgcacaggggcttgatgggtaaagtctttccagaacttccaatctggtcagaacttggatgattctaaattctggattgtgcctgttgtcctggcaaaattattaatatcatcatcgttcactctcaaaagtgtcctgttttgatgataagttatgtgactatcctggctacaaataacagatatgagattgtgggttactcatacgacatgggctgaaacatggtttttgaagtattttgtgaagacttttcacaacggaaaggacagggtagagaaatggggtttatgctcaaagtgaggtagctcagcaagaggatgaaatggcacctgacaagagaaagtttcctaaagatcagcctctaaatatttttcttctggaagcaaagggagggaaaatgtgctccatggctcagggattgtgatgctgttcatttactgggttttggtcttggaaaaagagaaggcttcagctgcagaagccaggtctgtttgctaaccaatttttgctatgctgaaaaagaggaaagagaagaaacaacattaaaaatgggaacaaattattttaagaaggatggaactcacagaacacatctctgtttgagtctccaatgaaagcagattataaactttgcatggcgacttcatttaccagcacaaaaattccttcagttcataaaacagaacctcccttttcaccattggcatctaaacttggcagtcaaactgtgggatgtcacacattcttgagtatgaaaaatttaaagtattcagtttgtgaattcatcatatttgcctatttccccacaatgtgtttattctattatattttttctcagcattaaaaaattttagaaccattataaatcacagcatctttgctattttttctgtggaagaatctgattatttgttttggtgcatttaattgagagaattgaataaaaataaccccttgtatgaaaagttgatattttctttttcttttcttttttttttttttttttttgcataccatcccatttatttgaaattccagaaaaggcaaaattaatctgtggtgaaaaaatcataacagcagttccttctagcaggggattcactggggaggtacacaagagaaatttctgggtgctaaaaatggtctgtcttgataggggtatgaattacataagtgtattcatttttttctttttagttttttttccttttattattattatactttaagttttagggtacatgtgctcaatgtggatgttaattacatatgtatacatgtgccatgctgctgtgctgcacccattaactcgtcatttagcattaggtatatctcctaatgctatccctcccccctccccccaccccacaacagtccccagagtgtgatgttccccttcctgtgtccatgtgttctcattgttcaattcccacttatgagtgagaacatgcagtgtttggttttttgtccttgagatagtttactgagaatgatggtttccagcttcatccatgtccctacaaaggacatgaactcatcaatttttatggctgcatagtattccatggtgtatatgtgccacattttcttaatccagtctatcattgttggacatttgggttggttccaagtctttgctattgtgaatagtgccacaataaacatacgtgtgcatgtgtctttatagcagcatgatttataatcctttgggtatatacccagtaatgggatggctgggtcaaatggtatttctagttctagatccctgaggaatcgccacactgacttccacaatggttgaactagtttacagttccagcaaccgtgtaaaagtgttcctatttctccacatcctctccagcacctgttgtttcctgactttttaatgattgccattctaactggtgtgagatggtatctcattgtggttttgatttgcatttctctgatggccagtgatggtgagcattttttcatgtgtttttttggctgcataaatgtcttcttttgagaagtgtct

SEQ ID NO: 1881931 - DNA, 4001 bp, Homo sapiens
catacctggccaggcgcagtggctcacatctgtaatcccagcaccttgggagggcgaggtgggcagatcatgaggtcaggagtttgagaccagcctgggcaacatggtgaaaccccgtctctactaaacatacaaaaattagcagggtgtggtggcaggcgcctggaatcccagctacttgggaggctgaggcaggagaatcacttgaaactggaaggcagaggttgcagtgagccgagattgcaccactgcactctagcctgggcaacaagagcaaaacttcttctcaaaagaaaaaaaagaaaagaaaagaaaaagggagaaagaaagaaaatggttactacttttagacaatggaactcaagcctaaaagaagttagatttctttctggtctaccagtaagtttggaaaaagttgagaaagatgtgtaaagtaataagcatattaaccagggatggttgttatttttatttgtaatatcccttttcaaacaatgagccaagaatggcaatcacaatagaaaagacatctcatgcacagaagactaactggagttttaggcgggagactggagagtcattgctagcttgtatgaagtaagcaggtggtttaatgaactgtagtatttactcccagaaatctggaattttctttgttcttatgccttatatttcaagaaaagctttattgctatagaggaggcaacaacgttcagtagcatgaaggcagcctgtggcattccctacctctaggggtcaaagagcctaacactgtagatggatttaaaaggtggctagaaaattctgtggcaaatattagcatttgctgtcatgcatgttaaaagactggtaatcaaatctcatgcctcagagagtgaatgaatactgccagggtaagccttctttctcccgctcctccctccccatgctcccgtctccactacaggaaacgtgactgagttgatgggaagggaaaatgctcttgccatagctcattgaaatcacacaattccctgtggctcaggacctaggaggggaattgggaggtacaaagagaggaaagtcaggtttctcagccctgggattctggctgctgcccttgaagtttttctggactgacaagacgttgaggtctgcaggaaagacaaggcttgatgacaacctcctaagtctaggtaagtcctaggctttttctgggggagacagccctcctgagaggttgcagccctcccccatatcatctgggatttggcctcgctgttatcccaaccacctggggagaagagaagactggccatctttgttttctcctttctcccttccttcctcctttcttccctttttcatctttgtcttccctcttcctccctctacagggaagaaagaacatctgtttctcttgctccttccccttagaggttccataggaccccagtgcccatgaagtcactggaaaaatcagctctttattccccaggcaagaggcttgcttaggaagcgtctgggctgcaggtcctgtgtagtgccaaggtcaggtgtcctcaggaccttggctctcctcattccagcatcttctcccttgccctctctacttgacccttccctaacacacagaggagctctaatattttccaacagaaaacacaaccagtcagacatcccccgtgtgcccatgagctcctccaactgttctctctctgctttctgagagccacatttctcaccaggctgaccacagaatgctgtttctttcctgtctcccattctcagctcagtggctcccttccttttccaccctccgccctcttctctcatcagcatcaacaattacctctatgtggtcccagctgcttttatctctcttcgtgagacagacctctctccttccggagcatccaatttttctttgcctgtgacacctcattcttctgggtttctccatgactccttcttctgttcagaggtctgggctcagccctgggactcctctccgtgttttctctccctaggcaatctcaccagcccaccactttcataccacctgtgccgagttctcccaagtgtgtatctaagctcctaactcctgtatccaatgacatcctcctattggatgtctcagaggcatctcaattgcaacctggctggacctgaactcttctgatccccccagatatcagtaaaccaattcagacaccctgaaacacgagagtaccctttccctttctcactctgtatatacagttgatccgcatgtcctaacaattctactcctaaaacatctcacagtttcactcatgtctgtcaattcactgccattacccaagtccaagccacccacatcctacaccaggaccactgcaatagcctcacagctggtctcctcacttctacttttgccctcgttacattgaacccattcttaagtggcacccattcttctatttagcagtagacagatgtgttaggacctaagttcgaccatatgatttatctgctgaaaacttataaatggcaattgcaattggaatgcctacaggaagttggtcctggccaagctcccatcacttatgtgtctccagtttccctgtggtggcccctaacctcatttcaattctaagctctctcccaccacagggcttccacaaggttgatccctctgtctgaaatgctccttctcccacttttggcctgaattctaccaacttttctcaggtttcagtgtagataacacttcttcatggagactttccccagcctcccaatctaaatgagatcctccaattaggctgtctcttagttcctcgtcttttccttcgtttaattcattgtaacttataaatattgtgtgtatttaactgttgactgccttgtgcccataggttccatgatcagggattatgcctgtctcaccattacagcctggggcacaggtctgtgtctgccgcctagcagtgctctgtctttagttaaagaatgtgtactagtcaggtcagaaccacctgctggacatcacatgagagaaaaatgggaggctgtccctacaaataagaacccttaataaatcatctgagcattttaggtagtgttattcttttcctaccataccataaaatgaattcttatacccttcataattatcaaactcagatgacaaagttcctgaaaaccaagcttttctcttaattattaaatgtgctactatgtcctctctgggtggacagatttgcaagcacttgaaaatggtcagcagagcaaggtggctcatgcctgtaatcccagcactttgggaggccgaggtgggtagatcatgaggtcaggagttcgagaccaacttggccaacatgatgaaacctcgcctctactgaaaatacaaaaattagccaagcatggtggcgcacacctgtaatctcagctacttgggagggtgaggcaggagaatcgcttgaacccgggagacagagtttgcaatgaggtgagatctcaccgttgcactccagcctgggtgacggagcgagactctgtcaaaaaaaaaaaaagaagaaagaaagaaagagaaagaaaggaaggaaggaaggaaagaaggaaggaaggaaggaaggaaatgggctagtggatcagcacttgctgagcaactatcactgagctgcagaggcagattctgcaagggcacaaggcctggcccagctcttggggcatgatcagcacaggcagaaaggcagagtaaagtcacataaaacaatatgtacaagacaagttgcgtcagccccaaatcatgtaatatacacatcctgcacaaatatctgcagtgcacagtcattgccttcctgtgtgggctggtgaggtggtatgttaaagagctaggcacaagttggggctccaatcctgtatttgtgaaactctgggcaagccactttatctctctgggcctcagctttctcttctgtacaatgaagataataatagctccccttcctgcttcatagaaaagggaaggacaatca

SEQ ID NO: 1881932 - DNA, 4001 bp, Homo sapiens
gtgtggctataaccattctaagtggcagtgcagggatcttctttgctttctggctttctaattggcaactaaatcctatttctgaaaagcaaaaatagatgttgcaaacaggtatctttctttgggttgccttggtcacctttagagtgccatttcacaggaagaaggagagaatgaaagttcttttgctgaagaggagtttccttctcaaaacttctcagaacattgaccatgactgctcatggctaatcctggctccttttcactaaagggaaacactgagaaaagtctgagaactcaggactggggacaggctctagagggaactaacccaccttcagtgaggcttgcttttgtccagacgctgcctatttagtacatcagtaacctgattttattcaaaatagagcatctcactatatttcaaagtggtttacaactctgtataaaatagaacatctttactaggggatggtggaatataaacgtagaaacacaaatattaatactaccctcacaatgcatgccttacaaaagacattcgctaagttttgttatgtataaaaacatatttagctaccaactttactgtcactgtggaaaattgcacaaaccaatatatgtaagtgaataattttacatgtagttagcatcttttctgattaagagagtcttttaaagaacatattgattatgcatcttatgtatcctatgtggctaaagcagctctgtgaatagagacctgccagttgttttgttaaaataacagagtgcagctgcgattaaaaaaaaaaaaaaaatgaaaacagcctatctggaagagctatttttagttttaaaaggtggaagaggagggaatcaagagctaatgttttagtttgcaaatataagagttttggggaagaatgtcaggtcaggcaaatgtgtgggccacaatggaacgatggttacgtatttgctaaaatgtttccagactaggacttcccaagtgagtggcagatatgcgtgggaaagtcaccctcgaaaccaaagaggggaggatgcacaccaaaagagaatctgtttttttacattgtagttgtaatgggaacaatcactgttgccaaatgtaaacttcttaggtttgtaaaaccccaaataacaccactctccatagataaaaatgtatatttgaaggaaatagttttacaatcgaactagagattgtcattgcctctcagaaacaaaacggaatattatctgtccaagataaaacactctttgaaagtgctttcctgaatcgtgttgactcttcagtgtgtcagtgggcaggtcccggctgtgttcgcagctttgtggtctcctccgggcctctgggggtggctttgaatgggacagcttcacaaaatctgcatgaaaattgggaattgtcaaagtaatttgccatttactgacttgctctctatgccttttgtgttttgatcaataaaaacttaaatcctttacccagtttagtaacaacctattctaaagcattatactccccctaatgtttttcgagctctggttgtacagttatccattttcaatgatattcattttaaaaggttaacaaacgagaaactaaaccaaccatacaaataacagcctaaagaacactttccaaaatgtgttgctgtagtgccatttcacatttaatattcatgcagaggaaagctaaaggccaccaaaccaggtggataaaatagtactgcattttatgactcattcttaaatgaaatctcttaaatattgctaatgaagccggctcccccgccacagccttgccgggcgccctttcgagctgcttcagttccatttccctgtctagcaatttgccccaggcccctattaaatgaattatcacggcccctaaatcatctctgcgggggtttcctctaatcccatcaagacacttacactccctttcttccctcctggtgacataatgaatgattatttcatggggagccgttaaagaggcccctctggaagaggggaatgcgcgctgcccggggcggaggcgcggggctgggccacggggaggccgggtgggcaccagcgccgcctcgggctgacggggacaaagaggccacgccgccaccaactgccctcccggccgcccgaggtgggggttcccgcgagcggcgggccgagagcctcccgctccaggcctccccgtgcgcccggcctgggtagcgactccgggagcccaggaacgctgggcaaggagagagaatataaatgttttccttaaccagaggaaacacagcactcacaaaccacttgcggaatagattaagctaatttattaaacacagtttgcctggtgactgagctgagctgagtaatgatttacaattaaaaaaaaacattaataagagaaagtcaggggccaccgtggccctaatcatggggccatggcagctccgatggggctggggcgcgcgtcccggcgctgggtttgggaccaagggtggccttaggcctgcggcatcggtgaaacttcgcagccgttgcggagccgaggcccccagctccggggagatggcgtccaggagaagagagttgggccctgggcggggagccatctccagggaatcaggcagagggaccctcttccccagaggacggggtggtttggttgggggggtgtgtgcgtgtgtgtgttttacgtgttgtttctgaggctctcagacctcccttcgcatacccgtgctgggtcttctgacagtgaagtaacataaaacagtttccaggaaattttggaaattgaacttgaggacacgcgtcttgatagcgattctcaacagcgttgggtggcagcaaccgtcttttcataacaaatacttcctaatgcccagcgcggtggctcacgcctgtaatcccagctctttgggaagctaaggtgggaggatctcttgagctcaggggttcgagaccagcctgggcaacacagtgagacccccctctctaccccaaaaatacaaaaattagctgggcatagtggcacacgcctgcagtccccgctactcaggaggctgaggcaggaggatcacttgagcctgggaggtccaggctgcagtgagacgtgattgtgccattgcactccagcctgaacaacagagtgagatcgtgtctcagaaaaaaaaaaaaaaaagaaagaaagaaaaagaaagaaagaaaaaagttgtaatatcttttactattccaaataaaaatattgaataatatatcctacatgtgatttagaagaagagaagatagaaggaacgaagaaaagaaagagaggcaaaaacatgagggcctaactataaacaacaacacaaaaggtataatataacaaaaatatggtaaaatacatgtttcaatgggtacattctccgtcacgacaactaagaaatgaagtaatcaaataatctcactgccatttttttttttttgacaggctctcactctattgcccaggctggagtgcagtggtgccatcttggctcactgcagcctcaatctttgtgggctcaagtgatcctcccacctgagcctcctgagtagctacgactacagccacatgccaccacgcccagttaatttttgtatttttttgtaaagatggggttttgccatgttgcccaggctgatcttgaactcctgagctcaagtgatcctcctgcttcagcctcccaaagtgctgggatcacatcgctttataacaaatgttgatttaagagaaagctttcagttgattgttgttgactctttttctttataatcaacgttatgaaataagggctgaataaggatatttcctcatacaagtagaatcatcatccaaatgtgacagctgtggttggaagaactcaaagcccaagggctacattgcattgttgtccataacatgattttctaaaatggtgagcaactcttggtcaggttccagacaaaactgtgtacatggtagttgtattcctggaaaatttaat

SEQ ID NO: 1881933 - DNA, 4001 bp, Homo sapiens
gaatgtcgggaccccagcgcatccttccctggaagtgacacaaagtgtccccttaagtcagcacagagaagacttttgtaaaaaaaaaaaaaaaagaaatgaacccattgcgtatggaattagtgggttcttggtctcgctgacttcaagaatgaagctgcggaccctcgcgggtttgttacagttcttaaagaatggtgtgtccgtaatttgttccttcctcccggtaggttcgtagtcttgctcacttcaggagtgaagctgcagaccttcccgtgagtggtacagttcctaaaggtggcacatccagagttgttgcttcctcctgtgtggaattgtctggaattgttccttccagctgatgggttcgtagtaagggttcgtagtctggctggcttcaggagtgaagctgcagaccttagcggtgagtgttacagctcttaaagatggcgcaaattagccaggcattgtggtgggcgcctgtagtcccagctaccggaaagactgaaataggagaacggcgtgaacctgggaggcggagcttgcagttagccgagaccacgccactgcactccagcctaagagacagaacaagaatctgtctcaaaaaaaaaaaaaaaaaaaaaaaggtggcacagtcccaaacaataagcagcagccagattcactgcaaagagctaaacaacaacgtttccacagagcagagagagaacccgagcaagctgcagcggcctgctctggtggcctgcttttagtcccttatttggccccacccacatcctgctgattggtccgctttacaggcagctgattggtccattttacagagagctgattggtccgttttgacagagagctgattggtgcatttacaaacctttagctagacacagagtgctgattggtgcgtttacaatcctttagttagacacaaaagttctccaagtccccaaccgtcccagaagcccagccggcatcatctctcactggctctcgctgcggaacttggcgggccgggtaatccggcagcccagagggagctagttccagacaatcaagaggaaaagaggggaagagagaaagagacggagatcggctatggtggccaacaatcccgcgaagagggaacggtggtccacgcagggattcagtctccgatcaagcccagcaggcgccggccggccacgccgagtgcggggcttgcagagccggagctcacctggaacccaagcgctgggccgcgagcgccgcgcgcagcgccggctccagccagtgcctttctcttcacacctccccgccagcagagggagcaggctccggcctccgccagccccagagagaggccctcatagcgcagcggcgggctgaagagctccttgagcgcggccagagcggacgccgaggccgaggacgcgcccagagccagcaagggatgctaccacgctgtcacctctcaccgtgagccacaactgctggtcctgcgttcacggctttcctttgtctttcaggtggagacgcgctgacctgccccaatacctattgttgtttgttaaattactccaagatacttatagttaacggcaaacacccatttataaccacaaatcatgtcagatgttcaggaccagcacaatcaatcaagtaaacagcaccctccttgagtatgtggcaggtgtgtgaggatttcatgaacctgtcctgcatttccaaatccatcctgaggcctctccctggacacaggtctgtggatcagcctgtactcgggcagttttaccttctatgtctgtttgtcacggtcctcttgtcctagtgctcatcactgcacgttcccagctccagcaagtggccactcttttccctccacaaccaaaggcccgacggcccagccccccggtggcaggtggcccttccatggctgaggtcacacacccagcatcgcatcctgcccttctcggggcctcgggccccttcgactcgtctccagggattgcacttgctcctgctgcccacggaggtttccttcctgtgattccactcggagggggcgcttttctttgctggcttcaaccatcacagagctgctttgtgttcgccggcagctgccacgcttccctgaaaaggcggcttctgttctgctggagatgagctgatttgcctggcagccaacttaaacaaggaggtactttgagaccatttttttggaatctttgtctttttctctcgacattcagcttcgtagttgtaaaactctaaatactcgtggggtttaacacaaggctcgggggttttgaggattccaaagtgattcctgtatacagttatgaccacagaacaaattcacaggggagaacagaccattcattgtgacatttgacaccggacagcagatgatacagtgtcccccttatctgtaaagaaggcaaagttttgtttctggtttccgaatccagaaattaatagttcacttaattgctaggaatcttcaagggtatggtaggctctgagcattgacctggccccttatttcctggcaataagtaacagttcctgaaattctttttctgctattaaatgtaacctgcgacttgaagaagcattttagttatttactctctctgtgaacaaaaaataacaatgcaggctgggcaaagtggctcacacctgtaatcttcacactttgggaggccgaggtgggtggatcacctgaggtcaggagttcaagaccagcctggccaacgtggtaaaaccccatctctactaaaaatagaacaaattagctgggcgtagtgacaggcacctgtaatcccagctactcaggatgatgagacaggagaattgcttaaacctgggaggcagaggttgcagtgagttgggatcgcaccactgcacactagcctgggcaacaagaatgaaactccatctcaaataataataacaacgctcagtgctcatcttgtttcttgctttctcccaaaatgttagtagttaaatgtaaaaaatgaattccctctttagttaaactagcttcctgtgtggtgtccactcgatgacataccatagcagggatcccttgtgtaacaaacatccctcttcaaaataatgaggactttctttagtccccagacagcctttagtgacacattttcttgtctccactgccctctagtacgtgaatataacctctcagtagctacgctcccaggtggcaccaatgaaccatgcctcctggtagtcctctccacgctaagttgggccagccctctgtaaccaagagaatgtggtggtggtgatgctgtgtgacttctgtgactaagttataggaagcttctgtgaccctgtgaaacatttgctgtgatttttttagatcaccccctctgtaaaaatccaggtgccaaataagaagcctaactacctggagagcaccatggtttgaggaatcccaaattggccacatggagaaggtgccttcctgatctaccccagcttttccagacctctcagtctggatgtcaggtacatgggtgaagaggccttgagatgtttccagcctcggccccagtctacctgtaactgatggaggaacccaagagggaaatgtccaactgaactataaacttccagaactgtgaaaggcaatcacaaattgttgttttaatccttttagttttcagatggtatacagcaataaacagaacagcacttcataattgaccaaatgggagaatgtgtgtttgagaattaacaaaaccattttgaattgtaactaatgagaatacttttttcacccacacaacccccatcctttcagcaaataccctttatttaaattcttagttttgggaaatatgtattttggaaaatatgtatacatatgtataatgtgtacatatacatgtcaatcacctgggtcataaagatcctaaatttatctgcaacacaatatgatctttgcaattgtcacgtaaactttcttgaaatctcataatcccgaaaagcgttat

SEQ ID NO: 1881934 - DNA, 4001 bp, Homo sapiens
cacattttcatctggatgaagattaaattgcagaggggcaaacttagaagaggagagacaagttagaggtttttgtggtagtgcaggtgtttgacaatggtggtgagattagcatggtagtactggaaatagtaattagattctggatacactctgggagtagggtctacatattgagggtttggatatagagaacaaggggaagagaggaatcaagcatctcccctaggattttgccttgagctgctcgtgaagtggaaatgcatttactgagagaagactgggggagaacaatttataagggaggaaattagaagttctactccaggtatgttaagtttaaaatgcctattacttgtctaagcggatcttgactacaaaactgtctgtagtctcagcaaacgagttctgtgggcaatcagcattattctctttttcttgccttcctgcatattcgtagcttgagggaaaaatagaaaaaaaaaattcacttgtttattcattcaacaaatatttattaaaccatctattccataaacatttatgctaggcactgttctagcaaatgtggataggggaataaacaagttctattttgtatcaaactttttttccttttcaggtttagtttcaagagtgtgggtgaaaaatggatgactcatttccgttctttactagctggtccaaggctggcagtttggtctctgttgcctcactcttctctggtatgcagtagaaacattcagaaatagacttagtagcctggatatacaatgtcacctgccaaagtccttcaataccatagtaatgaataaaaaatgaatggtactaattgatatatatttcctcccatttattcatcctatgtttttgtttttctattgtgtattattttttaaagtaccagaataaactaatgtctttgagtttgtgatgactaatagaaacagttggatatagaaataattcagtttaagtcagccaaagaaacaccaaaatgtttctgagtaattggttattgcagccttcttagtatttcattagggataaattgaggtttctgaatctaagaaattacctggtgcttttcaatactgatatgatagattttgataccacttgcttaatataggaacatttcctgtttttcttctagagaactctgaattaaagagagaagcagagatgaaaataacttctcatttgtgctttgaaatatttcttgtcctaattaaaattcaggcaagccaaatttgataccataacatagagtcagcctgaccactcagcttcccttaatattctgcatcccctcacccttctttaaaactggttcctccagtttgtatctgaatgatgctatcatcacagtgagttgtgccaaactcagattactgtatgctatagtcatcgtctggtttcctgtctagtgaagaagcatttcatggtggttaatagcactggctttagtcaattaggctaggatttgaattctggcactgctgttcattggctggatgacctagggcaagacacttactctttgtatctcgatttcctcatctgtgttgatgtgtgagacttaaatgagctaatgcaggtaaagtcccaagcacaaggcctatcaccaggtaggcatttgttcatatgcttaaaacctatttgagtgtcaggcactgttctgagctctgggataaagcaagcacaaattagacaaacttcctgccttcatggtctttttattttggcattccataacctcaattccctttcttattttctttctttcctggatggctctgagcaaaatagtcatgtagcaaaaaatgggcactttatcatattcttactcttgtgtgtgacacagctagtgtattagtccattttcatggtgctgataaagacataccagatactgggcaatttacaaaagaaagaggtttaatggacttacatttccacatggctggggaggcctcacaatcatggtggaaggcaaggagcaagtcacatcttaggtggatggcggcaggaaaagagagagaggacttgtgctctctctcccgtttttaaaactgtcagatctcgtgagacttacgagaacagcaagggaagacccaccccatgattcagttatctcctactgggtccttcccacaacacgtgggaattatgggagctacaagatgaaatttgggtggggacgtagagccaaaccatataagctagtgtccgtgttgcccacccttgcccaccaagctccacccatgctccacttccccacctaggatgtctttcccagcagtgcctcccaagtggggcttctatgcacaacttggtgccctgccctatccacactcacctgcatactttgtatcttagtccctgccttctcagtcatgtaagtcaactgatactgagtttctagtaactagtatagaccaaatatatacccctattgagagctttgcttagttccctagaaatgaatctctagaaatagaagattgtaatttgtggaatatttgagagaggagagggcttcagagaagctgctgtgtctgactgtgatcactgtgtcgtttgtttattgaacataggctgtaaaacgactttcttctcttccccatgcttttccatgttcctcgctctctctcttttttctctcctatttctcactttcccacgcttgtgtcactcacattacataaaatataatatatagtgaagccaacttaaataccacatcctccttgaaaccactccttccctttccacttgaaagaaatctccgtcctctgtacctctctggccagtctttctagtgttgtccacttactggttatctttccctcatttctctgcattcacaaacttcattcgagataaaacccaagtgggaagctgggaactgaagccaggtcagggcctttcagaggtccagcaaaacttggatctccctccgctttcctcttctcccttctctcctttcttttctggaacactatttttttttttttaagcccaaaccaggtgttaatattataacataagaaagagtacttttcgaggtgggtggatcacgaggtcaggagatagagaacatcctggctaacatggtgaaaccccctctttactaaatatacaaaaaattagctgggcgcggtggcggtcgcctgtagtcccagctactggggaggctgaggcaggagaatggcgtgaacccgggaggcggagcttgccgtgagccgagattgcgtcactgcactccagcctgggcgacagagcgagactccgtctcaaaaaaaaacaaaaaacaaaaaacaaaaacgagtacttttaatacagtagtaacctcttaatatagtgggaacctgcaggggatatgttctaagactcccagtggatgcctgaaatcaaagatagtacaaagcccaatatatatactggttgttgttgttgttgttgttgttgttttagacggaggagtctcgctctgttgcccaggttggagtgcagtggcgtgatctcggctcactgcaacctctgcctcccaggttcaagcaattctcctgcctcagcttcccgagtagctgggactacaggcgtgcgctaccatgtccaactaatttttatatttttagtagagacagggtttcaccattttggccaggatggtctcgatctcttgaccttgtgatctgcccgcctcagcctcccaaagtgctgggattacaggcataagccaccgaacccggcccgtagttttgatataataacccagatggctactaagtaactaacaggcaggtagcatatacagtgtggatacactggttaatggatgattcatgtcctgggtgggacagaacaggccggcatgcgatttcatcacactattcagaatggtgtgcaattttaaatgtattaattgtttatttccggaattttctatttaagactcttggactgtgatactgaaaccatggaaagcaaaacca

SEQ ID NO: 1881935 - DNA, 4001 bp, Homo sapiens
gggaggtagtaattattttccaggtttcagaagtgcttgtgggtcccgataggagagatgctgtgatggtgtgaggtcaaggaggactctgggctgggttgaatcggggctgtaccacttccctcaggaggtccttgtgagggcgactccattgcctgggcctccacttttcatctgtaaaatgggctaaatatctaccttgatggggaggaggaggatgaaatagctcctcactcttgaatgctccctgtcctaggatttgttctgagtcttttatgtatattacatcagtctttcttcacaatatccctctggttaagtgctagtaccattagtttatcagtacaggtaaggacactaagacacggagaggtgaagtcacctgcccaagtgagctgatgtcaatgaaaatctgtatcatgccaaatactgtgtctggcacatagcaagcacagagcaaattttaattttcttacccttaattttgtttcaatcgctttaaaggatcctcagatataggcagacaaacaagctggtggaagatgtgtgagaagcacacttcaaactgccaggaagctggcttctatggagtcccaaagtgtgaaattagctcctcttctgtgagggtccctggaaacagtggctgctccctgcaggaggcagagtccctgcaagccctactcttcagcatcagaggaactgcaagggaagtcaaagaaaggggaccctcccctccagcccttaggggaagactcatcgatggtttcagggaggaaagagaatgatgggcctggctcacagtacactaccttcttgctggattttaaagattagaggcccaggaacccccagccctactccacaccctgcaatacagatcagcttcaaggggtctccacctcccctgcccacgatggccggccccactcctccagtagagactgtgggccccactgtctggaggccaagggagaacagagctgcttctccctgggggagatcagacaagtaattagaccaaactgcaagaggcagctatgtcattgcttctcagaaatgataaacagcgcaaagagaggattgcatcacttcttcccagggtcgctgggacatttgctctcagagtccaagctgggtcgcattttaatcagaggggggctgtggactgattccctgccgagtgcagaaatgtttcatcagcaattagtatgagcactccaaaaggaagctacacgttctccttgccttgttcccacgtttgcttgttccaagtcgtgtctttatactatcttaactatataatgtcatttatgccatattttaaaatagttgtcttcttatagaacccatgactttgtttgacttcattaacaaaacttagtaatttaccttgcacagagcctgcccatatgggatatgaaattagtatttgcagaataaaaagatgttgatgacaataataatacacataatgacataataatattaaagtaaaagctaacttgcgggggccctctcttctgcctcctgtctgaagagggctgcctctgcagtgagcctggacgtgggactactgcacacatgaccctgcggacatcaggccgggagcaggtggaggcgggtggcggaggaagtggtagaggaggagaggccaggagctccctgagccagcgctcccacagaaggaagttcatcagaaaatcacagagggcctgggacccaaggtcccccatccctcaccccacccaccccatcagaggtttgttcccgagtacctgtgttttaaagtgcccagatggcctccagctgcccactctagcacttacaagtttggagtccagggtccccagaccgtggggtggcagtgaccacactggcctcctgaagtgggcaggtcagaggatcccaggcctggctgctcagagtgctgtctgccagctgggggtgacattcctgtcctggctgtgactgtcccctcagcttccgccttattcacccctgatgggaggcagaggtggagccaggagagctctgctcatgactgtgctccaggaggctccacctccgtgtgcacccagaaggcccacaggagagatgttgtagcctgcaaagcactactgcctgcacgactgcacggccggctccacaggctcctcggaaacgacagcaggagcaaagatgagggctacagtgccaggtgaacacctgggagccgtctgtgtccatctctgagttctattcgtttgctaaggctgacctaagaaagtgccacatactgggaggcttatagcacacaggtgattttctcactgtcctggagactggatgtccaaggtgtgcaggctggtttctccgaaggcctctctccctggctgcaggtggccgccttcctgctgcatccaccctcggcctttcctctgtgcaacagcgtgcctgcggtctcttcctcttcatataaggaccccagtcctagtggattatggcctaccctaatagcctcatttaacccccattccctccttaaaggtactgtctccaaatacagtcacattgggggttagggctccagcgtatgaatttggggggacaccattcagtacacagcaggaggaaaatcactttcacagtcacacagcacttccaagctgtgtgtgttgccttacgtgtccagcaccatgcgtgaagtattgtcgcagctgttttcgttaggatgtgtgggaagagcacatctgtcatcagttccagcccccagtgaccaagaacacgtccctttggctctgcctctggctcacactggactgggactagagctcacagctgcaggtgccaggcctgagggctgcaggcttgctgccaggcccagggcatgggctatccatcccatattccacccaggtgcagacagaccaacatgagtacccaggagagctgcaacccctgggcgccaccgagaccccctctcagcctggccccctccattctttcacttgagtaatgcaggttctctaggtgctatatacagtgctttgcaaactcagcttccagctttgtgcaaagagacccttgtgaagggggtccttagactacctttgggtttggcaactcgctagtaggactcacagcactaagaaaggctattagatttgtgcttacactttgaaaatacagatttaaattagcaaaggaaaaaggaacatagagcggagtccaggagaaactcgcacaagcttctggtgtccttgccctgcggggctgaacggatagcgtttattttccccagcaacgatgtttcacggcacacttgaggtgttagccaccatgaaagcttacctatgcactggtgttcagggttttcattggggtcagtcacataggcatgcagtgcccatgtgactgacctcggctacttggacctcagcccaacagaggtgaaattaatagagcatggcccagagcctcgggcacgtgtgaacaggctttcatcataaatcacactgttggcataaactaaggatgtggcccaaggcctcagatacacaaagccacccttatcaggagggacactccaaggactcaggggtcatctcttcggagctgatcaaggctgtatgcagggtttggtcaactcagatctgctgagtcacccttgacatcacagctgacatccctaagtctctttggctgggacatgtgggagctgctgctgtcagtgtcagaggctttcaatttgattcatgtttgacagtatgatttgggagaaattatatattttatcctaattttcatttatttcattatcagtgaagcagaacaactctctacgtgttttattgccatttgaatttcttgtgtactttgtctagtcatttgttcatacatatgttgagttatttacatttttataatttataggagcccttatgaattgtgcacataagctctttgtcatatgtggcaaatacgcttctactatttcttttaactttattcttttttgtgag

SEQ ID NO: 1881936 - DNA, 4001 bp, Homo sapiens
acacaaagcatcagggaaatatgacactaccaaaggaacaaaataaatctcatgtaactgaccttaaagaaatgtaaatctacaaatttcctgacaaaggactcaaaatatcctaaagaaactcagtgagttacaagagaactcagatggataattaaaatctgaaaaacgatacctgaacaaaattataatatcaacaaggagaaattattaaaaagtaccaaacaaaaattctgaagcagaaaaatacaataactaaattttaaaaattcacttgagaacatcaacagcaaattttatcagaagaaagaatcactgggctcaaaatcaggtcattttaaatgacccagttagaggagcaaaaagacaaaagaataaaacagagttaagaaagcctatggagcttatggagcataataaagtgaactaatatgtgcatcatggtgattccagaaggagacgagtgacagaaaggaccatatgagttattcaaagaaataacagtgaaaacttcctaaatctaggggagggaaatggaaatccagactccatgtaacctatagtattccaaacgggatgaatttaaagaagtctacaacgatacaatgtaatcactatatacctattatcctgacagccatacacattagcatttgccctaagttttatattttaattaacttaatatttttaattttatattttaattaaaatgtatttatatatatacatatgtgtatgtatatatacacacatatatatacatatgtgtatgtatatatacacacatatatatacatatgtgtatgtatatatacacacatatatatacatatgtgtatgtatatatacacacatatatatacatatgtgtatgtatatatacacacatatatatacatatatacacacatatatatacacacatatacatatatatatacacacacacacatatatatagggcaagtgctaatgtgtatgggtgtcaggataataggtatatagtgaatgcagggaaagaaagatctatgatcacattgtatgtaagttgggcactattcttaatagctaagaagaatatccattttacaactgaaaattaagccatgggaagtgttgagagcaaagggtaagaaactcaaccaagtttctgcatccagtaagaagaacctataagttttatcctagagctaatgttgtaaatcacggtagaattttacctcttatttaaaggataacttttaatatgtaacagaatacattttgataaatggccacaatactatttcccatccatttgctctttttatgtgttttggaaactcctcccattgagagatggtatctctgttccctccacttgtatatgggcagacttgcgattgacagcaaaagtgacagtatgtgatttccaggtcataaaaaatacatcttcagcctgattctcttgagattctctcgcttggaattctctcttttgaagcccaggcacggtattgtgaggaggtgcaagggtgccccatggagaggcccgtatggaaaggaactcacagcaccaacttgccagccaggtgagtgagctatttaggtgaagtcattcagcgccaggtgagccacctggataacattgcatagggcactgttgtctccatatttgtcatgaaaataagtaagtgatattttcagcttttaaattacagggttgcttcttatgtaacaataatgaacaggaataggatgactctctgtttctaaagtcaagtaattggctctattccttcttttccctctagaaatgacattttctggcagtttggtatggtagttggaagaaaagcaagggctgtcacctgatggagtatgtttggaatgtgtgatcctcttccactgaagagtgcattgtagggtctgacagcagagttcctctcactcaatcatgtgaggcctgagtccagggatttggtgtcttccccttgtccagggacttggtgttttccccgtaaggcctctcccaaaaggttaatactgaaatgaaggccataatcaggttattaatttaaggcattaaaacagtatttttcaactctgtcacacatttgactcacctggggagatttaaaaagtgctgatgactggatgctgctcccatacccaaatgattctgatttaattggttttgggtggggtctgggggttatgatgctttaaaacttccccaggtgattataatgtgcacccatgtgtaaggaccacttgtttagcgcttaaaaagaggattctacaatgagcaaaagaggaaataaggattaattgatggagatgaaagaaaagtgcctggagactttgcagagtagtagaatcctccctaggcatggagcagacacatctgacagcaataacttaactgaagcataccctgagagtggccctgtggtctaagaagactgtgtgttcagagttcccagctaaggaatctgggagtagccaacccagagtttcattccttatctatgaggagcatctgaatccctagctcatcttgtgaaatgcaggctgtacaggggatctaggcctgttgttggggttaaatgaaagtggccaggcggaggttgctagggggagggtgctaagtgaaaatgctgtataaattacatgctttttacaagtggttgtggttctcctgtccagcctgccgccactgaactgccctgtatgtaagtctcctcaatgaaccctatgtcttctttgttggctccaggtctcttcttcatcctctagaaggtggtaccatctctaacgaagttaataggggtctagcatgacaacaagcaaggcagcagggcctggtgtctatttgtgtggttccagttggttttctgcaatgtccctgtggtaatcattgggacacctcccctaaatccagttatcctctccttctgagcttataaagattgaatttggggccctgttatgctttagtggggccatgatactagtactggccaatggggtgagaactggagcatttatttgcaagttttgcatcctccagaatgttttttttcctttctggcatgaacataagcaacatttgaaatgtggctgttccatcagcatggatcacaagccattatgcagaatcaaaaatgactaccaacctctgttatttatacagtgtgaaggagaaataaatctttgcttcaggctactaagattttggaattgtttgttactgaagcataacccataatatactgactaatacagaatgcgagcaaaatgagcatgcatttttctacagagaatgaagaagcagaattcctatccttctgcagtcaagttatgcccaggattcctttaaggaaaacaagagaacagaaaaaagacagaattttcagttcatgcttcatgaattaaagcaacatgctttagcttgaagtcagagaactgagtattttatttagaaaccagtatttggatcctggcagttttcccctaagggtaaattggatactatgccaagttcacactcatggaattaattgactgctctactttcaacataaggtatcaaagctttccacattagtgacccatgtaaaacaaaccttaccacatggtctgtggttttcaagaagtcttctattaaatgaactactcaatataagtttactgcagggggtgggaggaaacggaaaaatacatgcacacttagaatgggcctttgtgtgttttctttcgtctaattttatatccaagggcattttttcaaaactttttggtattcaaaagtcaacattattggcagaatttattttagtcacaggcttattcctagagctggaacacagaagaaactagttcttttaaaaataaagcctacatgtagaatccccattgtttgtgcatttttgatcagtttactgaacttttgatggctctctttgccatgtaaatgcttaaggttgccttcaggcccagcctgcttcgtaaagatt

SEQ ID NO: 1881937 - DNA, 4001 bp, Homo sapiens
gcactgtggcacttttgcagtttgaggtataaccacaaaactagcataaatttatttgtccttcttcacaatttcacaggtaaaaaatttgttcttaccatggatcttagcaacctcagcatataattttttttccttaagaacttttaccttttcacttaaaggaagcactttacggcttccctttggcatatttgaatcaccagcatcaccactcttgtgctttggggccattattaggtaaaatgagggtgccttgaacacaagcactgcgatacctcgacagtccatctgatcaccgagatggtgaagtggctaactggagggaagtgttgacagtgtgtatccactggacaaagggacaattcacatcctgcgggggacagtgcaagacttcatcacactactcagaacaatgtgcaatttaaatcttacaaattattgatttctggaatcttctatttaatattttcagcccacagttgactgggggtaaccaaactgtggaaagcaaaaccatggatagggagaaccagtgtacagttgtccctcagcatccataaaggattggttccagaacctaccttggataccaaaatctatagatactcaagtctgtgatataaaatggcctaggatttacatataacctacacacaccctcccatacactttaaatcacctctagattacttataatatctaatatcatgtgaatgctatgtaaatagtcactatactgtattgactagggaatcatgacaaggaaaaaaatgtctgtacatgttgagtatgggatgccacttttttcccaaatgctgaatattttcagtccgaggttgaatgaacccacagatacagagagctgactgcatatccaccgtagcattcctgcttctcggagccttttgatctctttcttcatcatctgctaaggcatttctcacatatctcctccacatagttgatcattgcatttctaagaaagaaaagagtcaacaaagataccccaagagtcaaccaagaagagtgctaaattctctatctcaggggagtgctcccacatagataaagtttccagtatccaactatatattgcatccttcttaacccaggcccttcaggattcatcccatatatattcttccactcctgctagtacttgctggctcagtcttgcatcttctttggtgtctattttttccttccttatcacaatcagcacttctcctgtcaagttttattgtacttgactctagttcagggtctgcaaactttgcctgtaaagaacccgatagtaaacatttttggttttgtgggccatatggactttgtcgtgactactcagttctcccattgtagcatgaaggcagccataggcaatgtgtcgttgaatggatgtggttgtattaaactaaaactttatttaccaaaatagactgcaggctggatttggccaggagactgcagttgctgatccccattgtatttactggcctagtgtccaggaatggagttgggatcaaccctgacttaagaacacgctatcttgcaagaaaaagctcctgcactctcttcaagcaagggtagcactagcttttaatagggagcagtgggcccagacggttgaggggaatctgaagattcgagatttttggtgcaggaacacatatatccttattccaagtctcagcatctcactccttcctagtcagggtcctgaccttggcatagcacacttactaggattgaaaattttaaccttctctggagccctcctggccttataattaagttctaggcttgatcctggcttttttctacttctggctgcgggagatgagaagctctttataaactgccataggccctctggctttcacacttagccttaaattggtaattaatcattgtatcctttcatcccctttctctaattcattttatagcactcagaaacagccatccaattctattgtacttacaattaccacttcccctggacccctagatatctcggatactagacttaccaatgcattgccttccagcagttacatcacagtgactgttgcaacaattgcatagttacagcctgccaggggctgtaggtaatccacccacccacccctagttatggtgtcctccctgctggctggtcagctggtgacccagttccagattccattttagagtctccttcctcggaccattcctagcaccagtggttttaggaatgcttacctgagaaatagggtctgaggtggagatatacatgcaggacttttactggggagtgcttttaggatcaatacccataaagaagagaaaaaggattccatagagggagaaattgaattatgattctgttgcagtaaaggccttcagcaatcccatggactgctgtcagagttgtctagacaaggcaaggggccagccagccacaggatgcgtgctgccccccaaaccccaactgcagaaggggtagggccttgggcagggcagctctcttctgctaagggagggattcccaaagacagactcatttgtgagacaacaaaagccagcactcctggcagctgggcgaatgagtgcctgagtcctggaggggagatcggggctgcacaccaccgcatccactacaagcatgtgcagtggttgagttcatgtccacagtaagcgtgtcagataggcatccatgagcccagctttactgacacaccctagttaccaggaatcctgggagaagccttgggttcaactaattgttgcgattgtaattgtggttcctgaaggaattctagatgataaacgcaataaagtagcagtgatttattgtatatagaaactttaaaacccacttttgaagggtaaaataacaagaaagaggaaggaaagaataaaggaaggaaggaagaagagaaggaaggaagaacgtaaggaaggaagaagggaaggggagaggaggggaggggaggagaaaggagaaaaatcaagtcctctcaactcactagagcagccatatctacttaactggagacaggtattataaaaagttatttttctacttccctgccttttaacagacaacattttctgctttttggctggggagaggacatttgaagtaccatgaagccaagtttgtgacagtgacaaacttaaagaggttacaattttgaaatatgtaagtatttaagttggaatcaacaaaatacctattaatgtgtgtgacatgtacagatgtccaaataaatgtaatttatttcctataaagtcagaataattgtgtaggtagagttagaaaacatcattttaaattattttgtcattgaagctgcaaattattataaaatcccacagaaattgatagttgaaatgattttgagattctcaagtattatcataatacttgcataatttgaaattctgatgagttcctcagaagtttatttccaagtacctgtaatcttttcatgttgttcaacattaattcatagccaggacttatcttcaggcaactttacggcttgttcctctgtgaaattctgtaagttggagattataaacatgaaaacaatcagttggggctctttttggcagattttgaaatgttgccatttgttcaatttctatccctataaacgtagcaggtactggatcttattggtatccaaaacatatcatctcaccttacatttattcttcaggaaattaggctcatagctaggtggattttcaacaagttaaatataaactttctgaaccctcattatttgttgatgctattgagttcatcttgaaacacacacacacacacacacacacacacacacacacacacacacacacacacacattccatgtgtctaactcctcctccatccctcttcaaacaaaatgaacattaggactttaaattgcaggcaacagccataatcagaaagccagaagccactgctccaaccctgaggtcctctaaagttgattgcaaggcagat

SEQ ID NO: 1881938 - DNA, 4001 bp, Homo sapiens
actgtcttcaaagcaggccaaaccttgcttgacacgtgcaaagttccaatctcttgcttctcagctccccgcacgcgcgggccaacgtgcacttctgagccagatcacctagccacaaggagggggagagagggggagataggaggagagaggggaagatagggggagagacgggggagagagagggagaggcagagagagagagagagacagagaagagaaaggaagcacctgagacagagagaaagaagagagagaaaggaagcagcttcccccaacgctgcggccttgtgtttcctcccgtgtcaaacgagagggccccaaattgaccccaaatgttttttcttcctttctcaatccaacatttataccagcacgttatttccaggatgcccaggacctctgctatggttgtgctgctgtccctgcaaaggcgctggggatggccgaggtgggggatgtctctgggggctgaaatacgctgccaggggaaggggcgccccgataccaccctcagtggctgctggttgggcgaccggtggccctggcttgagaaagtgaaaatgtccaatctattttgcctggagccttgggtctcttttggatacggaaccgagcagcagtcctccacttcgccctctcccgccgctgcaagggaaaaggtcgttttcctcgagtcccggagaggccctccaggaacccagagccccccggggacaccgcccagctcccggcgcccggccccgcccctgcgcgaactcggccgcacccactttcccgggcggctccccctccgtggcctgtggcgtcacaaggcccccagccgcctgtgccccgcggtgcgcgccccgctccgggacctgccgccaccgccgccccgccctcggcggcacccacacccaggcgcgcccgcgcgcgcgcccggccccgtccctgtctggaagcacagctgaagatggcgagcccggcgcctccggagcacgccgaggagggatgcccggctcctgccgccgaggagcaggcgccgccgtcgccgccaccgccccaggcatcccccgcagagcggcagcagcaggaggaggaagcgcaggaagctggggcggcggagggcgcggggttgcaggtggaggaggccgcgggccgggcggcggccgcggtaacctggctgctcggggagccggtgctgtggctgggctgccgcgccgacgagctgctgagctggaagaggccgctgcggagcctgctcggcttcgtcgctgccaacctgctgttctggtgagagcttgggcaaggtgggggcgctgaggagggcaggtgaccttggggcgcccggggccccggggacccagtgcagggggagcccgcgggacactgcggaggaagaattgtcagccctgccccactttctcggccacctgtctcgaacaggtagacactcaccgcaactttcctccggacgcacgtccctgtgagcagttgtcgttctccgtgtgcggatccagcctcagatgcgaggtggtcggccgaccctcaggcacctgcacctacaggtgttcccatcgtgcttgaaaacttcgcccctgctttctaaaactctgaggtcttgacctgctcgcccaagcttgccggagcaaacgtgcttgaacgtgtcttggttcttgcagccccagcaggcatatctggaccagattaggtacccgttcaaaacggtgccgcattcatcagtcacctgagatgggccctgaatgatttgttttttccttcccctggagcgttaggtttactgtgtttactccctgatgagaaaacgggaggcaaacaagcaggtggagtatgcccagcacccacccccgggtgtgcacagtgtggaaaacaggcatatttttaggtgaagtacagggagaacacacgggaatgctcagcccctgagcaacaggtttgtctctccaaaaagcgctcttcagaaaggccagggaaatgtctgtctccttcgttgaaagtggtgtcctgtcatccgttaccacgctattgagggcggagaaaaaccttctttgtttgctaagtgtcctcataacaaacatgacctacacagtgcagaataatcagactccggtaacagataccttgttacaggacagagatttctgaaccttaaagttgagaaataaataaattgcacaaaatagacagcctgtcattttctaggttaacttgagcaagatgaatattttcctcagatctctgctagtcctggtgttttctcttaaaactagctgtatcttgtcggaggtccctgaaagtgaattaactttggatctcttaggtatctgtgtttggaatagagtttattccaaatctatcttattatggagtgaatgcgagcactcaaataagaaggacatattgtcttatgctagattgggcaatagtctaatagtcttagggctgtgtctcactaatgtttacgatgtttttaacattttatttctttttcttttctttctttctttcttttttttttttttttgagatggagtctcactctgtcgcccaggctggagtgcagtggcgcgatctcggctcgctgcaagctctgcctcccgggttcacgccattctcctgcctcagcctcccgagtagctgggactacaggcgcccgccaccacgcctggccagttttttgtattttttttagtagagacggggtttcaccgtgttagccaggatggtctcgatctcctgacctcgtgatccgtccgcctcggcctcccaaagtgctgggattacaagcgtgagctactgcgcccggccttaacattttatttcttaattttaaattttatttctttaaaaaactaatacagtctcacagtgcaaaagtttaaaggtacaaaagggtaagcattttgaaaatctctttctcatcccagtccctggccgcccagtttcctcacggaggccagcaatgttgctagtttcctgtgtctctttccagatagtgcacatttcagcaaatacaccatattctatgcaaattgtggaataacatatgagctcttccttttcctagtatttcttggtgattgcttccttgttctttttcagctgcttcagaattctattgtaaggatgtctcaaattacttaacctgtctcctactgaggcagtaatgtttccaagcttttgctatttcagcattatagctaatgaccctgtacatgcatcattttgcatatatgcaagtattttagagaacttcccagaagtggaattgctgggtcagagggcatgtgcacttgtaattttgatggctgtcaccatattgcatgcagctccttagggttctaacaatttatactcccaccagcaatgtgtatgactgcctgctttgccacactcttgcgaagaatattttatgaaactttttgatcctgcaaatctgataggtgaaaaagactatcccaaaatgattttattttgcagttctctgtgattgagcattttatcttatgtttaagaactaccacatttaccatttatcagcattgtttgtttataaataacctttgtctattttttcaagtaggccagtgttcttttccttattgatttataggagctgtttttatattaaagactttagcctaatttctgtaacatgagttgcaaacttttttctatgatgttttctttaatgacacctattgaaaataatgtttttgcataaaataattgaaaggcatatttgatagtatccaggggtgttttcttccatccattttatttatactgacggagaggaaaacattggccagccattcagcctagatacagccttctccttatctgttttatttcatctcctgtttgtggcatctgcattccatgcatgtattttctttgacaaaaatgactgtcctgttctttaagttcagaattacttgttgcttttgcattataattcattggaatttatgacccatttattaatgtcattaaaa

SEQ ID NO: 1881939 - DNA, 4001 bp, Homo sapiens
taccaaaatgctgctataacagaaaacctgagactaatttttaatgagcagaaatacatttctcacagtccagaggttttgttgcatttgtgtgtgtgtatgtgtgtgtgtgtgtgtgtgtgtgtgtgtatgtgattttttgagtttggatttaataactcaaggggaagaaattttggcttctacctttgtagtttgcctcaaattggctgacacgggcttttaccaactgcccctgtgtgcctcaaggtcaaggtaattgaaactcaaatttaccctatttgcaaatattcttaacgaaaaagccagatatagaatttttattttcacttagttttggtatttaaatatttctaactatatcagtatttaatcaattccattaagaacatttttttcaaaatgtttaattgtacatttttgatatttttctcttgttttcccagtaagattctcaataaagctacttagtctgcttgctgagaagaaacctcatatgtttaaaaactacacttacacattttaaaaatattatttttagacatacggctctagcataatctttactccatattagtaacattttaaatgtacttattaaatgcttattttgcgttataatggaaggaagcactttgtttcttactactcttgaatgttcatccacgaataaataataaatatctttttcttacactttcccaccaaaattgtagaaatattttcatattgatgttattttgatgctcaccatgatccatgtctcccagatttcatgcttggggcagtcctgtcacactttcacagtgagcctattcatatgactggttttggtcaatgggacattagagagcgtcacaggagaaaataagagatcttacttgaggtattgtcctgtgaaactgttttttctttgggattcaactgccatattataagaaaaatagagctatcacatcaagagatatcacctgcagaaaacagagacttgtggtcagttgccacagctgagctcccaactaacaattatcatcacttgccatttaagtgagtgaacctttatgaaagtataatttccagcccaaatcaagctatgctaggtgaggctaagtagcacaaatgaactagtctcgctaagttcagtccaacccataaaaccctaagccattaagttttaggatgagtttgttatattgcaataaatagctaataatgttactgttaaatgtagaatatagcctgtgaaaatgaattgatgtgtattattaaagataaaaaataccttaagcaactatgaatagtttttaaataaacgaacatagatatttctattaaaggtcatgggctcttctgaagtttgctttcttaaaccattcacgtaactttttaagtttgatttcctttatctgtaaaatgaaaaataatactactaaaaattaacttgcatggaaattgtagctattaagtggaacaatatatgtgaaaataaaccaatgtcaatcttagatggataaaagttcataaataattgctattagtattattggtctgttattacctccagaaaatgtaacttttgagtgttaaatatattcccttctctttataggttttctcagttccataccatagaaattctttaatgcaggcaaccctcaaagatactgcaggttcagttccagaccaacacaataaaacaaatattgcaataaagcaacttgttgcagagagttagacaggccatgagtaggggaggagagggctctctccccaacccaccaggaccctaaggtgattattggaggatgatttgacagttatcgcgttgcctctctaaaaatgataatttggctgtcactgccagggagcgacaatctcctgatggtccacagctgtcacgttaaagtgttaattgaaggaagataccaggaagaagtaactcccggggcatcaacattaaaagacaaaatggaggagtatgacctttcaggggcactccactggaaaaaaaagggaagaaagcctcagatggacatgcgtagaacttcctaagcacactgcgcatgctcacttcccaagtgtaaggagggcactgcatttgtgggcagcccaacttaagggaagattcatgggaaaggggcacaagacgccagaggtgggctgctctataaagtcctaggatcaaggtaaaatgctgcatttgaccttctcagtgcccacttgggtctcctccaagtgtactttcctttctttactgctctaaagctttttaatatacttccactcctgctctgaaacttgcctcggtctcttttttctgccttacatccttcagtcaaactcttctgaggaggcaagaactgaggtcgctgcagatccatacagattcaccaccagtaactcggatcccttctgccattcacaaagtcacacaaacctttttgtttcccagtgaatatactagttatattaacactaaactgtagcttattagcttattaaatatacagtagcattgtgtctaaaacaactaagtgtgtaatattattgtgtctaaaaacaatatacataatttgattaaaaatactttattactaaaaattgctaatatttatcttagccttcagtgagttcataatcttttggctggtacaggttcttgcctcagtgttgatggccgttgactgatgagggtggcggttactgaagtttgggattggctgtgataatttcttaaaataagacaacagtagggtttgccacagcaattgactctttcatgaactatttctctacagcatgccctgtttgatagcattttactcacagtggaacttctttcaaaattggaatcaatcctttcaaaccctgctgctgcttccccaactatgtcttctgttgtcatttcaataatgttcaccacatcttcggcaagactagattccatctcaggaagatactttctttgctcatccaaaagaagcaactcctcatccattcaagttttattatgagaatgcagcaattctgtcccatcttcaggcttcacttctaattcaaattatgttgctatttccaccacatatgcagttacttcctccattgaagtcttaaacccctcaaacttatccatgatagttgggatcaacttatttaaaactaccattaatgttgatattttgacctcctcccttatcacaaatgttcttaatggatctagaatggtgatctctttccagaagatgctcaatgtactttgcccagatctgttacaggaatccctatgtgtggcggctatagccttataaaatgtatttgttaaataataagacttgaaattcagaattactctttgatccattaggaatgaatgttgtgttagcaggcatgtaaacaatgttaatatccttagatattggagtgattgggtgtcaagtgcattgtcagcaaacagtaatattttaaaaagggcttttttttttttttttcctgagcagtagatctttacagtgggcttaaaattttcggtaaaccatgttgtaaacagatgtgctgtgatccaggccttattcttccatttacagagtacaggcagaataggtttagcataattcttaaagccctaggatttcctgacaggtaaatgagcagtggcttctgcttcaagtcactagctgcattagcttctagcaagatagtcagcttgttctttgaagctttgaaggcaggcattgacttctccttgctggctctgagaagatggtcatctccttccattagaaggctgtataatctagattgaaaatcttttgtttagtatagctacctttatcaaatatctaagtcttctggataacttcctgcagcttctacatcagcacttgctacttcatctaagacttttgtcttatggagactgcttctttccatgtacttcatgaaccaatcttgctaaattcaaacttttcttctgtacgttcctcatctctctaagccttcat

SEQ ID NO: 1881940 - DNA, 4001 bp, Homo sapiens
ggcaacagaaagaggatcctccttcctttgcccctgtagcttatctctctaaacaattagaccacacttcaaaggatggccaacctgtcttagagcattagcagtggcagccgttttagctctggaaagcaaaaaactaacacttggccaaagcaccaccatccactgccctcacaatttacaggatctcctctcctcccaggtgttaaactccctctctccttcccgagttcagtcactccatgccctctttattgaaaatcccaaatccagtgttgccaaaagtgctcccctcaacccaacatccttactccccatatcttcttcccctcttactcattcttggactgacatcctggaccttgtacagccacatttcccaaatatttcctctgagcctctcaccaatccctatgaacaactgttcatagatggctcctcttccaggcccactggctcccccaaaattgctggatatgcagttgttttccttgaccaagtaattaaagccatacccctaccaaaacccagatttacagtccttaataagtctctccaattcctattccaaaatgaaaaacctctcaacacaataaggcaagcagctctgttaatgtgcccctatttccatattggttccactcctaccaaccatactaagcccatcttccgtcctacagccaccaacatcttctaaacttctcaagctcctctgtgcatccaatgccacttcccctcaggtcacctcctaagacacctaccttcaaaccactgcaacttcactgcaacttcacaacttcactctgcaactccaaggcccagttaatcatactaatctttccattttctgggttactatgagcttttctggcccctgaaaattaacaccactgtactacacaacataaactcaagatactgcaacaaaagacacctaccctgcctatcccttcaaccctggactacattcccctataaggctcaccacccccaaccccaaacgaatatctcctaatccccctgttaaacagtaaccacaaactcctggtagacacaaaacggtttctcctccaccaggaaaataaccaggttcaatccaaccatcccccaataccctcttccagccactcctcacagctgccttagcaagcaccctaggagcatggatacatgaagaccacaagcttaaacacctttttaacatacacaaccaattttgtttacctagccaagccatattcttcctgtgcggtacctccgcctacctctacctccctaccaactggactggtacttgtactctggttgtcctaagcccaaaaattaacattgcccctggaaaccaaagcctatgaatccttgtaaaaactcaagtgcgccaatgcagtgccgttcagttaatacttctcctagtagggctagaaatgactactgtggttggaaccagagtggcggggctttctacttccctcatgtactatcactgtctctcacaagatcttacaggcagttaaaaagacatagctaacactgtttcaaccctccaatcacaggtagactccttagccgcagttgtccttcaaaatcacagaggtcttaatttgctcactgctgaaaaaggaaggctgtgcatctttttagataaacagtgctgcttttatctcaatcaatcaggcctagtacaagatgcagtcaaaaaatgaaaaaaccaaaccccacccccccaccaaaaaaaaaaaaaacacatcctctacctggtccctctggccttcatggtcccttagcttttgggctccctggctactacccctccttcgcccagctataagcatgcttcttctcttagcttttggaccctgcttcatacgtctccttacccagtttttacaggaccacatcaaagccttcacccataggacagttcaagatatgctgcttcttcaagaatactgatggcttcaaaaacaaccatccgaaacccccagcctttcctcttctacgccgcccttccacagctacaagcagtcagatgataacgttgccctcttcctttatgacctattaaaggccggaatgttagagatccaagctacccctcctcctcctccaggaacttcacaatacagtcctttgtgaccacctacaaacacctccccaacttttctacagccgcttgtgcaagactttcagtagaactagtaaacagttctaggatacagttaagacatctgcccaccttgcttagccgaacgggcaaaaacatttccaggaaatggttgaaacacctgctaccctactcagtttcccctaccccagcctagccccttgccctataaaaccccacagcagtctgtaaatgaggctgcctcctctggagcagcccagcaggttaataaaaacttgcttgcctgagtttggggtctactcgttccttctctcggctaaccttatagctctcatctcaaccaattctaagaattatgcccttatatactagtgtgtgtgtaccaccatttacattttttgattctggaataacagactgtaaataaaaactattcggccgggcgcggtggctcacgcctgtaatcacagcactttgggaggccgaggcgggtggatcatgaggtcaggagatcgagaccatcttggctaacaaggtgaaaccccgtctctactaaaaatacaaaaaattagccgggcgcggtggcgggcgcctgtagtcccagctactcgggaggctgaggcaggagaatggcgtgaacccgggaagcggagcttgcagtgagccgagattgcgccactgcagtccgcagtccggcctgggcgacagagcgagactccgtctcaaaaaaaaaaaaaaaaaaaaaaacaaaaaaaaaacacaactattcataactagttaagaacttgggttaatgatgcatgtttctgaaataattctgccagagtcagtcttatttcgtctatggcacagatttctctttaaaaatggcttgagaagaattgctagctctatttctagctcgaaattatacaccccataacctgccatgacaaccgagggtgacatgatttttgcctacattcatttaccagatctggacacatggctttataaaagagctggaaattataggagtgaaaataaaattgtccgtatactttgtcattctatcacaaaaaatcataagatattaccacttaatacatttcaaatacaaaaacataataaatcatgttaattgaaatgaaaatttctttaaatatgggtcttggaggacaatttttaaatggtagagtaaagatatttgaaaatgcactcctccataaaagtgatgagaatgctgggagaaaaaaaatcaaaattaatattttcagaatctgaaaacaaaagctttcaattactcaaagtgtttactcaagaaaaatcattgaatctaggtaagaacagaagattcatgaccctttaactttccctaatcccatcatgctgtcccagattcacagtactcttgaaaactaacaacctcataattccaacagctgtgaaatccagctaaccaacaaccactggaagaaacaacatatttagatatccaaaaacacccaaactccagtggattctcattacttgacctgtcaggcaactccctgaaaagcttcattctctgggcagttgtatagttgatatagcacagagcttcctctgtgcaaatagccatatccttagagcatttatttcaaaacaaacgatggcaattatttaacagcatagctgcctgaagtggtgataaccattggggccaataaaaatctggccaaaaatcttaaaaggaaaaaatgagaaatgagtttttcatggggcactttgaaaaccactcacatgttgctggtattttgcaaagccacatgcctctacagagtcatgtgcatactcaggactttgcacatatccagaaaagacctgtgaaggccatgatctctgacctctggaagcc

SEQ ID NO: 1881941 - DNA, 4001 bp, Homo sapiens
gctcataacaacataagctagacggtgatcctgtatcaccttcctgcattctgggaggctcggcctccaactcccagaccagggaatggtctccactcctccaatccttcccaggttcagaagcaggaatgggggaagtcctgcctgtcccctctctgactttactttccctttctagagcaggggtattctgggatgggaggactgagtgtccctgctgcctggtcctcagagttggctagctccccccatgcccctcattcccccgcctgctcgcctgtagagctgtggcccgggcagctgtccggctgagtgggttagcaacacaagacagatggcgagggattatctcagcttctcagagcacgatggtggcagcggcgggggtggggggaaggctctcacaccctccccatgtgtgtgtacacacacacacacaaatgcacacatgcagctccccgctcctgccccagacccagcccagcctcctgctatttatgaggcgggcaggaagacaagaggagagatgagattatgagaattggtgagaaccgtgggacttggcaatcttgtccctgccccacttggctcccagaccacaggctgaaccagcttctcaggcccttcttggaccctgcccctgctattgtgatttctctgcagctgccaccactgggaatggtacattcaggagggcatggttttacagagaagtttgaggcccagagatgtgcgagctgcactcaaagtcacacagcaagtttggttcattagcagggtaagttctggggggtggcaggtggtggagtctcttagctgtcctggcactggctgtggggtccttgggtcttctgcaaacaaggtgtttgccctagcacttgatgctgcagcccaaggtcccacaggggcatgtcacaaggccagctgctggcacgcaagtactcacaggcacagcctcttgttcatatacactgtcaggctctgggtgaaggctatgtagagttgagtgacagagctgggtctccaggctgtgtcactgtgaaagaattggggcagggttagaaccccactagagtgaattctcctacctgtccctcaatttgccacaggcagatggtggagggactttccagcctcggccacacactcaggcccccctaccaccacatttgcccattaacagccccactccaagtcctgagtcatctatgctgagtcgcctggggaggagtgtgggccaggagactgggcaggatttgcgaatggcaaccccagggggcccttttcccagcatgggtgggcggggccgacgcagtggggaaggcagggtggaggccttctgagagaacttctctgctcctagctgccaatgtcctgacttcgcccccgtccccaagagtgactcagtgtctgctggatgcggtagtgcgggtgcggggcagtgcggagctgctgcgggttgcccagtgccactcccttcagagcaaacccacttcttgaggccccgaggcccccgcctgggggtctcctgtgttcacgtgtgcctgcccaggctgtcaagtgaaacatgacctcagggtcagcctggcctgcctctggggctgcattatttgcggggtttccaacatgatggtaccacccacactgtccggtcacaaacaagaccgacaccgccaggtttacctgctcctgccccctcaaaccattgaatcagcccctctcttgctattggatgagaggggttgccaggaccaagcccctcctccccaccgccaaggtgaccacacgtctaggtatcaggggtggtgggcccactgcagagcgctaggccgaactcatctcctggatccaggccaagctccacctctctgtctctccagactcaagttggtcatttgtatcgtgaaagctggacaaaactatatctaagctccccatcttccctcaaagcttggcctggggagccctacatgaaaccttggagcttctgagccttcccccacccccagcggggggcttttcgttctgtgaaggtctcaaagtaacattctaaagaggcaccgtgagagccaatcagagagcccatgtaaataacggcccgctgattggctgtctccttcacgccctgaacgaaacttcaacttcatcaactcagcgaagattttttcctctggcctcgcgcgccctgcagaaggcggggctggggggtcacccgagccttctccctgccgcaggctacctgggcccgccgaatgggatcgcgctgggacaggcgggggcgagtgtgccgccctgaccctggccccgggggtgttattctggtacagaatcccccgcgggggaggcccgagaagtgaggcacccccgcttctttgtaggaccgccacagaacgggctgcaggccgcgagtatagagcttggctgggcgggatcgatatctgcccgctggactgatgcgcgagggaggctgctagacaggctggctttgcggcagtgtgatggccgcgcagcaccccctgacccccacggctccccaaccccgccattcccttcatctagcgctcccggggaagccgaggcgggcaagtggcgtagcgatggagggcgcacccaggggcagcgacgctccctcgctctggctcccagccctggtggtgggtgcaggagtgagggtagcccagggtcgcaccctgctcccaacctcggctcgtccccaccctccacggtcgtccgcagctcgaggcagcctgcatttctgccagtatcctgtcccctcgcccggtccttcgccctcctcccactttcattgtgtgtctcctctctggctctgaggttcctcctccctcccttctctctctgggtgtctccgtgtctatctccacatctccatctccatttctttctctgcctgtctctgtctctagctgtctctgtccctcagtctctgctcaggtctccgctcgcctcttgctcattttcgttcctctctttgtctgtctgactctctcttgtctcccccccttcagttacccccaaccccccgcacacacacacacctcacagccctgtttacgacatcccctgggctggcaggtgggcggggctgcagcagagcgggggtgagagagggagacgcagcctcccccccagctgttaaccttcacgcttcaggcctctgcggatggcagaggagggggaaagcccagctgccagcttggcggaggtgaccgggcgggggctgggggctgtccctccctctgggctcgtctctggggagatctggggccggaaggaatgtggtggagggcgccttcggctgaggaaggctgttgccggatgggtggcctcctgaaggcttgtgctggcgaggcgggtgcccaaagggggctctgagcggtgtcggccctgcccgcagcccggccggacgtgggggccggcgtgagaatcccgcccatctgtgagccggcctcacgccgtcagacccaatttatctcgccgccaaagtttcacagccatctgctcgagtggaacggcttccagcgctggccccaccgggccccccagccagcgcggggatgttttccaatacgacagcatcgccccgccaaagcaaggagggggtgtagggggaggcggcagagcgcggtgcgcggggctggcaggcagccctctcccgcgagcgagccgaccctgaattttaagcgattgatcaggaagctcaggccgttcccatcactttgagcagccaaatgcgacggcgcagggatttcaaggggcctttgcggaggcggtaatgaggtcaccgtcactgcgccagcccgcgggcgggagggggcgaaggtctgcggacacgtgtgaacacagcctgtgaaccgagccacatctgtattcacgtgacccccggggccccagcactgacccaggaaaactcggcatttggatctgagctgattcacactcccccgcccccaccccacctacccagccagacacggttcgag

SEQ ID NO: 1881942 - DNA, 4001 bp, Homo sapiens
ttagttgagagttattaccaatagaaaggaatgtctgggttataagaggttgtggagaccaaagttttatcagcagaagaagccttggggtagcaggcttcagagagaatagatggtgtttctcattagacttaaggtctgtgttggctttccctgaattccaaaagggaggagggcatagtcagccatgtcccacccgcccccacttcatgtcgtggcctgaacggttttcaggttaatttggagtgccctggcccagagaaggggtccattcagatggggtggggccttagaattttacttttggtttacaactttatgaagagaccattagaaaccacttgaattcacatcatgaaaaaaaatccacactgtaaaaaaggtttgtagattaacacattaggtgaatgccaaagccacagaatatctaaatttctctgaggaatttgaaaactctcaggtatatgccttgtggacaagagagacagaaaaatgggacagaggatgagatagtttggagaatggatagctgatcagatctgtagctgtgcccagagtgctgaataatggatttgcgtccacagggaagaaagtctcaggtgccactgataaaagaccacgtccttggctctgggtccattcaacatcttggtagacaactgagtgaaaattcagagacaaccctaggaagtatgaggatgaaaaaagttagcattcatggaatgaggcactgaagaaactgaaaagctgaaataaccccatgaaataatgagaataattgtagtattctgaaccggggcacaggacacaggaccggggtggaaggcggcacgagactacgcgcgtgggaaagacccagggatcacagtggcccaaagctgggcacttcccaattccgggatttgtgctacaggcactccaggctccaccttagaactgtgtccagcacgaaggcagtgctgtcttgcgggaggcagggctgcaccaccaccggggtgtgaaggggcccagcaggcaggggtgtgaaggggcccagcagtgtttccagctgcacggggtcaggggccgcgctgatgcagagcacgggggcgcaggttaaacctaaaggagggaagcttttgggggcggaacagacaaccgagaatgctgcacactgcctttcccacccgaattgtgttttgacttttttttttttttttttttgagacagagttttgcacttgttgcccaggcctggagtgcaatggcccgatctcggatcactgcaacctcctcctcccggtttcaagcaattctcctgcctcagcctcccgagtagctgggattacaggtgtgcaccatcacgcccggttagttttgtatttttagtagatacggggtgtctcccaattggccaaggctggtctcgaactcccgacttcaggtaatccactggccttggcctcccaaagtgctgggattacaggcgtgagccaccgcgcccggcctgcttttgctttcttttttttttttttttttttggcagagtctcgctgtccacccctgtagtgcagtgagctcggctccctgcggccttgacctcccgggctcaggcaatcctcccgcctcagcccacggagtagatgggaccacaggagcccaccacgcccgactactttttgtaatttttgtagggatggggtctatccatgctgcccaggctggtccgaactgctgggctcaagagctccgcccgcctccgcctcccaaagggcagggatcacaggtgtgagctaccgcgccccgcccagagtttccgactgttagcaaatcacattcacctcaaaactatttatacaagaactgaaaggcaaactaagtccgtgctccatcacttcctgtcccaggtcgcggggccggacattttctccaagcgctttcctggcacagcgcgcaggcggcctgcgccaaagctctggcttcctccaggcgcccagaccccgccctccccgcaggcgccagggcgttgcctggcaacttagctgcgaggggattggctgcgcgggaccccgtgaccatcccggagaccacgcatttcctgcgcccccggaagtggtgataatgccaggccctgcccccggcagaggcggaagcggagtcggcctgagaggtctctcgtcgctgcaggcgcctcagcccagccgcgtgccttggcccatggccgcctactcttaccgccccggccctggggccggccctgggcctgctgcaggcgcggcgctgccggaccagagcttcctgtggaacgttttccagaggtgcggcctggcaccgcccgggcacctcccgcctccgccgcggcggccccgacccctgtcccgactcccccgaccaaccccgttccctgccggttctactgcggcctcctccgtcccctgtcgggtcccccgcggccccctcccgtcccctgccgccgcccccgacccctgccccagccgacgcggccgcccccgtcccctggcgggtcccccgcggtctcccccgtccgctgcccggtctcctggggccgcccctgcctcctgcccggtccctgtcctgtgcgtcgggcccttcccaagatgcagagtgcgccactgcagacccgaggtcgcggccaccggctcctgggctaggccctttttctcgcctcaagagccgccaggtggagggtctccagggtgcttgtttggggaaagcggaaacagactgcctgggcgctgttaaaatgtcagcagccaaggaagaagcagcgacctggcgtctgctcgggccaggtgacctttatggcggcgccttctgtccctggtcgcttttccaccgaatgtccgaaactgtagtgactgatggccagggaatggcttagttatctgagggaatcttgtcttgtctgtgaaaaagggaaacgggtgcaaatgggaattcagacaggccaggagaggaaggaagggaaggattgaggtgaagatgattgtcctcttaggggaagaccacactggacgtcggctcctggggcacttccttgattccgctgtactcctcagcgggacgggagaggcggaggttccaggagggagccttccagagtcggtgcagggttgacagaagacgtttgttttgcttttcctgaactttcgatcgccagcttatttggtcttcttgatgttatagggtcgataaagacaggagtggagtgatatcagacaccgagcttcagcaagctctctccaacggtgagtgggccagtgggaactgggtctccggaccaagaagccgcgagcctgccctgttcacagtggataactttctgaagttgtttttccaaggacaaaggaatcattaggacaaattgttattactgcttcgtagtggagatgcttctggtttattttgtggctaccgctgttactgcttggagtgcctcaccgagccagctaacaactgcgtgcgtgagcacagggaaaggcttcttgagaaatgaaaactagattgtaggtttaggaggggaataggaagcttagctctgtacagccgaaagccttttggtaagttggaggtccttgaatttcctgggtgactgcatcttggtgacttctctgaatagaccttcgagggcactggggggtgattgttggagggcttggggagctcaggcagcccttgtatgggaatgtggctgttacaggaactgcagaaactgggactgggttcctggggaaaggattgggggtgttggaggcgctggccaggggattatggggaggtgttcttatcagtgtgcgaatactgggcgttcaggcagcgggaaatccgggtccttgcgtgttgtgagctccctggaattacgttcttgccagtttcagctcagttgatccccctcccctccgctatcattggacacattttacttcattgaaacctgactgccactttttctgtaatccctcaggggcagtcatcttttctgattctgtgtatagtttgct

SEQ ID NO: 1881943 - DNA, 4001 bp, Homo sapiens
gacttcttatccctggaatgctggttactcttgttcttcatgctactgggctggcactcagcattgcacaatgatgcttagccttttatgggcatagctatttcctcaaggagactgaactcttggaggacaaggaccctgccttggtatgtcttattatagatcccggaagtgcccagtactggccccttttatagaagatgctcagtatttgtttgtgatggtaatgatgattcatgtttgacttgggtgacaaattaattttattcattctgtttcctcaacccctagcacattgcctggcccagagtaagtactcaagaaaagcctactgaatgaatgaacaaatgaattaatgaatcattcgaattttaaaaactagttagaaacacacacatacagaatggagaacattgtgagcagattatttcttagcctttgtttttaaaaatacaaaaataatctcactttcttttcttttcttttagttgaccacaagaagataggctgtgacttaattgttttagccaagtgctgttaaatctcacgctcctttttcttgactcaggaatacagaatataaatatagagtgccctcctatctccccagtgtcattgccttgctctgtgaacaaacccagaggtccaacgtttgtggaaggccgtcttctactcacttcagaagacgaatatgacaatgtgacccattccctgagatggtgagtgcataggacattggaaagctgtctttgaccataacaagaggaagatgtcaaaatgatgtaaagaaacaggtttgaacttcagctaaaagttaaatgaccagcactgaattcacattgaatccctcctttgctaaagtattacttacctgattagacatattatccactaagagtccttccagctcaaagattcaatgcagtatagtaggaaataatagattttaaaatttgaagacctgagtgtcaaattctagtttcaccttttacaagttgtgtgactttgagtaagtcacataatctgtctgacccttcaattactcctgtgtggactgggatgtaccattcctgcacgatttctcacaggataacccgagtctcattgaggacatgcatatgaaaatgccaaccactagtcagatgttagacattaattgatagttaaggaaacaggggccctgagaagataaatatcttcccaagagactctagagatcctctggctgagcacttcctgaagcatttccttgccaacagtgttagttccacagaacactcatttcacaagtggcaatagccatgacataacataatcattttaaacaagtatgggaaattctgtgctgaacaaaaataagcacattcgttaactgcaggacttatcagagccattaacatggtcatgtcctttgtgactctctaagcatttcctcctcttaatagacaagctgtcacaagattaggattccatggagcacaacatgggaaatgctgacctagtttattgcctaggtctgatttcacagtcctctaattcagtgctactgcaagtacccaaataccaggttggtaaatatttgttcctcatctgtgatgagaaaaaaagcttatgaaattgtaaatcaacaagtcatcaaaaagtcttgctaccgagaaaaaaaaaaaagaaaaaaagcctgtcagtggaacgtagtgaacttattctggtgcaagctccaccagtgtgcataccagcagtggtccccagactatgctttgagtaacatttctctaattaattggataaagatgcagctttagtgaaaaagcagaatctaaagaaaagaaacctttttcataccttgtgcttggcagcacatgtgaagtctggaagttgtctgattcagaaagctccaggctcccagcagtcaaagggttggccatcaggcagattggattgctggttggcagcgtccacccgagccttcctaacttcagttgctagtgcactaactggacacaacccttagtcatcacactggagagatgatcatcccaacaggatacaaagccaagccctgcaaggctcctttccagacaaaagctgatctaactgagctgtacaaagggcaggcaaattaacttcctgttagctctgtaaaaatactggggaaactctccctaaacaataatccccaagtgagggtttccatgagaaaaaagtgatgcagtcaaatgagggaaactgaagagtttcaaaaagggctaatttgcaaagatgtactgggttaaaaggaatagtgattgttaagcatggagtgctattaccacccttagagggaaggtcattggacctggaagctatgaaagagagctgcctgcttgacgggcgcttggccttagatcgtggaacatggactctgagactcacagccctgcagggagggcaggcaatgccccaacctcacttttccctctccatgcagtctttgcccgtgcatctcattggctctctaaccagaagccaggggacaaaggagcttgtcgctatggtccgtaaatgcctatcggcacagcagggtggacagaggatctggaaaggtaaatgaaaatcattcatcacagctcaccccgtgtgctcctctgtggctctcggctttgtgagcagcacatgaagggtgctggccagtgtggagaagtggagagcagatctggaaggacaactgaaatccatctagcacagtgtcattctcttctgagctcagaaaacaaattgagttacagtcgtgaaggcttttggtttctgttggcctctcttgtcaagacttttgccaatccagtcatttttctccctttcaatgctttcatggtgccagggtatcaacatgcctttgtgctgatcacagttttttcagaatccaattctcaagacaaaattagggtgggtatgtttacacactaaaaactctgctaataaacactaatatttcaagtatccatcttacttatttaatttttctctcatttttagagatagggttgatttgatgttattttcatgtactcagactcctgattaaacacattttcatggtataaatctattactctctacctagctacttcttaaagcctttttgcctttagggttctgatgacgttattactgttacagacacatggatattaagtgtttacattaagcatctgtctgtaggagtgaggctgtggattcaggctgtgcaagctgtgaaatgcctggatgtgagtggaggaaatggctaagtaattgcactttgtgcatacccattacagcacttagagtgggcataatgcttggttgggtgtctgaccagaagcccaggagagaagaaactccttggaaataaatactctgtattatctttctctgtattacttccattctctccaatgattaccaaatagatttatattgactaactaacacagtgacagaaagcctacatccaaatgaatagttctgttttaacaggatcacttttggaggcaatgtaatggtttcaacaattgctggaagatctttgtctgcatcaacttctactgggcagtctcagccttggtagtaggaaatatttgttttgtgagcagactttttttttttttttttttgagacagggtctctctatgttctgcaggctggagtacagtggctattcataggcactatcacagcacactgcagcctcaaactcctgggcttgagcaatcctcccaactcagctcctgactacaggcacttgagactacaggcgcatgccacccggcttatttttacatttattttgttattttactttatggctaccaagtctggcagttatgcaactgacaatagtttgagttaaaaaaaaaattggaatgatagcacggttggatcggtgttgctgtgtggctgggataccatttcaggctcagttgcacaagtcagactctattctagctagttcgagcaagaaattatttattacagggtgtaa

SEQ ID NO: 1881944 - DNA, 4001 bp, Homo sapiens
ctctcatcattttcagccatttaaaaaaggaataataattcctagctccaaagctatacaaagaccctggggccagatttggcatggggcatgttttgtccacccctgaaataaatcaccatacagccccaaattgttgatctttaggctttacctacaggaaagagacactttggtgttgcttctgctagatggagtttgctctgattcagcaaaacgaattcctgacttatgattactagatgcagcagcccctgggggtgctccacccacacgcaacccatatcaattcttttccagctccgtgcacccttccgggtttctgtggcttgcttccaaggctcaaacttgcaactctcttttaagataaccttaggtccactggcacctgtggctggaaagttggaagtgcctgagaatttacatgccctctgggcagcccttccctagagaacttcaaagcctcgctgacttttgcatctggacgaactcagacagaatttttaccctggagttcccctgtagaatcaggcacaggcctccctcctcaggactttgcctgacatcacacctttgtttggtttgctcccggctcctgtcctgtttttcctgctctttcctggacttcctatgggagcacttccttcacaattcacgtgcacatagcccttgtcaaggtctacttctggaagcttcaatctaagccatagtaatcatccttgctcaaggagatttttctccagactccaataaaacagaagaaacagcagtctcctctttacagaaataaaaaggagtgttctagctaaagccctttttacagagcagcataatgggtaagagcaggggctccagagtcagcctgcttataaacagtcttttggagcctcaagattcctcatctgtaaattggagctaatgacaatgacagcacaggggttgtgttgaggctatgttgaatatcatggcacttacacatcccatccagcacacaagaaacactccataaaagttagttactatgagcatcattaatatgttgtctgaggcattttgacacaaccactgctacttgtaaattccaacacagaattttcttggtacataatagaaaaacaagtgctatctgctgctctgtgagaagctgatgatgaattaccaaataagattttctactttgtaggtatatttgaatatcagtatgtccaattaattcagtataaatataaaggacacatcctgcttgaaaatgtcagcaataagttaggcaaatggctgcattctgaaaccaggcatacctggaccatactcccaaatatgctgctcctgtagagacttcagtattgatttacccaatcagattgccaatacttacctcctaaggttattgtgaagattagacaaaactctgcataaaaaacacttagctactctttattaggaatttactatgttcccggcactgtgctattgttatccatgcccaattccccggaagagaagtggaaagattccatacatcactgggatacctttaccctgatgacaaaggcagcaatggcaccgactcccagaagataatcttttagaaaataatcacctggttttttcctcggccattagccttcttgggtcagtttgctagaaaccaaccccccaacaacaaagaaactccaaggaaaatgagcctcttcattgctgctgaaagcagggggaactgcgtcctcttacaggctctttactatggttgatacaagtgagtctccattttttagcttcagtaccatccagtcaatgctttgtaggaagagctgcatgtcggagtgttaacccgccagtgtttgtgcatctctctgggagccctcctggcagagccctcctctgcaccagcacagaggtctgatgtgggacggtcaggctatcagagctcaaagagaaaacaaatctcttctgtataggccaggaaggcctcaccaaggagcctttttgctctgcttgggagggaatggaaagaaaaaaagggaaaaccacacccttcgaaggcctcagtaaatatttgaagcgtgcctaggtttggccaaatgagaactccccttatttaagtatttatgaaatgatcaaatagcaggattgtatttccatgagctagagagttcttatttagtgacacagattttttttttgttcaaacttttttctttttttgccacattcagcaattgctatcagatgctgaatgtctgtggtcacatactcagcttcctgtttataaatgcgctctgttttcagtgagtcagcagtttcttgttctacagagaggtaaaactggtggtgtcagggccgtggggggttgaatgagctttgtgaatggcccagtgtgtgctgggcctcaggatttgtgtgaacaggtactcacactgtctgtggctgtccataagctgaaataattcagcccagtgagtttggtggtttctcatctgattctgtccaagcgaaacaaagccagacactaaagtggtaaggacagacattaaccagtaataactattgcaatagggaagagtccaatgtaaactgaactcagcttcaatttgtgcagaggtgactggactttttttttttttttttttttggagacggagttttgctcttgtcacccaggctggagtgcaatggcacaatctcggctaactgcaacctccacctcccaggctcaagtgattctcctgcctcagcctcctgagtagctgggattacaggtacctgccatcacacccggctaattttttgtatttttagtagagatgggttttgccatgttggccaggctggtctcgaactcctgacttcaggtgatccatccgcctgggcctcccaaagtgctgagattacaggtgtgagccaccatgcctggccagactaggcatttttagggaagaatgagggaataggaaggagggcaaacagaaccagtagggtcagggaagtgaaaaattacgaagggctgttcagtataaatgcaatcagaccagctgtgcctgctagctggcagttaggaaagttaggattctatcctctctgagactgggagacagaggtccttacccttcctgatgattacattcaaaggaatagctttcagggccttgagaaacacactcctgggttgtaggagatacatatacatctcaaaggttacagagaactcaaaattgcccttcttagtaagtgctctacgaaagagtggtcaggctagttccaggtgtgggctagagcaagcagtaaatccccctgggcagccttgagttttctcaggcaggcatccttaagggggtaggagcatcctggggatgtggccttgaggtattggaaaccttattagcgattgtgcaagtgttttagagcaaggctgaggcctggctgagaagagggctcagaagagcctgactagagtttgctcaaggtcagagtctttgtcactgtgaggcagcccagggtctgtctttggcacttcactcacttgctttggtgctactgcttcctgacctcgcctaccagtcccgttgtcagctgcagtggcctccagctgccaggtgggctggaacttcaaacgactgatgtccttgaagagcctgggagttctggactttcctgcctcccctcccttggccccagcacacactgctccatctgcccctccttccacaccctcttgtaagccagctccacatcgcctttggaattcggtttttccttcatctcttcgtgtgaaagcctcccctgagctccagtacctgggtttggcattcccacaacaccaagctcttctctcctggagcatttattgcactgtatttcagagaatagttaagcactggtttcccccactaaactgtaagccataggagagcagggactaggtgcaattcaatcagcaggtgcttactaagtgcttgctgaggagtggatgggtggtacctgtcctttgatgcctcctctca

SEQ ID NO: 1881945 - DNA, 4001 bp, Homo sapiens
atttatccataaaacaagactaatgacaaccacttccctggaaatacagctaaaaacgttcagcaatttgtacaacgctatgtggacattaatccttactactcagaaataagcagctgagagatgtttgtaaccattcccatttcccccgccacacacacacacacacacacacacaaagcttcgtcctttacaatttatttcttccttagagtttggatcacttctacctgtcacacaccatcttccttacgatcccagcatcactgggatgtagcagggaactgacgccatcctgtctgccttccaatgtggaacaatggcacacagtagagcatccaaggtacatcaacagtgacaaagatgacttgaaaattcacagggacatttgagtgggagtaataagtttggtttattaagcttgtggcttttcttaatctggctcctccttatctcaccttctgctctgacaggaagtcactgctctgcgttggttttgttcattctgtttaacatgtagaaagctttactgttgccacacacctgtacaaggaaagcaggttttttataaaattctgtgttctgggagggtactcattcacatacaacttaacatacagggaggtcaggcaggtgatttggtctaggtcataagctgtgttgccttgggcaaattacttagcctcttggaacttatttcttccattgtaacataagttgtcctgctttcctcaaagacatagacatgaaaccataaatgatcatataaaaagaattttggaaataaggtattttacttatatattattaagttataatgaataatacataattatagtattattttttattattcctactctttgtgctagaaaacaatttgaaaggagtctcttgcaatctgccgagcataatagctctggattttaattctcctttctaaaatgaatggaagataaaatgcatacctcttaaaagaaagatctgttgatttaatgcaaattttgatcagtgttactaggaagtgattggcattctgatgcgtgatctgtttgtattcattttatatttgcactgctgatcagtgtctggcacaaacagaatcttgtagaatcttgagtctaataccttttgtattgaaggcctggcaatgcattgtcatctgttcctgggaagaattacaaaatgcagtcctttatttttaaaagacattattattaagtccctggaaaaacacatggccattttcaattaaaaatgagtaaaagagagactctgaatcaaaaatagttgccaatgttcacctttaacaacattatgaaatctcacaaaaatgtaactaaaatttaaccaaatttgggcaaacttagagaaacgacatgagtagggatgtttgctgcaaaacatatggttttctctggttggtgctcaggctttagctaagccacattgtgaagtaaccataatctgtgcaaggtccatgtctctcttcatcataaatctatgtccaaatgaaaaagagagaagaatgaaatatgataggcaccattttgtgccaggaaaaatagtaagtattgcttgagagcaatggacatctttgaactctgtctgcaacttcattacattcttatggcatggatatttttcatttataaatattatatacacatatagtataaattttctttatagcataagtactctgatacaggtattagagatggtatctccagatatgagttctttatggcatacatacctctcccaaaaaagtgctaaaagcaattagccggatgtggtggtgggcgcctgtagtcccagctactcgggaggctgaggcaggagaatggcgtgaacccaggaggcagagcttgcagtgagccgagatcgcgccactgcactccagcctgggcgacagagagagactccgtctcaaaacaaaacaaaacaaaaaagtgctaaaagcacagacctgaaagtccccaaactgatacataacgtttacacctaggtgtgaaaaaaaatcttacccctagagcacctgtggtgagaaagtcaaaacttacaagaacaaaactcagtcttcagaatcttcttccttcatcacaggatcaacacatttcatctgggcttcttaaatctaaatctttaaaatgactaagttttcttccttttctctgtttttcctaatagttggggcttatatgactcatgtgtgtaagtatctcctatatctacatgtaaacattaaatgaatttctactgactatattgttatattatagatgaaaattattttcacaatcattcctatctttctgaactgtaatgtattatacaaatttttcatcagtaaaattattgtagcttttaggtagggttattgttgttttttaagctttgaaaataatatagtgactgtcattggaagaattacatgaaacagtagtttagatcttttgtgtgaaaccttttggtctacttttgtaggtttcaatatggaaattattggagggaaagaagtgtcacctcattccaggccatttatggcctccatccagtatggcggacatcacgtttgtggaggtgttctgattgatccacagtgggtgctgacagcagcccactgccaatatcggtgagtcctccacacttttccagacatgtgttttttctgaaagttattataggtacaagagaagcttacctctcctgaatgagaatttgatctactgttagcttctgtggttactgaccaactggtggcgtttatttaccttcttccacatccacgctttctgtcttgggttttccttttcagagagaactgagctgcttttcccaggcaagacattagacaaattcaagtcctctgtataatgcagggaacacagcaacagtaatacttgaagcagcagtactcttgaccttgttagatcacactgctcaaaaggaaatcagacaacctgagcttgctctgtgctctgagcttccccattttacaaaggggtaataatcatatcatacctgctttgtgggttttgagaattaaatagtatctgtttaagtattttagcatgcttggcacatttagtaagcacaaaaaaattgcagctattatcattagtattatacgcatgagaagcctactttgccactcctaacagtagctacctaacagtagctactcaccacttacaactttcctaggtggaaaaaaacaagttattgatgacttctagaaagagaaagataatgagagagttattttctaggatacttagaatgaaagcttttctgaagacagagtaaaaccttccaaagtccatttcagcctaggattctcttacttcagctaataaagcacaaaacccctcttgggatgctgcaaccatcacaaaaggaaatgccagtagaaaactaatttggtatttgttgttttgtttgtttgcttgggtttttggttttgttttttgtttgtatatatgtttccttatgtttcttacctaataagctgaaatggagccttctccttttctttcacttaaagatctctcttagctgtaatggtttgctctccaggcattgtctatatctaaacagaacaattgaattgatttgcttttctatgctttgggggttttgtctgattaccccatttaaatggaactgtttgatcacaaattggaagttttgaagcctgcaaactgggagatcttctgctatctctaaatagcaagccactgatttccaatttaatatggttacttcatttacacagggttcttgccctcatagaaatcacactctcatccccatcacttctctcttctccagggcatttgccccctcgagatcagagagacagagtggggaactgtcagcgaatgttcatttgatgcaaaatatgcacatcttcaaatatgctcataatacacattcaaatggtctataacctccccagacacagagcttgacttctaaatgttcaacaaactttg

SEQ ID NO: 1881946 - DNA, 4001 bp, Homo sapiens
gcagggggctggtgccgctccctgcagatgcccacgatgccaggcagcctggtttagtttgtggaacgtgctctaatccgtcagcacagccacagtagatactctgaaaactaagagaatcaccttcagcagcttatcgactaaccacaggcccttatctcaaatgggaactgattcaaaccgttattcaagcttattcaaatgaatttgagagtctactaacagccctggctacataatttgccgggtgcagttcaaactgaaaatgcagggtccttttcaaaaattattaagcatgtcaacatggtgtcagtagagcatccaactaagcacacgtcggcttctgagcacaggtcacaggcccaaaaacccagccatgccaagcaatgactatccaataagtcaaacaccaggaaaccccaacccctccacagccctgcggctgctgcagcagaaaaacaaaaacaaaacagacactcaacaccatcagcatcagctcttcccaaaccaccagccttcctcagaacctccctcatttgacctgttttaactcgtgttccctcgaccttcaaattttcagtgtccacaaagcagatcaaggctatcacaaaacaaaacaaacaccaaaaagccaacccactggatctagagacctacggacttgccctcctgatacttgcagctggtgtttaaggacgtgcctgccttgggcgatgggcgggtagaaacctcacacaccaaagcccatcgagctaaactcaaggttgcgaaccccaaccccggtgggaacacggtctgcagacacgctcccttaagtccctgtcgcacacaataaattgctttctgaatattccctttacaactgcaaaaaatagaaatggctgtaactgtgcagagaaagaaaagagaagctgggatgagctccatcaggggccgaatctgcttctcgctggtggatactgtgataagaaacctagatctgaacggcctcacaatggcctatttatccggctcttacgcacggccggcagccccggctgggaatcacgggggtggcagccgtccccggaaaacggcggcattccgacacaggaaagcccgcggatcaactgatctgcagacaacgcttcttccttcctgggaagcggccacaaaggcagccagctgaccccggcccagcgcggctcccggccgaggaggacaggggcggggtggggagggggggaatcgtcgcccgccccgcccccaccccccaagtttcctttggcaaaagcatcccaggcgtggttcaggcagagtccacgccagcgaggctggggccgaaactctccacgccaggaaggcggggtaggcggacccgccgcccccagccccgcgcgcccgccgcgccccccacggcccccaccagctggctcttccggccggggcggccttggcctggggctggggttgactttggtggggggacaggaaggactggcacagcgcccgcgactgtcccctgaggaggaccctccctacgacttttggtcaaaagcaaaaagaaacacagacatgtgcgtcaccccgggaagcgcgcgggggtttcgctcgcgtttcaggagccgacttcgcatcctccctcggtaggggggtcgggggttcctaaaatttaccccccaacttcacttctctggcgacagagcaccttaacagttcatttccctctcgctctcaagtgaaaacatcttatttttgtgttaaaatgtataaagacaccatgagaattggcaggaggtcaaaccgtagattctgagatgctccggtcgctccccaggaagcgctgttttcggaagtgttgacccagcagctggtccctgctgctctaatgacacgatgtgtgctttcactttttcactcccaaaacgacgtggtttggagtcttgagagccttggaaatcgctgcccgtggagggaaaggtctggagaggccaggccaggagagcagacatgctgcaagaagcggaggcagccctgtgaactcgcctggctccgcagggaggggcgaggctgtccaggtcgcaggtggagctggccagctgcgagccaggatgtccttgctctttccaaattatacacagtttccacaaggaaaaaagagaggggtagggggtccaggcagatcttcagctgtttgtatactctgcaccaggaggcgctatcatcagcccggacccctactccacaggactgaggagaccacaattcttccctccaggcagaatcgtggacccaatattcccgtctccccgaattctcttaactcagtatactgccattaacagcatagtcagccttctggacttgaactccagaaggaattttgtctcatttagtgcctgcaggggagcaggatgagatagtacctcttgtaccggcacaaggtctctgagttgactcttacataaacattgcgctgtttctagggacggcatcatttcttgacctagagaaacaaagatattgtgggaaggacccctgatgctcagtggcagtttggagacctggcattagccttactcagtaaggcttcctgatctagcaggactgatccagtcagctttgatgatcccctagcctggtactgggattcttccaaacacccatgagatcacccacatctcacaggggctggtagtgttccagcagagaaaggtgagggtagcaagcagtagtcactttgggcctgaaatgaacatcttggggtttttatatctgcccacccactatgggacattattgtcccttcctctttgctacagtgtttccagaaaatgagaagtagcatcttcttagaaatagattgggtaccctgtcttagacctagttcctttttttttgtttttttgagacgctgtctcactctgtctcccaggctggagtacagtggtgcgatctgggctcactgcaacctccgccttgggggttcaagtaattctcctgcctcagcctcctgagtagctgggaatccaggtgtgtgccaccacactcggctaatttttgtatttttaatagagacagggtttcaccatattggccaggctacccttgaactcctgacctcaagtgattcgcctgccccagcctcccaaagagctgggcagttacttttattatagttctagataacatagaaaagaacatggaaagcagctatgcaagcaaaacacaaacacaaacaaccctgttaaaaagtgggcaaaagacatgaacagacacttctcaaaagaagacatgcaagcagccaacaaatgtgaaaagatgctcagcattgctgattatcagagaaatgcaaatcaaaaccacgatgagatctcacaccactcagaatgactattattaaaaagtcaaaaaaacaacagatgctggcaaggctgtggagaaaagggaacacatatacattgctggcattgctggtgggaatgtaaattaattcagccactggggaaagtagtttggagatttctcaaataaaacaaaactaccattcgacccagcagcaatcccattactggtacatatctaaatgaaaagaaatcgttttaccaaaaagacattcatttttatgtgcttcacagcattattcacaatagcaaagacattgactcagcctaggtgtccgtcaatggaagactggtacatatacaccatggaatactatgcagcaataaaaaagaaggaaatcatgtcctttgtagcaacatggatgcagctggaagccactattctaagcaaattaatgcaggagcagaaaaaccaaacagtgcatgttctcacttatatatgggagctacatattaggtacacatagacataaagatggcaacaatagacactgggggatactagagggaagcaagggttgaaaaataactattggctactatgctcactgcctgggtaacaggatcattttaccccagacctcagcatcacatgtatatcacacaatatacccatgt

SEQ ID NO: 1881947 - DNA, 4001 bp, Homo sapiens
tttctatatcaacaagcttctaggaagaaaattcagtgatagattgctttttatttttttctcagcccagtgtgaagaggctgtacccaaactgtgttctaaatcaatcttatgttagctcaccaacatccttttttcatcttgtactaactggaacttgtgataaaaatctagcaagtcagattagcaggccagggcggttggagtaagacaaatcatgttgtctttttgattgcttgctctcctgtgttcacattcagcttctcagaggcaaggggttcctatagtttgggtacaactgtaagagctgaaacagttggtaagtacatggagaataacagtgtagtggaagtgtttggaaggagggcacttggcaggatgaatgaggtatttagttttatcttcttatttatgatggaggatatatctgctcatctccttagtgctgcagcatctgtggggcatattctttattctggaattgaaccagacccctggccgctccacagttgacttgagccacatgagcttcagaggaactttattactgggttcaccaaacatatacaaaacacctcagtgtatacagccttaggttattccagtcttctgtggaaccactagcggtatgacccaaaatgtgggatccacaagggctaagaccttgactatcttatattttgatatcttcctattccatatgtgtggaggaaacacagtattcaataaatatttgttggatgaatgaacacaactttattgttcccaatttcagtcatttgcatactaccttcacgagttctacaacattcataaaatagctgtgctgttatttgcttaatagtttttttattcatttttttttactttagcttcatgttcggcaataatataggtgaaatcctgggttatatctaacacatattaaaaacaaataataaaaaggaaatatctcaccttgcaccactccaaaccattgtgcattccagcagtggtgtgcgtcccttgctttagaagattttaaagatgcagtcatactctgcgtgctatcataatgacattattagactagaaatccctgaagaactgtattttgctttgctccatttcctctctggctttagaatgactattagactggaagtttagctaatcccacatgcagaatgatgtacgaattaagtatcactgtatgaagagaaatcaccctatccaattacaattagaaccttagctactctctatattttttgaattgctaggtctgagaaatctataattatggttttcccctacgctgaccttgaccagcacagggagtttcagaatctatcttgaaaagcccattttcaaaattgactcagtcctatgtgacattttacattattcctctttgactaattatagtccacaataagaagtgataacttcattttaacacatgtaagtatttcaaataataaaaagtttactatgaaggtgtagttccattaagataaagaaagaaaaaataaagcacacacatgtacttaaatatatgattagatgccttgtaaaagttagcaaaagaataggcacaaaaggctaattgaatacatctcagggactactttttttctgctcaagactttccttacctattaattaaataagtaatgcctttgagttttctaaagaggaatgctgtctctttttttgcttattgaagtggagccacactacttcaataaccatgttacagaagagctatgtttctctgaagacttaataattgctgaatcgccaactgttgctgggtttcaatgacgtcttcctaattttgaaatattcaaccttaaacctcagtttgaagtagtatttgaatataccttcaaacagaaacctctgtatataattcctccgaaacatgaaatccctgtaactctttcaatgaagttgtgttggtgttccccaggggcagagctcatcaattctgctgacaccagagcttcggattccttaaagcagaacccctgtgacatcttcattcctttccagtctagaatcaaggaaaactgatgtataaccaccattctaaattctaaagattaagaaaaatctcaagtaaatatttaaaataaacactcaaaatatatcttatccctaagcaaaattgtgctttgctcatggtagcctaagaaatggctgcatgttcattctacttcaagtcattcagaagaaaataataaatatgacctttaaaatattttagtggcaatgttatccattattaagagccaattatcgttagcaatatttagggcactttggacagtgctaaatctcattatttgttcataaatcaaggtaacttgaattactctgaaattactgtgttacctcagaaaaataatttgataagaatattaatgcaaacaagatacaaaggcttcaaaggggctttaatcgaaagatttagaggagaaatctccaatcttagaatcaccattttaaaacattttctatgcttacttattcacttaagtaaatacatttctgtagcttaatccaaacaaatgcatgtttttgaaagcaataaaaaggcatttatttaaaaatgttctatgcttactatttcctgctgaccttctttttatatagcttaagtcactgactgtgctgtatttttgcccactgtcataaaaaaagtatgtaaactgcagtctggccaatgatgagggaatgagaaattatgcttagaattaatctgtcaggttaatttaatcactttatgactggttttaaattgggcagataatcagtgctaacatcccattccatctcaaattcactgaggtctctacagtctcatgggatcagaataagttatcagtggattttgggtagtgtgtgtacatcttcacaaatcagataacattcagaatttttattctactttttgtaaaaataatccgggaccacgaaagtgtcgtcacatctagtaagagttgaagatctgaaacaacacagtgaaattcctggtgtcattttaaagatctttttgaaaacttggtcagtggatgatttttttcccctagagagaagataccaagactatcttataagcatcctaattgtaatttcatcacatgattagtacagatttatttaagaagttagatgactttacatataattaaatggtcagttgctagcaactaagagaattatatcttaaaacaaatatagataataaaggtttatttttcaatttattttccaaacatataatttaggaatacttatttaacatcattttaatctgacattagataaacgagctaaaatttaaattatccgagaggaaaaggagatttaaaaatatctaatatttaaattctgagtgagcacggagaaggtaaaaggagctggctgaattcttaatggtgaaaagagtctttcatagcaagtattaatttccataaaaatcatagtaagtggtcactgaaaaaatcttgctttccaaatgcacaatttgtttgaaataaccagatgtaaagattaagtaacagcaagattgtaaataggctgttttgcagtttgatttgggattatttacaaaaagatgttggccagaatattttgcctatgaaattgttctaaatcacagagtaactgcaattgtaatagaaaaaatttcaacgtcctaaatgtcttctttcatgaaatcagatcaaaatgttttaagtaattaatataaaaacaattaaatataaacatttatttaagtaaaattaagtataaaattaatgaagaaaattctactaacttaaccagatgaaaaaatcattttggtgattaacaaatctaatgctgcaatggatacaaagcagaatataggaattcaaaacaaggtctactgctttgaaatgaaactgacccttcctgcattcagaatgaatttcaattatgtttagaagcctagcttgtcagttgcattttccttgctttccaaatgtgca

SEQ ID NO: 1881948 - DNA, 4001 bp, Homo sapiens
tggagtctcattctgtcacccaggctggagtgcagtggcacgatcttggctcactgcaacctctgcctcccaagttcaagtgattctcctgccccagcctcctaagtagctgggactacaggcacgtgccaccatgctcagctaatttttgtttttttagtagagaccgggtttcaccatgttggctaggctggtcttgaactcctgacctcaagtgatccacctgcctcagcctaccaaactgctgggattacaggcgtgagccaccatacctggccacaatttattctttagaggacctctctgtgcctcaattttctcaggtgtaacacaggactcatgatagtactaattcataggctagtgtgaagattacaaattacctgagtcaatagatacaaagtgtgaagcattgcctgaaacatagcaaacacagagaataagtggaccactactggatattgcaaatagaaaagtgataggaatttagttgattgaggcaggcagggtccagatcatatagggttttgtagggtctgacatgaaatttggattttttttccctagtgtaatatgaatttattgcagattatggggttaaatcagatcataaatgcaaggtatctagtataatacctaaagtactaaaggtgtggctttaattattaaatatatgtttaacataatatgtatgtgtgtgtgtgtatatctgtgtcaccacactggccagcaaataattactgcaggtcattggaaacctgctaggaacctctagacccgaaagaaaatcagttggtggactctgagccacaccgtacagcactgaacgactgattgctttttaacagcagtaagacatggagtagtcgtttatctgaagattcagaggttagattcaggaaacctgcctatttacgtaaggtttttgccaatcctagtacaagcaaaggtaaattccataatgtgaatgtctactctcttaatatgaacagctccacaggatcaaagaaaaagaagtgttttctctctctctactcaatcctctaacacaaagtgccttggggaacaatgctactgctttcggaaagtgaaatggcattcccatttaacataaatgggtcttattagaaggcaaaagaatggctatttacagttatgccaactattgattaaaaagaaactataagcccaggcaacctgagcctgctgcgcaccaagtctcaacacaagcgatccggtcaaaaagagctgcagggttcccggggcctgcactactttggacatgagaggagtggtctctgagcctgggactatggagagagaatatgcccacttgagcggtaaacacagctcctgtatgctcataaaatcaagtttgtgaaagtcagaaagaaaaggcaggtctgcattgcagaactttaaaaaaatgcacataaacattttaaaatgaaagttatatggattctccttaccatataaagtagaattttagaacttttcatctctctcagagattatataagagcgtagcctcaggaacaatgtgacaaacaaaacttagcagtttgtattaatatatgaagcaagattatgaattaccaacaactagcaaagtctgagtacaactgatttctgttaaaaagtaaactttcgttttcagggaatgtaagtattaacgatatttaaaagacaaacacagatatattacacaggtgagaagatgattgtaaagattacattaattgttatgacattcatcattgtattagtcccgatgctgggtaatttattaggctggtgcaaatgtaattgccattacttttaatggccaaaaccacaattacatttgcaccaacctaatataaaggaaggaagtttagttgactcacagttctgcatgtctagggaggctagaggaaacttacaatcatggtggaaggcaaagaggaagcaaggttcttcacatggcacacgagagaaaagcacaaggaggggaaacgccagactcttataaaactgtcagatctcgtgagaaatcactcactgtcacgagaacagcgtgggggaaactgcccccatgatccaatcacctctctccctctacgtgtgagaattgcaggtcctacctcaacacgtggggacggagatgagatttgagtaaggacaaagaaccaagccatgtcaatcgtattttgttaagtacgaaaacaagttacggatcggtatgtatatcataacctcgtgtttagaaaattcatttcttataaatctgcatgggagaaagtctggaaggatacacgttaaattattaactgttctcatcttgtagaaatgacatatctgacttttttcattttttctgttatatgtaactttagtacaataatatacacacatttatatgatgcagttaaaatcacaaacctttacatcagattgtagatagaaactaaactgtccaaattttttggaaatttgaattcccaaagcaaatgaacaggttcacaatagattgaaatccttaattgctgcagcatgaaaacatcccaataattcatttacgtgccatactgaatatggattccttcgtttgatattcctgtggcttgggcctagcgctgaaactagagatgactgtgctgtcggtaagacagctgctggctggctggacagcatgctcatctggccatcttgagggaaatgcggttactgacaacgctaggaaatgcacagtgtgagcccaggcaaaagatctggatcaaggccagcaagttcttcttccccagatatccgatgaatgctaaattaatacttgctgaatgactgactatttaatcaagatgtaattggagaaaccttaggcagtgcaacagatgtacctctcctccagtatgccttagagagctttgtgatttcacaggcacctgcccttgcatgacgcgatcacatgctttgcatccacatgtacactcaactctgaatggtttatgtcaaaatctggtatcaatggaacagtgtaatcatgtccacatcttttagaacctcacatcagggtattgcttacatgtgcaatctgtgttaatctaaaattcacatgcacattgttcaaacgagctcatttttccacaaaacaggcttctattgcagctcctagagaagccttatttcagtatttccagaaaaatgtattaaacgtctagcaatattaaggaactttacttacataaatttcttgccttttaatatagaaaatacaaaattaaaatactttaaaaacaaaacaagtaaaacagaaatgtataaagagagtaaaatgtgccctaattcacccagggctgccactacccgacatagtgactttgtgtgaatttagaatatgtaaccttttctcaagataaaacccaaaaacttaaattagtactttctcacacaatctaaaccatataacatgtttaggtaatgcctgagtgtggtttgcataagaaatgtccataccaatctctccggatcagtgaagacgtgtcagtgtgtgctcccaagtgtgcacatgaacacatgcgccaggctgggctctcctccactactccagcactcaaccgaaaatcccggagccaccgagactgcccgcacattttaacacatacaagttaaaatacgtgtacgatgtgactgatggcagagaaagcaggagtatatgcgtggctgaagtcatttttaatttggaaattaatgacagaaaccatcagagactctgttttgtatatataaaactccattggatctacattaaggaaaaatagattttttaacacaatctctttgaaagtctaaatgccacaatgcagtttcaagtggcagatgtttacacagcttgtactttcccctacctatacttgaaacacacttgcaaactcaagggaaactgttccattctatattcaaatgtcaatagggggatttcgaaatacatgtctgtatcaaatttggtgtgaaaatgtgtt

SEQ ID NO: 1881949 - DNA, 4001 bp, Homo sapiens
attctgtgacgtggattggcctgatgaggatcatatagtcccactcctgaagggaagaggtaaggtggtgagtcacatgaacaaacagtgtaggaggcaatttcccaagggaaaatcaaggttctggcaaaaggacagatgtcctccaccctggaatactatacagatttaaacatatttatttatacttatttggaaataccttcaatatagttgctgggtaaaatttttaaatgcaggatattttatacagaacatttatgtgattcagtcatatatttttgtatgtacaggaatatatctgaaaaggcatgtaaacacaatagaaggcttacacatcaaactcctagcaatagccagtactcaccttgaggaggggactacaattggggatgaggtactatagaaagtgactttgagtttacttatattgtttggggctgactgtctttctccttactggaattcccgagacaatacagtcctggaataagagagtggcagtggggataaacagcagatgatagttttgagaggatgcaggctttgttgacctatggaatgttaggacaggcaggatgtgtgggagagggattggttaaggtgactcccagctgtctggataggcattatgtggatggtggtgccactcactaagagagggggaacaggaaaaagataagtttatggatgaaggttatgagattgtctgaagacatgttagttttgagggtattgtggggcatccaggtaaagatatccaacagaaaatctggggtctctactgatgtcacacttttctctgcccagaaaaagctttcaatgtttcattaaacattttaaaaagagggtgggcgcagtggctcatgcctataatccccgcactttgggaggcagaggcacgcgggtcacttgaggtcaggagttcaagaccagcctggccaacatggtgaaaccctgtctctactaaaaatgcaaaaattagtcaggcatggttgtacatgcctgtagtcccaactactcggaaggctgaggcaggagaatcgcttgaacctgggaggcagaggttgaagtcagctgagattgcaccactgcactccagagcaaagactctgtctcaaaaaccaacaaatagctacaacaaaaaaccccccaaacatttaaaaaagaaactaatccacagaaaacagaatatgtagtgcttagttacttaccgaaggaggggcagcccagcagggctagttgtttcctggggtcttggacttcaactcaccagactttctctgataaatactattctcttgtttcattcgccaggatgacattaatggtgtaatttgctataaagaaagaggctgaaaaatttactcctggggagttaaaaacagaaggtgcacagagaggtgtgtgagatataaactgccttgcatataaagggctcacttggcagaggattgctgggggagagatacaatcctcacagcctgaacctcaactctcaaaactcctcacttcagccctgacctccagagcacccatttcttccaaccgcttgtagaactttctctttcatctgcttcaatgctcagagttttcagcggcattgacaaacagtaagaatcaggactaatggccataaacctggatggcaatgacattctgattcccctgggaaccaaggtctgcacctgccacttcagtgcaagaagcaaagaagtacaaaagagcctttcaccccggattctttttccccattctgaaaaagggatgcctgggatgcggggaactttcctcttccacaacaaaagctgtaaacttaaacccaccttgtgcctagccaccagcctttctggaaaatcttcccctgcttgtctctttatgtttcacagctattggaactgggttgttcaaagaagtacctgaccttgtttgtcagatgagaaacagaaaatgctgacactgaattctttcatttgctcctgctgctaacagagcagtactgcagaatctcagacacttcagcagctttggccaggctgggggtatagaataatgaatgcataaagctccttgacaggaaccttctctcccctcccaacactgcattctgtgctgaaaaggagggagggaggccattagcaaggagtaagcgcaaaatgaagtggtttggagccgtgctgaggataaaggccaatttcagccaatgctgtttgacctgctggtactgtttttgcttttttttttttttttttttttgctttgttttttttgtctgagtcctgctgttacttttgtcactggaagaaaatgagtctcataaaaacataggttttgtcttattcatctccaggatttagcacagaacctagactaatgaaggtagattttaaagagattatggggagagcatcttttgcatttgaaaggtaaatagttttattttcaatttgcagaaagggaacacaggtttggagatatgaagagactggttcaaaatacaaagctagtaaatagaggtatctttgcagataagcaacagaaaacaactctggcatatttagcctaaaaggtcattaattggagagatactgggatacagagagaatgggaatctagaaacccaaatcagaaaagggacaggtgttaggatagatacaagcatagagtattggatagacacagatacaaccatcccatctagcagtcaattcacgccaaagttttttcccattcttgctatcattctgctcaagatggtagaagtgctgggagaaagtatgagatggactgagctcagttccactttggagaagggtgggcaagacatggtttccaagacttagagtttcatcgagtctacatacagtggaacaaaaatattgttcccccaaaggaaaatgagttactatcagaaagagggaatgggcacagagtgccccccaaattcaaatgttcaccccagaaagctagagttcaactcatgtacatttgatgccaaagtttgcatcctttcactatgccagcatggttgtatacagtggttcttaaccagtggtaattttctccctttacccccagggacatttgacaatgtctggaggtatatttggttgttacaactgggaggaggtgctaccggcatctagcggatagaggccagagacgttaccaaaaatcctacaatgcacaggacatccccacaaaaaaaaattttccagcccaaaatgtcaacagtgccaaggttgagaaactctggtataaacaaagacaggggattgaggtaatacactataggttttagaaagtccagtaattcaatttggtggaagtatcaattacatatggaaaaacaaaagaggaaaaaactaaaaaaaaagctttaaatcagattttgtggggccttgaatgccagcctaggttgtctagactgcacttaataggactggatacctcttagcctaaaattatatcttcattgactgggcctggcgggtctccatgtttattctgaagtttatttctagaagacctttggagcacgtgatcaaatgacatgagacagctaatgacaaggcccttactgtccccagcctgtgcaaacagtcaggatcgttcccaaaagttttgcttctctatgcttcttatatctctcaagtatatgatattagaaaagtgattgcttcttagagcgcatgctcctgctaaagagattaacactattttcacatcctttcaaatcatacagccaccaaataatctttattctttcctggataccctgttttaaaaattaacatatttcactgattcacatttttttcacatctctgaaatcaggacgtacttatgaccaataatgtacccaagttttattggtagcacttacaaatgttttatataaaataatggcacttttgatcaatggaactttaaattcaatgaaatatatttgttttctttcattgtcattggttaaattttattcacactcatttaaaaga

SEQ ID NO: 1881950 - DNA, 4001 bp, Homo sapiens
gcctgtcccctagaattatctctcttcacgtagttagaaggagcctgtacgtacttgactgcacccatgaaaacccacagcttcacctttcctttccaagatttgtgacatttcttagataaatttgaggactgatgaaatgtaagtagaggtcctggattccgcctttctttaactgttccctacctttttaatttttttttcttaatttgaagaccatgtatgtctaatgagactttcttaagatgttatgaaccaaaaatttttgaccaattctttttcttcttattattcttcatcatcattatcatcatcatcatcatagactcttattctaattttaaagctgtttatataaatgtctcaataagtcacatttttctactatcactactttctcagggttcagcaattaaaacatggttacagcacatacagtattccttctaattaacttctgtttcccttcacactcagtttaaaatgaaatatttttttaactggaatatattttgataggcttaaattaaaactttttttaatgcccagagtccagccctaaaagatctgagaccttactcagatctcagaggttaaaataacgaacaacttactgaacagctactagagaactcattagtttcacttttcaggctgggtgccaaaggtgggctgcttccatctgtgggacacacacacaccttattgtagactgcaaaatgcacatattttagccagtcactttcagcatgttccaggaaagtagatagctccattaggtaatgtcagagaagataaatatgtttcaattacttgccaaaaatgcttagtgagcatcagagagatgcattctgctttccaaattactaagcagactattcagaagtactgaaacattcatttttcattgcagattcttgaccagaagccaaggacagctgtcttcctctaacaccctatggtgatgcccacaggaactctctcctttcagggttcaacccactaaaaggtgtgaaaggatgtgcatttagcagccctgacatctacgatttgactgaaggattttaagcacagaaacccatggatcccggaagggccatgatctacctttagatgctttgtctcagtaatagcaatgtgtctgggtttctctgcataaatatactgaaataaacaatcacagtctgtatgttatttgtatgtataaatatataaatgtatgaataggtattatgcatctttctggaaagtaggacctgaatctaagtcatgatataattaaaacgtggcatttcgctcgatgtatacaagtggtacagtgaaaacatcaaccatttctgaaaaactgtttttgaaaatcaacttctaggactatctgcatcagaattatctgactttcaaaaactgcagatttctgtgtttccctgaaggtagtgtcttggaacttgctttttaacaaacactctaggaaatggcctctttcttaaacatcttttatccaaggaggactccctgaaagtccccctgagagggactaagttcttttttcccccttggtagaaggaaagaattaagcatttacactgctgaattggtttaggcaaaactacccattaaaataaggagcagttagtagcattattatgatgtctgtcgagtaagtcatcttttctcattctggcttttcctccatttttctccattatgctccagctgtgggccctcagttattctcactgatctttatctagctcactaaatggcagagactagccaccatggccactccatttagggcatgactaagttatcaaatgactattgcttattagtaactcatactgggtgactagaatcctagctagatttttccttctgaccactaggctgcttgggttgctataacaaaataccacagactggatgacttaaacaacagaaatttatttacttacagctctggagactggaagttcaagattaaggtgccagtcgatttgatttatggcgagagctcttttcctggcttgcagagagctgccttctcattgcgtgctcctgtaacctctccttacttagtctgtgtgcttgcagagagacctgatgtgtcttcctcttcttataagggctccaaccttattgggttagggccccacctttatgacctcatttaacctttattgcctcctaaaagacctatgcaaatcctcacattgggagttagggtttcaacatgtgaatctgcgggggacggaaatcattccatagcagtcccttaactggggaatgaataaataaattctggtgcatccctacaatgacataataatcagcagtaaaaaaaggaagaaactgttaaaacacaaaagaacatggatagatttcaaatatgttatgctacgtgaaaaaaaccagattaaaagggctacatattgtatgagactatttatatgacattgcctgaaaaaggtaaccctaggggaacagaaaacagatcagttgttgctagggattggggaagggtttaaccagaagggatatggataatatctgatattaccctgatataagtaaaaatgttttgatgtgatgaaaactgctccatatcttgactatggtggtggttacatgactacacatgtttgtcaacacttgcaagactgtacactaaaagggtaaaatttactacacctaaattatatttcatatttaaaataggaaagaacccacctgttccgtgtcctatattctactggctagtcatcacattatgtctggtaatgatataaccgttcttccctaccaaggttttttcttttcttctttctaaattaaacagagccttccaggaaaagttaatgtcttaataaagcagtgaatctcaatgaaagtttggggaaagattttttccattgggttgggatgtcctttgtataatcccacaaaccaatgtcacttactaagtctccaagcccatgaactaataatattgctaaaaagggtaaaatagaaatctttagaaacagagccctgagctttcttcctttgagccagctttttaaaagaatggacaaagacatcaaagggatccacagagcatgaacccaaccttctctgtcctatagcaacacttgctcagggcaggagagctaggtttcctttcctctgctgatgtcctcctccaggtctcctctactctcttcattttcctgccatctccctggtgtccacacagcagccaaatatcatttctaccatgttttgtcattgactaaaagaaaaatgagcaaagccctttgttataacaacatcagaaattttttaaaatcccaccaagcaaatgaaagccacaatccgtattagaacctgtctcagaggaaacaagtagcacagcattgataggctgtcagttagaggatgtgggaaatgggcaggcaaattttctaacacattattccctagggagtttctccatttatttgataagctgtaaactttgcttaaaatagttttgtggaatcttcaaaacaagaagttttgcagaggtcaacttgtccaggatgacaacaaacacaactttgcttcaaaataaaatcatccacccttttttcacctattagatttctctcaccacagtatgcaaatagtcagctttgcacactgtggaatgatgggtgggagtctgttacccaaacagtttccaagctggggaattcatttgaaaattagatggggctggaagaggggatgtgcatatgggcacagttgttggaggaactgtggacctctgttctgccccaagaacccaagcctcaagactttactgtgagtctgaggactgtgtgtgttggggctggcctgcacaggaagaaagctaagctattattaagaatagctctgcaagatagttaggattcagacttgtctgtccacgcttgctgctcaatctctgcagctgcagaaagcagccctgcattgtctttgtcagatctgggcgccca

SEQ ID NO: 1881951 - DNA, 4001 bp, Homo sapiens
aggctgggaagggtagtggaggggatgtgaggatagctaatgggtacaaaaaacagaaaggatgaataaaacctagtatttgctagcacaacagggtgagtatagtcaacaataatttaattgtacattttaaagcaactaaaagggtataattggattgtttgtaacacaagaataaatgtttgacatgatggatacccctgttttatgtgatgtgattattatgcattgcatacctatatcaaagcatctcatgtaccccataaatatatacacccattatgtacccaaaaataaaaataaatacaaataaaattaaaaattaaaaacaaaaacatcacaaaacttccaaataaagactccaaacatttctaatattaaggattaaaataaatgtgagctatacatacattaaagaaagatgaataaaaacaagtatgataattatttttttagaaactacaatgagatataatcttaaatcttaccctggtttaaatggcttttatccaaaagacaggcaataatggatgctggtgaggatgtgaagaaacgggatcccttgtatattgttggtggaaatgtaaattagtgcaaccactatggagaaagaacagtttgggggttcctcaggaaactaaaaatagagctaccttacgatccagcaatcccactcctaggtatatacccagaagaaaagaaatcagaatatcaaagagatatttgcactcccatgtttattgcagcactattcaaaatagccaagatttggaagcaacttaagtgtccatcaacagacaaatggataaagacaatgtggtccatatacacaatgaagtactacaaagccataaaaagaatgagatcctgtcatttaaaccaacatggatgggacttgattgaggttatcatgtcaagtgaaataagccaaacccagaaaaacagacttcacatgttctcacttatttgtgggagctaaaaactaaaataattgaactcatgaagacagagtagaaggatggttaccagagggtgtgaagagtagtgaaaagtggtggggtgtgggcactgaaacggttaatgggtatgaaaagttagaaagaatggctaagacctagtatttgctagtacaacagggtgactatagtcaaaaataatttaagtgtacattttaaaataactaaaagtgtataattggattgtttgtaacacaaaggataaatgcttgaggtgatggataccccatctgccctgatgtgatttttatgcattgcatgcctgcatcaaaatatcttatgtaatctgtaaatatatacatgtactatgtacccagaaaaattttttacatcagaaaacaatgccaaagaaaggaatactggcaactaatgatctcaagccacaatgctaaaccctctcctaactctgtcctcagtcagcagttgagtttcggcctgacttcactgagaaaatccaagtcattgcaggagcaaacccttaactgactcacccagccacatataaatacatctcatttgcagctcaccctccttatcttcttttatgctttctcagtaaaagagctgtcattccttcagaaaaagagtaatttctccactttagttttgatcctggccccctaccccacctgaggtagctttattgatcattctctcttttcctcatgacttgcctgttccactaactcattcttccacagtaaatatttagtaaacaatcaatttttgttccacaccacattttctccaccttttttttctgggaaaatctctgcatttcttagaaaatgccacctgtaatgaccaagtggctgtgtcctctgccatggtcttatataatcctgtatgctagtcacagttaattttccagggaaacattccagggaataaagtgaaggtgagacccccaaggtcctgagtattcattcacaggtgacatatcttcagaaaaatatcaaagctcttcccctgagagaatcagatgagctggttttttgttctaaacagaggagagaagaaaaccaaaaacagagaagagaatcaagaggagaaacaagatgaagaccagctagcacgaggtgaaaagtgtgggccaaactccaaggttgtggaggaggggaggagaagaagaggataaagcaaggagagagatgggtgaagactattttaagcacagaagcttattcctttatttgaaagtgtttgtttactgtcatatcactcctctgtcttcccataaatcttcatgaaacatttttctgaggggattttgttgtcgatgattttaaaagagggcagaggctcactcacatctgcattgctgtggcacagcacagagatctctcacacaaaagagagaatcaaaggaaagaggtcatgagatggtaaagtgtggcccacctgcattccacccccagaaatttatagaaattatgggaagagctttgaactcatggaaggcatggaatcaagtcaatcttactattttctctaaaaagacagaaagaaggctctgatgatgctgtcatatgtcccagtacataaatggtaactcacagatagttctaaagcagtgattctcaaaataaaatttgtcagacatgaatgggacttgaggctcctcttcttataagtctttgattcttatgggggctaatgtataattatataaacttatatcactgagtaaatactaaggattcctaaattgcgtggtcataacataaaattcgccagttgccagagtttactgaagactctattacaaagcatctggctgccactgaatgctataaaattctcattgtgcctgttgcccagaaacattagaatttccataattctcagactggactatattatctgtaccatcaatgttagcatgagtgggtcacagtttcaattgctgctattcctgaactaataaatataaattcataagttttacttttgtgggtcattttgtttttgtgtaattgctgcaacgttaccattttgattttaattttggccctctccaagtctttgttatcatcaagttcttctttccagtgggagatgggaacagcttgagtaagtagactgtggcaccttttgtcctacattggcagaagttcaagcaatttaaaagctaccaaactgagtagctttcagtaacagctttgtaagcagtttttcattctgtgcttcaaatagactgatgctggagaataggaaagttgtgttcagtttcactttggaaaagttggtaaccacagtctgatgcagcctttcatttgtttctctaggttcagtagtaatgtctcctcttttatgcctgattttagtaagtttagtcttctgtattctttttcttgaccagctaaagatttgcctatttttgttaatcttttcaaatacacaacttttggttttattattacctttctcctgcttgttttagatttagctgctcttgagtgttttaaggtgcttctaatggtaaggctgttgatatgagctcttatttcttttttaatataggcatttataaatttgcctttatgcattagtttcgtggcatcccatatgttttgatatgttatgccttcatttttattcatcttagaatatttttattttcttttgatttcttctttaatccattggtatttggaactgtcatttaatttccacatttttgtaagttttccagtttttttctgttattgatttctaattgtattttattgtgattggagaacatattttgtattatttcaatccttttatatttatgttttatggcataacacgtagtttgtactagagaatggttcataggcacttgagaagaatagatattctgctggaggagccaagatggccgaatagcaacagctctggtctacagctcccagcgtgagtgacgcagaagacaggtgatttctgaatttccatctgaggtaccgggttcatctcactagggagtgccagacagtgggt

SEQ ID NO: 1881952 - DNA, 4001 bp, Homo sapiens
tcctctcggtgttatttaactaaagaaaccgtaaacaaaaacgaagaagaagaaaacagctggtggtataatcctgctctattcttcatgagaaagagaaaggggaagagagttctgattttcatatctgagaggtttctcttggctgaaacttctagggaagcttctacatatgcatagttgtaactccaactttattgtgaaatgttagagctgggattcagctgtagcccctccctctcgaaggtggccttttgtgacctccagagctctacttcaaacaactcaatttcagggatttcatagctctttataaaccaagcagtgagtagtagcacattctattcctcctgattcaagagaagagaaatcaaggcactgaataaacacaggccgtttggtgtggtcagggcctaaaagtacagaagcagagtctgacatttgagttatatccattggcaaacaatactcactatttcttgacaaatttcaggttttgctcttgagagaggaactgtagttggcgactttgtttgttcaaagacatggaatcaggcactcaaaagtgccctcgataatgctggagtttgcaagagaggacacaaaatggaaaagtcaagaatgttaatggctaaggcagatgaacaggttattcactttctttttgaactctgtgcctacccaccttctggggattatattctccatcctgagaaagcaaattggccatgctttatagcccaaatactggctggcagtctcatttgaggaatttgtttgtcttgctgtcaagcttgcgttctgagctaaataggccagaaagggtgaagaatactgtagaaacacaggctaaacccagggtgaaattattacaatgtaaaatatcccttttaagaaaggggcaaattctaaaaattctgttctggatttctggaattacagatcaatgataaagggtgactgattcatgatgtgacaagttagcacccagcttctcccaataaatgccatccagaccttctttttgtggcggggggtggggggggggaaggctttttcccccttcatacataatacttacaataaaattatttagacattcaaataccagaacttttgtggcttaataccaactgctttttttagttaataaaaactatcatttacagaatatttactatgtgccaggaattacactgaattaggactttacataaatgatcgaattgaatcttcataatcctatgaaaaagtaatatctgtcaggcctctgagcccaagccaagccatcgcatcccttgtgacttgcacgtatacatccagatggcctaaagtaactgaagatccacaaaagaagtaaaaacagccttaactgatgacatcccaccattgtgatttgttcctgccctaccctaactgatcaatgtactttgtaatctcccccacccttaagaaggtactttgtaatctcccccacccttaagaaggttctttgtaattctccccacccttgagaatgtactttgtgagatccacccctgtccacaaaacattgctcttaacttcaccgcccatcccaaaacctgtaagaactaatgataatccatctcccttcgctgactctcttttcggactcagcccacctgcacccaggtgaaataaacagctttattgctcacacaaagcctgtttggtggtctcctcacatggacgcgcatgaaactatccctgttttacagatgagaaaaccgaagcacgaagaggattagtaatgtggctaaaatggtgcagccaaagtgtggcagagctaggacccaaacctagggatctgagccaaaggctcaggttttgacctcttagcgccttaaggctcactgattgaagtgtgaactctgcagtgagtttctgttattccatacctcactctgtctctgggctccaactctacttcttttattcagaattttaggttctttatttaggagcctgtagagttcaggcaacttgaatctgagcatgtcttccttgcagtgagaattccccagttcccacataccaggagcacaaacctgactttgtacttcctgtgccttctacatgtctttgtttccgttcaggccagcaccaattaactggattaattaagcataatacaaactagacgagctgaagctcaaagtaaattaatgaagagcctattctatcaatctaggcaaatattggaaaagtacttatgggccttgttctctcaaatgaggactgaggtctgggtgctaaacaaagctcaggtcccataaaatccctaggtgtaacttttcccattagtattctcactgatttagaatggttgttattccagcctcacccccacctcttctctccagcccttagcaatttattttcctttttaaagattttctttttaacaatctccacactggcttttaccaccaaatgaaaggaaacttttttcttggaactttgttgctttttcaaaatatagccctgaaagtctgatactcgaatcttatgtttctagtatattaactagatccttcctatgccataattgtggccaggtgcctggattgggaagaggactgagaaaggcacttacctataaggttaagattacaggcccatcaacagggtagtggctaaacaaactgtagttttatatgataaatataatagcatagttaaaaatgagacataaagtaagttctaacatggtgcagcaaaaatacacagtgtatttttttacttcatttatgtaaggggcaatcaccaagcaataccatatatatatcttttccctgtgggtacacacacatgggtgtacgtgaatataacaacatttgaaagatgcattcaaatccataccgatacccccaggaggaagagaacatgaagctactaagaatgtgcaagaataagcaaaacagaatttaagccttatacatgttgttttaatgtgaaaaggaaaatgtattcatgtatttcttatatcattaaaaaaataattttaaaaaaggtaaaataacttcagctttagagaaggtcactgcagcccccaaataggatacttctacttatttcttggtacatcataaaatcccttacagcctttatataattaaaatcagaatccaaatgtaagtgtctctagactacgtgacaaggagagctcacctcctggtagaatgtaaatgagtgacagtgtttccttgagatgaagttttgtttgggagatgttagggctgcaggctcagagctgaggaagcctcagttttgctggggatgtgatactcttagctagttttgtaagttcacctggggattgccctagttaagggctcaatctctgaggggaattttttttagttttagaattttttttttttttttaaacagagtcttgctctgttgcccaggctggagtgcaatggtgtgatctcggctcaccgcaacctccgcctccccggttcaagtgattctcctgcctcagtttcccgagtagctgggattacaggtgccttcaccacgcctggctaatttttgtgtttttattagagacagggtttcaccatgctggccaggctggtctcgaactcccgacctcaggtgatctgcccgcctcggcctccctaagtgctgggattacaggcgtgagccaccgcgcccggcccagttttaaattttttttttggctggcatctacatccagcaccctgtccacacagcttacctctgtggtaagtttttagagtacagacagttcagacacttcttgggaagccaaagcaaaacaaaacatcaagccaagaaacaaccccactgcagcggtgagaatatgtctcattattgactttaacaatttgtgaattcttaggaccaagaacataagtcattgcagttgaaaatcgaaacctgctgtggcttgcatttagcacccaggctgccaaaggaccaggcctgtggggattccctgtgaaaatgat

SEQ ID NO: 1881953 - DNA, 4001 bp, Homo sapiens
atacagtgacagcttactaaggcagtgacaactgggacggaaaggagagaatacatgagatgtttagaaggtagaattaacacaaattgttgaaattgagcaatggtgaaaataaaccctcacccgtaattcaggactcgctcatattaactatgaatacattcatgaagaaaattgaataatgtatttgaaataactgtgccatcaggacatatggctactgtaaaccaaaaattacctctgacttaaatggccactaattatgtggcacaacttctttttcaagaactgagaagggatgaaaacacacacgcacacacacacacacacacacaagcaaattacaatgaaaagaggtacatgttggggtggaaggaacagtaaaatcctttgaaccattcaaatacctacatgattttataaaccaccttcccgtatactatttggtgaattatcattaaaaatctcaagcaaatcaggcaggaacatcatgaaaaagtcaaatgattgcaggtaaagaaaattgttttaaataaatgtagcttcactaaacaaaatctgcttaataattttggctgaaagctgcagataatatgtagcaataggagcagggaacttaacatctctgccaagcaaaaagaaacaattcagcaagcaacagtgaactgatatgcactaaataaacaaccaggcagaaacaccgctgtgagaaagagctttttatatagctaagccaagctggatggcttagagttggagaaagaagtgctaaatatgtaacagcctggggcctcgctggacccaaataatagttatttctgagtaggtcaagcaaaagtcaataaaaaggaaagcaggaatggctgttgggttcataataggacaataatgcccttctgggaaaaatgtgagtttcaaatagccagaatcgaatacttaagtttcaaatgctttatcatagaccaccagttctggaaatatcagtagaatagctagaaaataggtaaattctgccaaccagaataatccctaatacagattccctaagccagtgtttttaacatgagtagaagaatcacctgcaatggaattacaaggaagcttatttagtggaaattcctggataccagctcagacttaccacatcagaatttctaaggaagaggcctggtaatttaatttttaattaaattttcaaaagattcttctgtcttctaacaccagagaacttttatttttgcgtattttgcattttgctttgctttcaaatgccatcgttcacagattagattcgtcagagagagaaagggagatagaaagggagggagggagatccgatagatatatagccaatttctggcccaatttttcttttgcagcaagcaaaggctaaagtaacactctgtaacactttataacactttataacactctataaagcactaattagaaaacaggttattctgagataaaagaacgtacagcgaacaattactttataatcaagtgtcagattgtatggagcagaacatgcccactgtattagtctgttctcacactgctacaaagatactacctgagactgggcaatttataaagaaaagaggtgtatttgtccgttttcacgctgctgataaagacataacccagactaggcactttacaaaggaaagaagtttaatggagaactcacagttccacgtggcttaggaagcttcacaatcatggcagaaggcaaagaggagcaagtcacatcttacgtggacagcggccagaaagaaaaaaagagcttgtgcaggcaaactcctgtttataaagccatcagattttgtgagcttaggaacagcataggaaagaccctcccaccgcgtccctcccacaacacgtgggaattcaagatgagatttcggtggggacacagccaaaccacatcaagaggtttaattgactcacagttccgcatggctgggaggcttcaggaaacttccaatcatggcagaaggctaaggggaagcaagtcacatcttaaatagtggcaggagagagacagagtgaagaaggaagagccacttttaaaaccatcagttctcctgagaactcactatcaagagaacagcataggggaaccacccccaggatccaatcacctcccatcaggttccttccttgatacatggggattacagttcaagatgaaagcctaaccatatcacccacaaaggtgaatcagaagctggacttctctgtgatttcttccattcttcagtattcctgaatcccttccagtaaagtttctatacaacaatctatcagtaaggcattatcatttaacaaaccttttaaaaattatacaggaaaacatttgttgaagaatttgggatagtatcatctataaaaatttacttaagatgattttttttcctttgctggtaggagagaaagcaagataataaatgcacttagtagaatatcatagtaaacaaattgtttaaagatatatactttactctcccgtaagactatgcatctcttgtacagacatcctggtgagaaagtggaaccctaaatggaacactgagcttcaggcatttttattggacctccgaggaaaggtacaggcaagtggggtcaggtgtctgggatgattgcagttgtcagttaaactcttgatatagtttggctgtgtccccaccgaaatctcatcttgaattcccacatgttgtgggagggacccggtgggaggtaactgaatcatggcggcaggtctttcttgtgctgttctcatgatagtaagtctcacaagatctgatggttttaaaaacagaatttataaacttgtgaatatatgggtatgatgcaaaccctaaaatcataaattcatctaataattgtgatatctatctctataaggcatgtattgagggtgaaattgaacctgaagatttgttaaatgaaactatgaaataagtttgtaaagacatatgcatacttcaccaacctgctcaaatttagatcggcaaaccctttcctcttgatgggaatgaatgaatgaaatctgaattatggtctgctatttcttctaccaaaagccataagcttgagccaataggtgtgtaataattttcaatgctattattaacagtgtttatttagttaatgctcctgatgaaataacaatttttgatctagattctttagagagtgttatttagaaattaagtttcaaaattcaaaaattattttaaaaaagagtaaactagcagactcatctcttaaatattagagtcacttctacatcccaaactctaaccacccagccaaatttattactaatgggtaggtacagagggtgtttaagaaaaagatatagattacagctttgctttattctatttgaaaattactcagctttgtgcccagctgaactcactaaatttcagctgtacccaacatagaatgtgaggtggattcagttctgtcccacagctgaccagcaactacagaaagattgaagccactgacctcagggtatgactataacctcggggacaataagtaagcaggtagtccccaggttggggccagacttaaatgctcccatcagaacttccttgaagagcataaatgtcctattagtatattttatttctttgagatttgttatagtgaaactttagtagcaaaaacattcaaaaatatttatgacttagaaaatactttgactcacattttcctcaccaatttggttgtaatttggataaaatatgaaacagtccctttttacttctaaagaaaaaagaatggagaattttccacaaagagttaccagtgataaccacctttgtgaattaactataaaaaagaaataccaacattatgagtcctgggcagactattcatccttcttttccatcactttatctctctaagaaaaaaaacacagttacaggttaactaggaaaatctataatttaaaaaaaccttttttttttttttttgta

SEQ ID NO: 1881954 - DNA, 4001 bp, Homo sapiens
tgtgccccttgtcttatgcttagcaaagcatcactgggcaagaaaaatatagggatgcactgaagcataacacaaatttgctgcagtgccatggacttttagaaagaaatgatagattatcaacccacgggtagtagagttaaacaatttattcattcagtcgttagttattgagtgtatagtatttacataacatcctaagatccataaagtaaactctagatttcctgccctcaaggagaatatttctaggagtgatttagtctgatcaaagatattgtgctttctgtgaaacaaatgaactgaagtggttacaacgacagagcctgtgagcagctgtcacataattgagccagagaagagggtattcatgtactcagctcagaaaagacttgggtcacacgtaactatgtgtaggaacacgactcacagctggattttaagggcaattatgcaactatgacaatactaagcaagatctgatttccctttagacttgagtcctgcaaaatagaaatgtgttatctatcttctttcacagcaacacttaatgatatgtctgtgcagcaacagaacaatcctttaagcaagaaagtgagtgacagtcattgacaaaatttgctgggaattaattttcttcagttccctagtgagcacatgcattttatacttccagttgattgttgcagatgaaaggaatgcagaataaaatggggctatattcaatacatgttaaatgtaatactttatactttcaggagaataaatgtttgtatttcttccaaggagggttatatagaggctaaagttgctggtgatgaaacattaaacgtttgagtactaacccaccttgagattacttaatactgtatattctgaggccattgcttcaggtgtctgatgtatggttatttccaatgttcctcttctggaagatggtgctcatgggaagaataaacaggactaggaaataagatttttttaaaagcagtttctttaaagttattcacagtttatcctctgaaaggattgctttataagaatcaacaggatcatacatgctaaattgtatttaaatgcaagtttgctattaacacacatccccaagatagcatagaatgaataaaggtatacctctgggatcagacagccagattgatttgagtcctggctctgacatttattagctgtatgaccttggccgtgttacttaacctctctgtgccttaaaaggtatctagctcttaaagttgttgtgaggactaaataagttaataataactcgagttgcatatctaatacatgtttaacatgtattgaaaattatcctgtgtgttcctggtgtagagcatgtgctcaaaaggtgcttgtggttgtattgtcattatctccaaccttagccatttgctattgtatcataccaagggccaccaaacttcatgtctgtcagtgactgcttgattgtgtaaccccagaaacatttttagtgatcatagagtgattatcattccttagcctaggctaattcccaagatccacttcttttccaaatgctatatgttggataaatttctctttatttactttgtatatgatttactgcctctttctaaaagggattcggtgtcgatttgaagtctgagtcctccaattgcactggcgtttcctggggggtcatttcaaagttgtatacagagacgttattgttctctgctaccacatgactgaacaaatgtgacacaatcattttcttgttggaggcaaatttgctgactgtggaatttctattgaaaaatttaatataggatctaaaggatcctccttggcttcacatagattgtaattgaactgatgtcagaatgttctgatgatacaagaactaactcccatcccaccaggactgtaaatatttccttagcacctgctatgtgcaaggtagaaaatattagcttatcactgtcacttaccttcacaatatctatttccaaatcaataagcatggcatgtcaaattttccaagtttcaggcaccagaatagatccaatgggaactttctgagtactgtgttgaaaaacaaaacaaaacaaaattgagaagaggacgaatttctctcagtctcaccagccagaaaatatccaaatatatcagagtaccaagaatagggcagcctgagaaaggagaaggaaacgtggtgtccaggccacaccactgtgagaggctgtgtgaagacagggaacatggctacccttcattcttttctctctgccttgtggtttctgtcagttttctacctgccaggaggagcctgggtctaagcccctgccttccattctgcctcctgtccccacccctgatcttggtgaacccagtgcttttagactcatcttttccagtcaattcaaatctccttaggctctgtccctctgctgtttcattctctgacagtcaccagagaaatgagcaatggtactcactctggccatcttggggtcactttaattccagggtaggcgtgtgtccatgcatttgtatgagctggaagaggtaaggatcaatatgtatttaggaaacaatgtgagtaactctcatgcagcttctaataaatctaggcaccttagctattactttttttattgaataagccagggcattcaatgttgactggatttttaagaatacattaatttatgtatatattttgtatgtctatatttttacatataatataaatataaaatttttatcactatatattaatattcatttttatatgtataatgattaaacacagttttttgttccactgatgggctaatttgcttgttttcagtaagaaatgtttaaagaaatgtacagatgaagtaaagtatataaacatgcataagttaaaacacatcaccatgagaatattgcaaaaggaagaaaagggagaaccatatcattatttgatttatttaaaaaaactttataatttgtagcattgtgtgttagttatcttgtgaaagacaaataaaatatttgcccaagagtgtgcagggacgtgccagtgtgcgtgaagacacatgttggtctgtatttcagtgcataccctagtttacactcttcagaagccatgaagctggggctcctggtcatgccctccactatctctcctcccctggccaaggtgagagtttctcattgtcacacccacccaggggcaggcttctgaccttcagttgctctaaggaccaatgaatgtcaagggccttctagcttccgctactctggcaaggggactgttacaccatgtaaaataagaattatcctacaaaatccagggcacagagagcagaacatgttggaatgtactgtttagatgaccaacagccaccaaaattggagtggggaggaaggatacctgtcatgtatgttttcagcatagagtccccctctgccctgacagtgtttccatcactgtacattggcaattccatgtagaattatttacaggtgcaaatgacctctttgctggctcattcattttgctttgacagttggcttgtgatatagaaattattttatataagcacattaccttttttgtttcaagttaatagatttgtgtatttaattgcaaactatttttagccctatcattaaatggagagggagagaatgcaaaactgaaacaacagaggcatgtggaagcaggatttatggaggaaacgtgggaagagggttggactgaagtcccaaagtttgggtttgagtcctgctgtccaggatcccatctgctggggctggcccaagaacatgtggcgccatgccctgttcttaactcattttgtgaagttcttgcatatctcttctcttttctctggtcaggccacatgttgatcctcttctcttgattgcttgccaggcagagtcaaatctgtattttggttttattcttattctttctcaaggatgccaaataggagaagtaaaccaacatttattgcaaatcttccatttgt

SEQ ID NO: 1881955 - DNA, 4001 bp, Homo sapiens
attgatgtaagcaaatgaagtcaaataaggagaagaactataaaaacaaaggaattatagaattgtagatataaactgaaattcatcactaaacacatgaaatagatattgagcatattctcctgtttagaaaaaaactatcagattctggtttaaaacaataaaaatagcatcattaacaactatttaaaaattacagatatagagacagaacagttgaaagtaaaaagattgagaaatatatgaaatcatcaggaaaactaatttacttctaacaacaaagattttaaatcatacgcataacaagacataaaaagggcatttctttatgaaataaagcatggattctgcaggaagatataacaatcctaaaggtatctaagtatcaaaatttagctttaaagtgtataaattacaaagttgataaaatgtgtataagaaataaataaatcaataataatatgaaaatatttaacataccttttagttactggtgagaatataggggaactaaggatacagaagattgaaaacttattttacaaactttacataataggcatatatagacttctgcactcaatgactgcacattatccctgcttttaaaattacaaatgataatcatagacatcgaccacatattgaaaaatagagaagaccttaatacatttcaaatgattgaatcataaagagcattttctctagcctcagtggtatgaagtgaaaaaatcaatcaaaaaattctaactttaaaagaaaacacatctaaataacccatgtttttttaatgatatcacagtggaaattagaaattattttaaatggaatggaaataaaattgtggcacataaaaacttgtaagaattaagtaagacatgacttagggacaaatatatatatatatacttaatatataccttgcctgtatattttataaaagaaagactgaatatcatgtctttaagcattcatttcaaggggctagaagataacgtgacaaattaaactcacatagaattaaaagaaatatgatagaaatagatgaattagaaaacaagtatagaatatagaaatatcaatgaagccaaacactagttcattaacacactaataaatttgataaatcaatatcaaaatttaaaaatgaaaattataaattgcaaacatcagaaataaaaaaagtttacttctataccaatactacaaatatgaataatttctatggcagctttatgtaaaaacatttgaaaattttgatagaagtaaaaaattctataaaagcccaagcttaccaattctgattcaagaataaatagaaaatgtgtagagctttatgtctattaaagaaattgaatctgcaagtgaaaatcttcaaaaaggatagatttagcaatatctttttctattataagtaacaactaacatcaatcttacaaaacagtctttcaggggatagtaaaagggcatacctctcactcttttttgtgccagcataagctctataccaaaatctgacaacagcattaaaaagatattagatatagggcaataaaaatcataaacagatatgcagaaaatagaaaaaacagcatatccaattgctcagtaatgtatagaaagtactatagatcacggctaagtttcatttcaggaatacaaaattgctttaataatcaaaaagcaaataaacaatttattacattaacaaaagataagctcacacgatagacgcaacaaaaggatctcacatattttaacacccaggatttttaaaaattattagcaaaatggcaatgatagaaaatttattttcttttttaaacataggagtgaccaaatttttatttttaattacttactgagatattactgacatacaaaaagctttacatatttaaaatatacaaattgatcagcttggagataaacagtatacttacaatcatggcagaaggagaagcaaacatgtcctttttcacatggtggcaggaaggagaagtgccaagcaaaaggggaaaagtcccttataaaaccatcagatctcatgagaactcactcgctatcacgagaacagcatgagggtaactgccctcatgatttgattaccaggcccctcccacaacacgtgaggaatatgggaattacaattcaagatgagttttggatggggacacagccaaaccatatcatcttataagtaaagtaatacattttctggtactttcattcaatattcatttcatcttaaataaatccagagaaattcaacaaaaattcacaattcagtcactggcttaagccacatatcttatttatgtggaataagccagatttacataagcaaatccaaatttctagcttagtattatattctattacatggaacactgcatatttggaatgagcaatttttaaatagattttagccaatctattaatactctgtcactaatggtttttactgtatcagtcccattggttactgagttaacttggttttattttttcttgttttaattcattttcaatttagtcccattggagaccatacaaaaacacaaaaatgttaatgtttttatgctgaaaactacattgatgagaatgctagaaggtgtatgttattcttcatccagtgcctgatgttaggtcacttataaaataaaacataacatcttggaatactaaaggatgtttgaagaatataggtaatccatttatacattttcattgaaaacttaaaaaaatagaaataaaacgaatacttcttgagctctacaaaaacttcaagcccctaccatggctaacttatgttcagctttttaatacttccataccttactttatgtttttaaatacaattataaatatctaacagatacactgtccagtacatatctgatacagtaatatgtgtcaatctgctatgaatgtgaactgataattatttcaattttgtcctatttttaaggctgcttcaaatatattttctgctttttccatctattcagatagtccatctaaaatagtaacatatgaagtagatacagaaagctagaacatgtctcagccctgcattttgtgggtctaaaattaagtttattaattcagattaattttacaaaatagtaatatcaatatgaaatatcatgttccttaatgcatacttgtgttttgtgacaacaggtatcatttctgttcaatgtatacacagcacctagtatgttaactggcacattagtttgtattcaaaaattggtgtaaacttgaatgaatgcattgagaaaaattgttataaattgaatgatatggaaatctagatagcatatcttaaaagccaagtttgtcttggtgaattaaggccaaaagtgcatcagtgggcaaacatctattgatcctaaggctcaaaatagattgaaaactctggcattctcatgaagtataattttcttcacctaggcaaagcctgccattgtgccagaatcatctctggcacattggatattctatttacagtattattataattaccactatttttattcttatctgctcttgcattaccttggtttagggtgatactcaagccagtcatacttgcttaggaacttggtttcctatcccatgtacaagttccactatattaattatctgaagagccatttgggaaactgaaatataccaaaagtaggaacaattaacttgtattattcttccacaaatatggatagcaactgatttaataaacccatataccaaaaatgattagtctaatgtaggatatattaatgtacttttcttttttgcattgtgtgtatgacttttttatgctcagccacaatgacagatgaaactatctagtaattcaatcacaatacattcagcactgaaaatgcagcttctttatttttctatcctttctcacaaaccactatctcgtaatttttcttatttgtagagctgcacttgcattcaattattgttgacatctgcatgcccag

SEQ ID NO: 1881956 - DNA, 4001 bp, Homo sapiens
tggaacataagtattctgaaaaaacaatattcaatttaagaaaaataaaacaaagatgaccctttaaattacagctacagttgtcttatttcacattatcagtgcttttcagaacaactgaattttttgtttttgtttgaaaaaaaaaagttatcctgagactttatttactctaaccacagtgaaacacattctggtctggtgatcagaggaaaaatacaggaagataagcatagactcctgcctcccacccctccagccagattgtgtggcacatgctcctcccatgttaaattcatagagattttcaatactataagaattcaagtactctgttcaattaaagggtggagcatgatccatttcccaagaatagtagcttcatgactctatggacagagcgcttgtctaaagatgcaggctctagtcactgcagaaaatgcactctaacaggtgacaatttgagggcctacctgagaaagcagctaaaattgcctctttattttggtttctctgtttgctaagttgtaattacagccctgaccaaccttaagagtcactgtgaccccctcagggctgagtttgcacaaagtctccctcccatagtacaaggggagctgcttagggggcaggaggcagggagaggtccattccccatggtagggcttgggggatgtagttgccccctccctctccctgtctcttgttgttcaaaaaaatgatcttaaactacaaaaaaaaaaaaaaaaaaaaaaaaaaaagaaagaaggaaagaaagaaagaaaggaagaaagaaagaaaaagaagtcaaagtcactgtgtaggttgggaaggctgcaaactggttaagaaaaatcagtgtgggaattaaaaatactaaattagctttgcaaatatgatacttttcaaaattaagtaaacctgctttttttaaaaaaggttaatctttaacatttgcattcatcatggccacatgtgctcgcgctgctgcctgccttttgccatcttaattgcaatattcacatataagtagggtaagtgaatgtgtgtgggtggagggttgggggatgggctcaagcaaataaacataaaactcactcaaggtccttttgggcttgacattaatgaatggaacaagtggggagatactattttcatgactgcactaactacgtgtggtatgtaaagtccatatgaaaaaaagacaaataggccaggcatgatggctcacgcctgtaataccagcagtttgggaggctgaggcaggtggatcacctgaggtcagcagtttgagaccagtttggccaacatggtgccatctctactaataatacaaaaattagctgggactggtggcaggcacctgtaatcccagctactcgggaggctgaggcaagagaatcacttgaacccaggaggaggaggttgcagtgagccgagctggtgccattgcactccagcctgggcaacaagagcgaaattccgtctcaaaaaaaaaaaaagaaaagaaaaaaaaaaagtcaaattaggtgttatctagacaacaaacaaattcatagttcagtttctttacatggtgagtccttttttttttgaaatatgcttaaaatatcaaagtttgccatataccaaactttttaaggaatatctcttattacaaaaacaagggcaagtttgtatccaataacattggttcccaagcctaggaaaaacagacattttaaaatacacttgcctttttttaaaaaaattaatcaaactgttaaaatttctcccattatgactccttttcccctatgtttgtaaggtcttattcttctctacttcgctccaagttcccttcctctctgagatcttgggatgttcttgtgaatcctggtcttaccttggctgggccctcactcacttcactcacttctctgcatgcaattccaaagctatgctgaaactacttgcttatatcctgtcttccccattagactgtgaactccaagggaccaaggcctgtgacttatttattcatctctacgtttccatgtccattgtacagccctgtgtgcaacaggtgatcaaacaatgccgagtgtcctgtcattggacccttctgctgtcacatcgttagctgtgcatttctaatatgcaatatgtctcttcgctttaatccttgtgattttccactggattcttttgagttttgattctgaggttctttttttttttttttttttttttatgagacaaaatctcgctctgtcacccaggctggagtacactggctcactgcaacctccgcctcctggcaattctcatgcctcagccacctgagtagctgggattacaggcacgcaccatcatgcctggttaatttttgtatttttagtggagagggggtttggccattttggccaggctggtctcaaacccctggcctcaagtgatccccaccccaccccctctgcaccgcctccgcctcccaaagtgctgagattatgggcgtgagccatcacatccggcctgattctgaggttcttaattaagaaacagaaatcacgtcagctgatgtgaggcttacggaaattggtgtgtttgtgtgtgtgtgcatgtgtgtatgtgtgtttatgtgtgggtgtgggtgggtgggctgagcattgtctccctttctcttgctttgctcctaacttccacaccccaccctcacactctattttcattccttctgatttctctttttggagcacatctgaaggtgagaaaacttcattgtattactatatttgtacttgccaaatactatgctgaatccagctgcaattcttaaatgattctgaagaaagtggtatatatctagtgcaaaatacatttccttgtaatctctaactataagcatcctcttctagtttctaagtatggcatggtgtaaataaaactgtctgaactttttctagcataaagaaacatagcctagaaatattccaaagtcagtacaaatcacccttttaagaatatctaatggcatggggaatggttaccagaaggaaaaaaaaaaaaagcatggtataaagctaagtaggattgaattccatttaggtatgttcatttttttctctttctttctgtgtgtgcacgtgtgtatgtaaagattgaaaggtaatacataagaatataagcaagtgctaattgaaatcatgggacttataattactttcttcattatacttcttttctgcatcttctcaatttaccaaattatgatgtactttttaaaacagaaaaacacacacacacacaaaacccctgaaaaattcaaaaatgaaatagagtgcgacatttaaaaggaaatctgttttatgtattgtagcctgggaaaaagggagagcaaagggacttttttaagtgtaatttttaaaatgaaacattgttttgaaatttgcaagagtagaatagtgtattgagcttccattggcttaaccaattaaccacactgccatcatcgtttcgtttatttccccctccccatttttccttccaagcagttttgggtttttttgtttgtttgtttttaaggatgccagttatgccttaattcggtcggatatattttatgtaactcggctttttttgtttgtttgttttctttcaggatactttagagagcctcaaagctaacgtgagacagcatcttggttctgcaaggacgtgtccttcaacccaacgccccccacccccacccaaccccaagcaaatatcctgttgaagtctccgtgaacaaacatctatcaacagaaaagcgatatggtatttactcaacttttcttgtgtcccttgggtcggagaacagacttcagtgtctaggagaaagcccggcctcgccgggcctgggcagcccaagctgccccattgtgattcaagattcggggtgtaaacaaatgcagtgtttaacaatcgccagtttgcttttaatgttttatagccatgactggggctcaggaagaacacagtag

SEQ ID NO: 1881957 - DNA, 4001 bp, Homo sapiens
aaaggctctcagaaacccatcagttataaataaacaaacaaaaatcttgccaacctttttaaataagtaatgtatttgaccttgaaactcttttttttttcaatagcctctataacatttcaggaggcaagcttccacagaaaatactttagaaaagtttgcatatgctgttccttctcccggaacgccctctcctgctctcctccatggatctctcatgttcagcttgctggatacaccaagaatgcaaggccctgacaactctttacttgggccatttcccaagattgcatttgcagtgagcagccttgagggatgaggtcatgtctccctccaggacaagaggaggctcactataaaagaggtgtgattcctacagcactactagagtccaacatcaccttaccccaggttccaaggaccttgttcgaaggtaagactcatgcctagtaccacactattataccagttttcattccaggttcactctcattgggatgatctgtatcattcagagagatactccactgcaaaaatatgagacatggcttggagaaaggaactgcccctgcaggacgcacccagagaggtaaatgctcacagctgtcttgtggtgaagccaacaacaaagtgacagcaaagccacagacagacagagtttctctcctattctcctttttgttgtgtagtgagtgctgtggtgggcccttttgtttccttccactgggccccccagtacctcttcaagactgaaacaatcatttggccagctgctgggagtattagaagctcccagctcccagctgagtccttctacaggaattgcccttctctgaatcacaggctcctgagtagagggaggtggacccatatccaaagactggtcaatggccagcccttttgctgccaagtggcacaaccctgaagagtctctccgactcccaagctcctacggaatcagcacccacaaggcagttcacctcttccctctgcccagtcccgccgccttcgctcctgtaagctgcctgcacactggtctccatcgcagagtctggttcctagggaacccaacctcacacacactctgggagtttcgttctcttctaccagagtgaggcaatgaaaatcagcacaaagaattctggccagtactgtgggtgaggaatccatttcaggaggagccaccagagcgcaagcaccaggtcacagcaacagagtccaagggatccacaggccagagagtgtaaacgcttgtaactgctgaccaaaggctcaagtatgtggtctagtgttatcacttgttacctctgaggagtacagagttgtggttctcaaccttggctgcaaaatagaataaccaacggtgttgctaaaattagtgatgcctgggcctcatctcaaaccaactgaatctgagcctcctgagcctgagcctggccatcagtatttggtaatcacttgatttctctgggccttgcttctctcatctgttaaagaggcaatagtagttagctccctacagggctgacgggcaggtgctacctggttatcattccgttaagtacctggtgacttatcaggcattcaatactgaatatcttccccaccttcctacttaactgcatggttagaaaaatgcagatgttctaaataaggatgccaaagcacaaatattgcatgttattggttgtcttcaaatcaagaggcatctattttaccatcccttaagacaaaggtcttcctagacattggccaagatcgtggacagattcaatgtgcccttgggcatatttacataaagtttcttgaaatataccttctttttgacacatagtcatatgaaaactgtacaagttttctttttaaacagtaaaataatttgttcaaagccacttacctattttgcaacaggatagcttgcttttaagactgtttgacttcatatcccatcactgcttcttagctgtgtgactttgggcagaccatttaaacaccctttgcctcagtttccccacctacaaaatggcaataataataacacctacctcataggagtgttgagctgattaaatgatattttgcttgttaagtatttatcagagaggctggcaaagagtaagtactcagtgaatgccagctatttttataatttcttggagtgagtgaaaatatgtgccaggtgaattttaaaattttaattccattagcattattaaaaatacaaccatattagggttgcagattgaataaaaccacatggatttctcataaaggttttgagaatttgtgagcactctactaataaaaaaagatgaattgggcatatcatcttaagcccagaaaaagctgaaataaaacacttaattgtgtgaattttattccatggtgtcaaaccttagagaaaccgggatttaaaggtatttcaaatttacctcttttacagtaagcatatgaggaaaaggctagtttcatcagcttcccttggtaggtattgagaaagattaatgaatgtcttgagtttgaacattaagttcttatgtgttagatttctatagccttcacttcttgatgtttagggaaaaacaattaaatatgtctccgcattttgctccatacatattagataaatcaactggaaattgtattcagctactagtaacagagacttaaatattggcttaaataaagcaaggattttttccccttataaaataagagcagtgcaggtatgatgactccaaagcaccatcaggcacctaggctctttccagctccaggcttcaccatccctaggctgtggcccttgtcctcaggcttataggatgactgctggagctcaagctctcacttgagtgttctaggaacagacaagggagacacaaggaaaggcagtgggacctgctgactgagtcatcctcctttaaaaagctttccctgtaagccccactcagtgacttccagttacatattactctgcccacccaccgccctcatcccatgacacatacacacctctgcaaagaaggctgggaaaaataatgtttcagtggacagcttgccaaatcctagaatacagggattccgtactaaaaaggaaaggaaggattatactggttagagacctaaaatttttgcaaccgtaagttcttaataaattgttgtttacaaaaaagaagaaaaaaaggaggaggaggaagaaaagaaacgacctgctaatttattcattattgtgtccctaggacctagctcagtacctggcacacagtaagagctgagtaaatatttatttaatgattgaactaaagaatgaggtatggatatagaataaaggattgattttacaggctcacatgaaaaccagtctcttgaatccagatacttagcctttaaagaattattctagcaacaatacagggtactgtaattatcctcatttgatacatgaggctaaaagggcttaataacatgcccagggtgagacatcctcttcccactgccctccacagacccaggccagcatagccaatgcctctgccttgatgagcatgagggaatggtcctagatggattatctaatgtccttccttttttacagatgagaaaactagatgcccacagaagttaagaatcttgtccaaagtcacgtagctcagagaagaaagtgattattagaatcaggtatatcaacccccagtctgtgctgcatgggccccgagttcccattggcaccaacctctcaagaaattggtgtgattgcctggaaacagactttgatgaaataactgtgagctgctcaagatattttccaccttccctggccaacatattctactcccttggaagccaccccagcattcattgttgagggtagagtgtcaggttgcaggctgcagattttagtagcattggagagagaggcagcattaattaaaaagcagagggaaaagccatcaccaaaattgccacccactccaggacagttgcctctaggagcaaacgcc

SEQ ID NO: 1881958 - DNA, 4001 bp, Homo sapiens
agccaggtggtgtggctcagcaggtaactcaaacttgactcaagcaagaaatgggaatttattaggtggcctaaagatagtataggctttagcacgggggcgggcggggggcaggaagggggaaacaagacaaattagtgaacttgaggctgtatcaggggtaggggagaagagatgaggttgcagggaacactggtgcttcctgccaaggtcacaccattctgttcctgaacaagaccttaaaaagctgactttcacccaagggtaaaatcagccttaaaaacaggtggattgctgtctcaaatgaatcaaacaatatgggttgaagagggtgggccttcccaggaccagagacagacctgcaggaataataacagtcagaactattaggttgtgtaagactttgatttggaaggcaatgctgcaatgaacatggtatcttgagaaagcgcagttagcagaagcagcagtgccagaagccctaatagatgccttgcaggcctgaacaggtggtgcaagctgtgaggcccatgccagctgctgcagcaggaagaatctgcaggagaatctggtgatgggatttgagaagcctttctggcttcatggcttccaagctggattccccagccttcctagggattctggtcctcagcatcccttaataaacggctgttgtgcttaaaccaacagaagctctgtgtttataattaatatctccgaatgacacacattcattctcatttaacattcattcaatccagtgggatagaagatattatccctatttaatagaaaagaaatcaaaaatcagagaagttaagaagcttgtccgaggccagacagccagaaaacggcaacactggagtcagattcacacgtgaatgatcccgaagcccatgctccttctctgtccggctccaggaaaggggccacatacgcagcgtagcagcagcgagcctgtctttggcgcggcctcctttgtcttcgtggttcagttgagaaaaatgacctgagccccaaggttgcctaaaatttgcctgctagcgtctgccttttactaaagttcctcacaagaatgtgggctctgattggatgcttctacggttttgtgtttttgtacttcataatttcctagcaaagtgtctctctgaaaaatgacttcctttcagcattgaactacaggaaaagagatttttcccatgtctaagccagtggcagggtggtcatacgtgtgtggctcggagacccagttttagaagaactgaggcaggtggtgagtgtccaggagagaagaaacccggggtcactgttggcccctcttcctgagggcagctcacagatgccacctacccgtggcccccagaaacaatgtatttagaccccaaaccactgttctagaatagctctatccaacttccagttctctagttcaggaaagtccctgaatttaaaagctggaagagaccttacaaatttcattttgcatatgagaaaactcagaaaggattttcctgaggtcacacaattagtggctgggcaggattattgcttacaacagaaactacagaaaaaaaaattgcttaaagcaaaaaaagcatatggctctttatgcttcacaatttacctgggagacatataccgagagatgagacatcgtgtgaactgtaaacgtcctacaggaacacaggcgtgggggaccacggaggccgcagcggttagaaaaggcttcaggggaggtgaggggctagcgtgggcccctggaggacgaacaggagagcctggcagagagagggcgacggcgaggaaaggagcagagagacagggcccctctctggctgggcctaaggaaggggaggaaccctgccaccccacctcaccccacccctgctcaaatctctggatcctggagcaaaaatgggaaaaagcgaccagacagcactgcggggtggctcctccttctctcagagagtgttaagcaagcccatgtgttgggacgcggctaaggggatccgggcatgcttggcgggcggccaggaggaggcgcccgcccctgcccgaagcagcccctctgggcccctccccgccgcccttcgctctgtcctccgcctggctccgtactgtaggctcccagtcacctctccacccgcctccctcgtcggtcgcctattgctgctttagccgtgaaaggcccagaacacgctgccttttccagttaacgtgggggctggagggaaggagagagctcgtgctcccctccttttccctcctttgtcctcacccctgccctgcttgtctaggcgaaggaggcccaggaaagcggccctgcacgcagctctgccggcctcagctcgcgcagtccacccttagatcttacaactgaaggtggcgctttcaaatccccgtttcattacctatttgtgcttcctatctaccggataccgcgaactgctcttcatgctacagggggagaaaaagatgcattcagaccttcagtttgtttactacagtaaccatgacgctggaagaccgggcgtgcaatataaaacccaggaagggagcgattaaaagaatagaaacaagacaaacaggcaacacagcccaaatcccagaaagcagaaggggcattgctctcaggttgctgcctcggccccgtcagccggggagaagggctttttggagcatttgttaagtgccacaaagccctaccaggattgataaaaagcgttttcctctgaggttttcatgcattccttcaacaaatatttaccaagtgcctaatatgttacaaacattgttctaattgacagacatctttgccctcataagaactgacattatcatggaggaaagagaaaataaagaacaaacataataaataagtgaattacatattggaaggtaatttttaaaaaacagagcaagctaacagcatgagtgtgtggggattccagttttaaagagagtggcctgggtgggccccagggggaaacctgctggcaggaaataggcaatcccagattagcctgctgtgcctatgagctcacgggcccttccttgtgctcatacatgtgcatagagctggagacccttgcagagggtggctgtcttttactgcttgaataggatgagaggtggggcatcagttattcacactttaatagaccattgcagctttgacttcccctgcttccattcctaacctctggagagctgcgaaatggtgccgatttccgaaaacaggtaggaaggtaagggaggaaaaaaccctaaaatgaggagttgtgtgctttggagaggcactggcatccccggattgactcctgagaaagctaatggaagatggatccaggtttagggtaggaactagctatttatctactagtcaagggacatattttaaccatcctgaattagattttgcaatcaggttgataataatgacaataataattaaaatagctggtgtttattgagtacttactaggtaacaggtatcgtgcataggtttcacatgtaaccttttagttttttcttcagctagaatgtcatgtaagctccatgagagtagagactttattttgttcactgctgtgtcagaatcaatgcctggcacctagatggcactcactgcacgaatgaatgaatgattgcattctggtaaagaggttcaaggcgctcctgctctgggccttacaatgagatgctgaggaggttttaggcccttcctcttcttcagagtgcagcaaacataacacatacctgtttcttgttattgttgactgctctatagatactccaggcattgttagagggacagtttcttctctttactgtgttttccaccctccccatctccttgatgggcaggtggttagaggaggaaaaaaagggggtgaggggaaaacaaaactttatcttgccattcatccatgacttcatttacatttagttcttacaacaacccattttacagaagaggaaactgagactcagaaagatta

SEQ ID NO: 1881959 - DNA, 4001 bp, Homo sapiens
actttcttgtatgaattcttgacaacaaatataaaacaaaaggaagttgaaactccttctacatccttctacacactgaggagagttaattgaattctttctaatgtcatgatttttgtgtttcttagaaaaagaaatcagatgaatagtaaacatttcaattgcacatatctgcttctggctacctatttaaaatgaaaatctttttcaaagtacacctagatttttcacatctttaaagtgatatcattttatttgtagatttattcatgaaatgttttcattttgccatccaggaaaagaaatgtcacggatttttttttttttttgaggtggggaagcccgaaaatatgcaaccctgagcccatgctccttcatcctatagcctctttccattccaggcaccctgtaagcactcatctacatctcaaagataaaagctatgaaagggcaaataaatatgccaagaattaaagttcctctaaccttaaaaggggttatttaaaacaggcactcctggtataccatgaccaactaaggtccatatactggcatgtgttggatacgctgcctttatagaaaggtaccaggaagatgttgaggaggggaaggtcaaccagctagttcagagcaagtttcaaacaacagggtaatggtgtcttcatacctaacatctgatttttagttttgaaattgcagtggtggtgatggggaggaaaatcagcgaggggagaggggaactgatgaacctaaaaagcagaagtaaaaaaataaagtctgtaggcatggtagtgacaaaatgctgattcttatggctgcacttcaaagcatgctaggacaggcttgcaaggtccagcaggattatttaaaaggcttggaattttgaatatatattttttaaaacccttttccttctgttttattttttccccaaccactagactaccagaaaaaaaaaaatactttctatgccatcttttagattgggttactttggtggatgagtaacctcacccattcctaggattcttttcttttgactagtttcatttttcaggcagtgacctttccctgacctcagccccaaactccaggtcacctttctgtagccctggtgtagcactgaatagagggtttaccagattgttggcactggataagtggtactgggcacaatcgtcctctttcataagcaggagggaagtttcctttcctaggattgagagagctggctgacttatgcccccttttcattttgttgtccagtaatttcccctctggccatatctgcaaactagttgccttgcaggaaggtgacatgcaccactgatgcaaaaagacaaacaaaaagactgttattggcatcagcacaactttcaatggtacttcaaaacagattcatttgatagtgaaacgttagttatttgccccaaataattaaaaagtttaattgattaaagcttaatctcagctatttaaatatttctatgcttttttaaattacactctcctgaataaaatcattactagctatgccaatcttcaatctgccctcaaattaccctaggaaagatctccttttacctcaacatgaaaacaattttttcccaagttttcaaatagtgggaaaaacatcatctgattagacttcagtaggagaccttaaataccctctatcatttggccttcatgttgccacatagccatggccctaccaacaggatgggcacttctgatgttctccaatgttctgctgtttcttttccaggaagtaacctgtttcatgggtcctaatgctgagatcccagggctgcagtgttttagtccatttgagctgctataaaaaaataccttcaactgggcaattaataaacagtagaaatttatttctcacagttctagaggctgggaagtccaaatcaaagcaccaggagatttcatgtctgctgagggcctgcttcctgcttcatagatggtgacttctaggtgggtcctcacacggaggaaggggcaaacaaacttcttttggcctcttttatgagagtgctaatctcattcatgaggtctctgcccttatgacctaatcacctcttaaaggccctatctctcaatactattgcattgaggattaggtttcaacataagaattttgagggaacacaaacatttagatgacagcatacagtgaatggcaaactctagcatgtcacattgtaatgcaagaccagtgtaccagcctgtctcttttgaataaatcaatgtggcaatattgatgatttccaaagcctcccttttgtattctgtatttgctaccattataaggatgtcagcactaaagaacaaaaaaagaagaaaaaagaaaaagaaggaggatctcaatagctaatgggaagcattaagctaatcccttatcttgccacccaactttgtcagattttggaaaaatagtgcttcaaattatttttccaatgaatagactcgtgtcttatgtttgggcatttaattaggcccaagggggaaaaaggtagaagtttttaatactattttgctatgcaaaatacacatgaatatttccactatattaggtagttctatatcaaatatacttgtgattctaagcggcctggctttggtccggcagaatgcaaccatcagtcaatgttagctccatgcagccgcattgttccctgtgcgctctaaagcaatcaaacgagtctgcaaatgttcttcaaagaatacatctagactgttacttcgttaaacatctccttggcattcattctattttccgctttgaattgctgcatttagttttgtaatgaccttctatagctaggaggttttattaactctttgatcttctagctttgggatgaaaacaaagaaaacataaatgagcactttgtgcactgtcttatagaggagaccagaagaaaaaaggaaatatgttttcatcaaaaagattggtttgtgtggagactttcagcccttcctgttcttttctccctttgagtaaaatgcttatcaatgttgtacatgtgtttgttttaatgtcttctttataacaaagtctttgtttctcttctctgtagctctggtagctgaggttagggtcagatatctctttatggattttctttttaagaacattttccatccttggtttcctctaatccagagtataattcttgggtaatctgtcgttgtatttatgagatactggaagccctgctctgtttccaagtattcctttgtgtgtgtctacgtgagtggtgaaggggagggcatccccaagccggtagtcacttaatactatgctgagaaaaagattgagaactctctgtatccaaatctcagttctgcacttcattgtaactgtgtctgtatattctggagcatttggagtagaacctcaccatttagttatcttgcttcctaagtcctgaactcataccattattaacatatggatgaaatactgcctttcaaattgactgtatttttatcttttgtcaccctcttttttccctttttttacatacttaactgactttaccttttttggtcttttatcacaactttggaacaaaactttaggtaaaagattataaaatactgaagtcctactcctagcttgaaaaagtaaaataaataaataaatataaataaataaaagattataaaataccaacatttatgatacaaattaaatacaaagggtggaaatagttactcatcagagcaagccttttcttttccccaatctcataatcagccatttattatatcaaacactttctttagcatcttgaaatttgaaactcctctttgttgttaaatctaaagcaatctgacctaagagcccagagacttttttgatttgcttaatctagactctagaacagcaggtgaactagctatgtgctgataatattatctggttattttgcagtgccttaggttaattggaaatggaaagccattattcatctcaaagtggc

SEQ ID NO: 1881960 - DNA, 4001 bp, Homo sapiens
caaatatctgggtatactgtggcccagtcaagttggtacacaaaattaactatcacagaggggcagattggatgtggagatcagtagctttattttttcatattcagtttgaggtgtttataatccacaagcatgcagagtttaaaaggtaagtttgatatataggtcaagagatcaaaggggagatctgagctggaaacataaattgggggatgtggcagagatggctagtttgcctacctaatatcattcttcccttctaccttatgaatacaattctgtttgtttcggtagtataaataggttcagctataaaatctgcatttcccttgcacattggatggtcacatgacacagttctgtcaataaaatgtatatagtaattgtgaggtaattctgagaactaaaactaaaaaaggggagaagactcattgatcttttgctgttttcttcttgattaaattactgatgtatctaacttgtgataatgtaaaaaacacatgctaaagaaggatgaacaaaatgatagaggaagcctagaatatagtcagtgtgtcagctctggactatgtacctccaaatgtcatctttctggagaaaagccaaacccctaatgtgtttaagcagcccttattcagatttctgtttcttgcagctgactgcaattttcaactgatacagagtgtcattagcatatagatagcctatcagtcagggtgtttttggctgcaagtaagagaaaacctgacttaaaaaataacatttaaaaatttgtgttcagcctgagcaacatagcaagaccctgtctcttaaaaaaaataaatataataacattttaaatcttacatgactggtactctagaggaagcacagactcccgagattagttgttccaggtactcctcaaggacatgctgggactgatgtactttgttaatttctgctcagtcatcttctgctctggcttcatcccattgacttcctgttcatgtccagtgatagagaaagcacctttgcatcaaacattaaatataagtacttcattgtaatacagataatttatccttgaatgaatcattgtcttgatcctcagttttgaactaattaccagctggagagaagagattatccttactgagtagggcaattcaggaactcttcttcaaatggaagtcaatattcaaactctagtgctattatatagcggggaaagtttgggataggtgttgaggatttaaacaaatgtttaatatattttacccctttaatgacttcacatccaaacttagcttcttcccaactagatacacacccttacaatgctcacaccagcatgaaataccttcagttttccccaaatgagatggttcaaagtcttcactgctataattccagatttttggttgagttgctctttctcttatatagttgtagcttctaattgtattaaggctaagatactgttatcttcccttaacatatttaatataaagtagtagagaaataacaagataagcacagtgaaaattgtggaaaagggcagtagcacacatggttcactggaacatggcataaaccatagcctgctggctggaaataatgaggactttctgacctggcagtgcagtgactacttgtgttacattatagcagcatccagttctgctctttggaataaattcacttgtcaatcttcctctattaccccatgtcctgtctcctggggagattactcatatccatcaatttttatatgagatggacatgagataggatgccctttctggcgctacacagatatagtagcttacctcctgtaaagtgtgtccaagggatttaagatttaagttacagctgtttatggtaaagcttggaatttctttaatttattattttcttcaagttttagtaggcttttggtccatatgtatttgtagttttcattgcataataaccacaccagcggatattagtgtggtcatggtctttgagtttggttttggtctcctaagcaacaaatcactgttttctagaattttagttgaatggcttctatctacatttggtctgcccctggaagagatctgaagcaataaccttgggctagtggacatcaatatgttgtatcctttctcaggcagagaatccttaattggaactaagtctcatgtctttcttgtggcttaatcttatattgttccaaactagctactttccaacctgtaccagcattagtatttattaaagtaggtaattcatttctgtaacctaaagaatttcataattttggactacagaaaagaatcctttcaagctacttttacttttttaggtgcttacagtgggccacattcaacccgtttgtctcttataagattttgttgatggccttaagaagtattaaaaacactctaaacatgtttcttaccaagtctctaatgctatagccttggttggcatattgacagagtttcaacataaagaaggccatagtttaatggatatactcaatatagtgtaaaaagattaccaacttactagaaagaaataataggatcttctctgttctgtatcctttatcttttgactaaaccagtcggttttctacactgctttatttcatggtatcaaaatctgtattagttgaaatgcactcacctgaaaataacagaaattttacactgggggtgaaagccacaattcagtcagggctaagaatgggcctcaggtctggctaatcagactagagtctatctccttggccacagtgattcagggttatatgtggcagccaagatagtccagttggagctaatcataagagattatgatcctggagctgtcaggggccatgatgtgaagccagagaaagaggccaactcagtggaaaacagagccaagagctggagagaaaccaatttctgatgacatcattgggcctctgaatccaatcctgtatggagctagcattctttctggccttctcaattaagtgaatcaatattttttttttcttaatcttgtttgaaccagcatttctctcatattcaacagtttagatttctgggttgatttgagtaatcggattataaaaagtcactcaaactcattgaaataatttggggggataaaagggatgtttaagttttcctgtaattccttcatttctattatgtgagctcacatagctatttagcttcaaagtcaaattagatattctttcctactggtttccagtagcttgtactatttgatgctgtttagaaatgtgtaaacacaatgctggccactaaatattaaccttgttagaaatttttaatctaagaattagtgccatatcaatagtgatatattttctataagtttttgagctggtaagatttacttgtgtccaacaatatacttcactctggctacttgcattggcctcttttcacaccacacacacagaagagaaaagtgtatgtttgataagagagggttttcttttctgactttttgtcttgaaagaattttagacttacagaagagttgcaaagatagtacagttcttatataccctttgcccaacttgtcttagtgttttatttttgttttactttaagctccaggatacatgtgcaaaacgtgcaggtttgttagataggtatacgtgtgccatggtggtttgctgtacctatcaacccatcatctaggttttaagccccacatgcattagctgtttgtcctgatgctctccttcccctcatcccccaatcccccacaggccccagtgtgtgttattcccctcccagtgtccatgtgttttcattgttcaactcccacttatgagtgagaacatgtggtgtctggttttctgttcctgtgttagtttgctgaggatgacggcttccagcttcatccatgtccctgcaaaggacatgatctcattcctttttatggctgcacagtattccgtggtgtatatgtaccacattttctttatccagtcgatcatggat

SEQ ID NO: 1881961 - DNA, 4001 bp, Homo sapiens
gggagcagagattcacaattcacaagagactcctctgccacgtttaaccagaagttctttcgtgtaagttttcactctgaagcattttcgggggacactttccaggccctgttctgaaatcttgctttcagtcaacacagttgctttttgttttgctttgtggtagatgtttctttatgggaagtggatcaaagtctaaacacacacttcgttttgtttttgtttgtttgtttttcttttttttttttgagacagagtctcgttttgtcgccaggctggaatgcagtggcacgatctcggctcacggcaacctctgcctcccaggttcaagcaattctcctgcctcagcctcccgagtagctgggactacaggcatgcaccataacatcaggctaatttttgtatttttagtggagacagggtttcaccatgttggctgggctgctcttgatctcctgaccgcagttgatccacttgtctcggcctcccaaagtgctagaattacaggcgtgagccaccacgccgagcacacacattgtttaatggtatcggtaaaacactcttgaccttttgaacaacagcaaccagacccaaatatgtctctctgcttttgttttggaatggggatggaaaagctggagaggcgcttggcagcacggcccttgccccagtgcttgaaggtctggtccatctcctgtgcatgaataaaaagcaaggggaacgctgaaatatcatctctttggaattcagcatgagccccacttctctactctcctgtgttgacacattagtgctattgtgttgcatctgctggtggatctcctttcatctgcaggccacacaaaaccccctcatgtaaagctgcacacaaggctctcaaattatgaggacactttagcagtcattcctcttatagaagggctcacagtcttagggaaggattgctgccatttcagtgtgctccactgtgccctgatacagaaagtccagacaagctaaggcgggaaagccaggctgggagcccgtgacagggaaaagttagcagacgagtgagtagaccagatggatagggctttgaatgccacaccaaggtctttggatttttctgcaggcattgggagccacccaaggattttgagcaggagagtaacatgagacaaactgtgctttcagaaaattaagttggccgggaggagtggctcacacctgttatcccagcactttaggaggccgaggcaggtggatcacctgaggtcaggagttcaaaaccagcctggccaacatggccaaaccccatctctactaaaaatacaaaaattagtcgtgcgtagtgttaggcgcctgtagtcccagttacttgggaagctgcggcaggagaattgcttgaactcaggaggcagaggttacagtgagccaagattgcaccactgcactccagcctgggtgacagagcgagaccctgtctcagaaaaataaataaataaaaatacaaaaattagctgggtgtggtggcaggcacctgtagtcccagctacttgggaggccgaggcaggagaatcgcttgaacgcgggagctggaggttgcagggaacggaagttgcagtgaactgagattgcgccactgcactccagcctgggcaacagagtgagaccctgtgtcaaaagaaaaaaaaaaaggaaaattaagttgatagctgtagctcagaaggttcagagagggagaggctagagtccagggggctctagatcagatcactgggagacctttgtaaaaatccacaccccaggccaggcacagtggctcacgcctgtaatcccagcactttgagaggccgaggcgggtggattatctgaggtcgggagtttgagaccaacctgaccaacatggagaaaccctatctctgctaaaaatacaaaattagccaggcgtggtggcacatgcctgtaatcccagctactcgtgaggctgaggcagaagaatcacttgaacccgggaggtggaggtcgcggtgagccgagattgtgccattgcactccagcctgggcaaggagagcaaaactccgtctcaaaaaaaaaaatccacaccccagcctctgcccttcaagattttgtttcaggtggtttggggagggaactaggaatctgcattctcaaaacattccacaggtgcagaggtcattgtgacaggctgctaaaggggaccagaccccaaatatggggctgggagtctagggagagaggggaaatagatggggatgctaccctgaggcgagccccacctggcctctgcctgtttaaggggctgaagggaggaaaacatgaagaagaccatcaaactgggccaggagagctgcctggagactggtgcccggcctgcaaggcaaccttagaagaaaatcagatttgggagatgatgacatgggacattccaggtgacaaaggggcctgggacttgggggatggtgaatctgtgagcacctggctcctacttacagtcatggagtatgtggaactgggaagggaaactgtcattcacatctctcagtcaaagatacgtaggcacatgcatggacacaaacatagccctcttctgcaggagtcagaaaggctggtgattcagagactgggctctgtaatccagcagccctggattgaaatcctgactctgtggctctggctgagtcacctgtcctctgtgagcaacagcctcctcacctatagaaagaaaatgttgccagcagttaactcaatatggctttgtggtgactcgatgagatgctgcatgcagaggctggacacagtgcctgacacaaggagagactctgtatggaagctctaagggtaatactaaaaaatgcaatctcacttctgaagccagggagccataaagtatttcattcagagtgcaaggaagaaagtccacaggaagacatgaagcctttttttttttttatacagagttttgctctgttgcccaggctggagtgcagtggcatgattttggctcactgcaacctctgcctcccaggttcaagcgattgttgtgcttcagcctcccgagtagctgagcttacagatgcacgccaccacgcccagctaatattttgtattttaagagagatggggtttcaccatgttggccaggctggtcttgaactcctgacctcaagtgatccaccggcctcagcctcccaaagtgctgggattacaggtgtgagccaccatgcccagccagcatgaagcctttcatttgctgctacccattccgtatggctttctctgggtgtgtgtttggtgagtcctttgcctttggtttctaggactcatagagaaatgacagacccttcctactgcatttaattggagaggagcacagagacctgagattataatgatgacgtcttaaatgtcaagtgcttcaaaagtctgctgttgcactcactgtcaccctaaacagctctggaaaccaaaaccctgcagccacctaaagcatgccctgagtctctcagccaggtttcatctgggaaatctgagtgacagtgacgtgcaggcagctggaagacgcacagtaaaccgaggagcctgtgatgagctcagaggaggtgagttgatgatctgctatttatagccccactaagaggctctggccgccagctccatgtgagtctgggtggaaatgatgccttcgcagagctgagagcacaaaatgaagttggtgattcatgggcagcagccacttgaaaatatgaacactcctgcgtccccagccccgccggcctttcacacccatttggaggcgtgttgagcagagctgctagcctgctgcatcctagtctgcatgtgtttgggcaggatgtgaggacaggccggttctaccctgacaaggagcctgcaaagggcagcagcacgcctgggagcactccaagaacgtctgcccaccccccgagaggcctcggctggaacccagggcagggctgagtaagaggtaagccccgagagg

SEQ ID NO: 1881962 - DNA, 4001 bp, Homo sapiens
agcctgcattgctgactactaaatacacaacttctcagtcaaaacagctacaatagtttttttttttcctttttaccttcaaaaaaaatcctgtatttgaattcatagtggagttctgccatatacgccaagtctaagggtagttaagaatagccttgatatgcatagcaccttctgcagttgtgcactgaacaggctccatagccatatgaacctgtcctgagcaaactccaaccactatccctgaccaaaacttctcttgagtattagtcatcattttaacaaagggattatctgttgtttaggtacctaaggaatttcaaggaagaacacgggctgatactagaactcatggaagaatgaaaagagatactttagaatttaattaaaaagtggggattgaaaattaaaacaacacagcggtttaaggtcatttactgtagggcaaactttcctgcagcgctcagggaccccatgatggtgccactgtacaggagaaatactaactcaggacctttttaatgaaaacctgtaacatcaaggtacaaataaatcctagagatgaagggatacatataacatgctctacctgaaaatgttaaaactagttttgatatcttattatatataacactcatagcagtgagaaaatatctttaacatttattacaatgatttgtggtaggaaattttctaaacttgaggtaggaaacctttcttactcatgagtattcatttcaggtcccactacagtgctttttacaaaaggaggaatgctaataaaatgaaaatcatattccattgaattaaaaattcaggccaattgtgctgaaataaatcttactgaatgccttctaaatatgccatgccctgcactagaaactttcgtaattcctatttattcttcagaataacctgggaaacagaaaaagctaaagtctgtttcctttattaaagtttgaatatgaagaaaccgacagaagcaaatagcataaaaattcatttttgtcttcaattacaggaagaatgtaacatgaaagctgagattacaatgaatagtacatgaatatgatgaggttttgttttgtttgtcctaccagagctccaaataaaaacacagatatatggtttgacatacggaatgggatagctaaaactgtgactgcctaagacaagctgaaacctaaggtgccgaaccatattggggaaagaggggaaaaaccagtaggtctgctatcaatcaagaaaagaataagaagaaatgggattcccaagccttcttcagctttttcttctccagcagaatagcctagtcaatgctacgtcttgtcaaattgtgtctcacatggctttaatgcacactaactttcctaagaagtatttgtatctatttaaatctagggattttagcccatattaattacatgtatattagggcaagaacacaggatgtaaaaggtaaaaatctgaatttcagtccatctgcgagacattgtgaaaatcaattacactctctgaagacaattccttatccattaaacaacagaaaaggtgattaagttgatccttgcctacatgtcagagtcgtgtagagtttttaatgacactcatgtgaaattcctttggactgtaaaatactattacttacgtgcaaagataatgtcccgaaatcacagaagggatgacttaacattaacatctttaactgcgcccccgtccttcctctcaaaaaaaaaaagttctctatttttagttgaatgattctgggaaaatctctattggaacctatcgacttcgcaaatgacaaaggcgaggtccagagacttatccaagaccccagagtaccagtggaaatcaagaccaaaccacacggtggagactggttccgacgtatcagactcagtgcttccggcatggcgctttagtgtcaggtgaaagaacagcaacccgccccgcttctccacccctgacaagccttccgaaatgccacgctgaacatggctgccgcgcttcgatgcttcttcacacacacaatatggacacgggtttgaggctccagccccggatgacaacactccggaaatatgcgagcggcggcggaagcggaagtgcctcagcggtaggggccggggaagtgtctgtagcgtccctccctctcaaccacaataacaggcggagggtcggcgtaggtgaggcggcggctgagtgggcctggggaccgggagcggggtggcaaagcccggagtgcgtgcggcagggctgaggtagctgggtggggattctggaacttccgaccgcttaagctcggcctctggcccccttggggcctagagctccttgagagatcaggggttgaatttgtagttcctggccttctaggccgtgcttgcgggggttgcctgcttgtctgaacctggccccaaaatccagcataaagaactctctctgggccccagtttcctcaatgaaatgggtgagggtgttggactggacagcttctgtgactgtctcccaccccgggcgtcacgaatttcatgattttaatgttaagtcggtgtttcggccagtaaagtgaaggaggtctgtgttcagcgtagtgaggagatgtccctgagcaggaagcagtgaacacatctttggctgccacgcctgagtatcaggagccctgaattctagtttcaccccttccacctacacaccgtgtgaccttgtctaggtccattagcttttctgtgctgcagtttgcttatctgtgttggatgcctttgatgtccgtgccctagctgtggaaatcagattcttaactcccttttcatggagtctttacagacctgaaaagcatattctccctgcactctgcacacccagaatttgactaagagatgtctaccgtgtttctttgcagacaccaagctggccaagggcaactggtcacttaggaaggttcctgtgcaatgagaagctctgtccagaaaactttgttttatacacctaaaccagcagtgtaaatcactacaaagtgaaaaacaggagaccttgatttttgttccaaagttgctattaacttgatggtttactttggccaaatcccttcctctctctgaacttgagatttttttatctgctaaaggaagacgttggattaggtcactggtttttaatcccctttcccattcccccagcacaagtgaaggataaaataatagttctataaagccatgattttcccagggaaggaggaggtccagtctggagggtatgtattacataggcatagactgaaaaaaatccgcttgtaatttttaactttcattttgagaattaacattttagattatctgtaagccttctttcccctctttaaaatatgtgatgctgtaattctgatgtcctccttgggtaaagaatgtagagttttgtgtgcctctttgtttaaatggctgtgtgcccagaggtacacactttatatttagtcaaacagatactaatgcatagcagaggagaaaaagggacaactagattccagtaagatagggtgatatagtgaagtaaaattggtggtatactaaaatgaaataaggtggtatagtgaaataaaattaaaaaggagttgaagacctgtatccctgcttcacactggtacatcctgcctctgtgactttggacaagccatctaacatctctaggcctcactttccttatctgtaaaacgaagggttgagctggatgattcctaggcctttttcagcaccatcatcctgttggggggtttttgttttgttttgtttgtgtgtggtttttatctgagcagtttggtttatgtggtgtggtatttctttagacaagagaggctgtcctggtcagtagatacacaagatagtctatgatgtcaattaaggtctgtgaggtcaaattaagtgatatgcaagattactttgatatgagcaagctgaaaccaatagaaactaaagaaaggcatgagaaacttgaagggcagggaa

SEQ ID NO: 1881963 - DNA, 4001 bp, Homo sapiens
aagtgattctcctgcctcaggctcccgagtggctgggattacaggtacgaaccaccacacccggctaatgtttgtatttttagtagagacagggtttcaccatgttggccaggctagtcttgaactcctgaccttgtgatccaccaccttggcctcccaaagtgctgggattataggcatgagccaccactcccagcctttttttttttttctttgagacagagtcttgctctgtcacccaggatggagtgcagtggcatggctcactgcaacctccacctccttggttcaagtgattctcttgcttcagcctcctgagtagctgggattacaggcacctgccaccatgccccgctaatttttttttttttttttttgtatttttagtagagatgggtttcaccatgttagccaggctggtctccaactcctgacctcaagtgatccgcccgcctgaacctcccaaagtgttggggtcataggcatgagccaccacacccggccttgtatactttttgagctttgttcctacaattggatactctaaattttttttttttttttttttttgatacggagtcttgctctgtcacccaggctggggtgcagtggcacgatctcggctcactgcaacctccacctcccgggttcaagcgattttctcctgcctcagtctcctgagtagctgggattacagacatgcgccaccacccccagctaatttttgtattttcagtagagaggaggtttcaccatgttggccaggctggtcttgaactcctgacctcgtgatccgcccgcctcagcctcccaaagtgttgggattacaggcgtgagccaccgcgcccggcccagttggataatcttgagcctctaaaggtccttaggaatccaccaatccactgtttcccagactcaggatctccagggccgggtgatctgcatccttacaagctccttaagggattcactcatccaaccccaccctgctcattttacaggctggctcatgggtggcagaaagccctccactgggagcaggccgatccgagtgccagcctaggctctcattaacctgccaaatcatctcatctctctgagcctcattgttcccatctgtttaacgggaacaaccactgtcatcctgcctaatttgcagagtccttgggatagctagaataacaggggttggggggcaggctcagcgggagaagagatttgcacaaggtcatttacctcttcatctgcttgttttgtgccaggagagaggattctgctgggaacaacttgttgggaaagatgacattctagtaaacaatgaaaccagtaaatgaaccacataatcacgataaaggggttttcgagagtcagggcaaaggtgtgtgttgggggagggagggtctgcccaggaggggtcattctggcagagcactggtggtcggggagctgtcccaggaggtcctggagagctgtcacaagcccaggggtggaagagcctggaggccctctcgagcccagccagagcgttcccagggccctcggagccgccgcgggcgcgggtctttgtctcccacattctctctgccgcctctcccgacccccagcgctgtttcgtctctgaccccgaataacttgttggtttccccccgggctttgtttcccgggggtcaccgcctcggggacgccgggcagccgccccggccctcgtgggtcctgcatctgacaccccctccggcccccgccccctacccgctcggagataggggtcaaaggcagcccgcgtcacgtggtcgccgagcagcaccgaatcggccgggagggccgagggagaatccgggtggaagtcgagaaatccagccccgatagcagcgctcggtcccgccccggcccccgccccggggcgctcaccgcacgcccgccggccgccccggcctccggagctcttctctggccggcacccacgcggcatcacgggatcgaaccccgctcccagcggccgcgattcggggaggtaggcgctgggccgaggaggtaaggggagacgggcttgggggctctcggcgcacgggtacgcccctctgggctagggggcgaggcagcgcgccccaaccttcagtctccagggagacccctccccgctgcgggacgagggggaggctgcgagctgccccggcgcagcgccgggccgggactgggggctgggcaccgggagggagcgggagggggaggagagcgggcgggaggaggcggcggcggcggcgtggagcgggggtgggagcggcgggaggcggccgcgaaggggttaaccctggcccgggccggagcccggaggcgcacgcacggcccgggggacccaggcgtcccgctcctcgccgggagcgccccttcccccgagtggcgccccagccgtggcaggtaagaggccgagagggcccgggcctgccagtcccctgtcgcccagccggtggggcccgagcccggcgtgcaggccgcgcggggcccccagcggccgccggcgcaagtttggtgcgggcgggcgccgggcgggcgggtggagtcggccgggccccgcgcgcgggggtgggaggacaaagggtagggggccgcgcggggccgggggcaggctggggtgcgggcgagggcagcgcggcagctgtaggtcacggataatgtcactcacgaggaatgccccctccccctcccctgctcccgaacaggggaaacttttgtctagcgagggagggggttagaggccgggtcctggcttcgcgaaggctgaggcagccggaccggttttctgcgggctctgagcggcctgctgtctaactcccctcctccctcagggtctcgggagcaagaagttctccctttgcacgcagctctttaacgccctgggacaggggtgaggagggggcgccggtgggacgggtgggctctaggaccggccgggaatctggggactggccacttggctttttgcagattcgagcagcccggtgtgccctgcgaggctaagggaatacagagccccaccccctgaacgcccattgttgccctccccacccaggagagctttcagaatggcctgcgggcagttttgcccccaggtctcttcagagcgacctggctgtttgtcagtttccagcggtgtgaccttgagtgggttccttaccttcccctagcctcagtttcttcacctgtaaaatggggagaatggtatttgctagaatgaggatgagaggagtgtgtggtatttcagtaaatggtgtcatgcttatattcaacaagtacatttcacgtttactgtgtgttagggcgctggactaattcattgctttacatacattctctcatttaattctcccgcattactattaaccacattttacggaggggcaaactgaggcgcagggttgtaaaggtcacacagatagaaagtggtggagcttggattttacctccctctctcagcctgtgtctcagccacagatctctagagtgtcttgctgtgacagctcacagtttatttctccttttttttttttttttttttttacaactttggccctgtacagtttcattttcaattgaaattatggggacatctgtcctcttccccattttccccaccggcaggtaatgctctcttctgcctggtacttgttccaagtgaggtcttgtgccctggctcttgttagcatgggcagctggagcaggagggaggtcagttggagactgggcctggaactccgtaatggtccaagtgctgttgctggctgctgtgtctatggcagtgcggatggtgcagggagaagcctgtctccctggctctgactggagacagctggtggctttgtcaacaggcctctctccctagcacccagggacagccacatctttacttctctttcagaccaggttactttcagatcagcagggggcagaggtagggcaagggtgttcttgtgtaacttggccatggcaggggttctcattgctaa

SEQ ID NO: 1881964 - DNA, 4001 bp, Homo sapiens
ttgtctaagttccaaagtgagaaaacttaccaatgagattgaaaacttgatattgaattaatcaaagagaataaaggaccaacaggagaggcacaagaaagttgagaagaaaaaggtagctctcattttcgaaagacgaatattgataactatagactggaacataacctttagcattcaaaagattcacaacaggttaccctagctcctcaatgggacatcagtcttagaaatgctgttgcattaaatatatacatcaatttttagaagcaatctggtttcagaaataagacagtgtgtgcaggcaagagaaatgtcttaggctaaacacatatgagttgactagaacaagactggaaactatgaataaacatgatcattatgctgaagtccaggtgtgttcattcaagcctttaattatatccttttggactaggttttagaaacagggtgggtgaaatgtgtttttgtaaatttagtgggttgttatcttacttgagctaagtgagaagtgtgtgtgttactcaagaattgtgttcttaaagcattagaactttgacccaagtcttactataaattttagcaatggctagaatgatcagaagagactattttcaaattacagataaataaaatcataatgattaggcatatggattttgaaattgttacacttggaagagagttctggcttcgccatttatcagatgtgtagctttagtcaagtgatttaaactattctaaacctcaacttcctcatctataaaactataatttggaaaaggccatctacccattgtatggatgatgtgggataactaacataaatgcacctagcatatagtatatgcccatcaggatggagatagttacaatgctggtgtcccaaataaaattgcctctcacaaccagagagcatttcaataaagttaaatagcttacagaaatgggtaaatcaaatcaaacaagattaaaatgaatcgcaatatgccgtttgagcaaaagtgtaagagaacaagtaatgtttttatacaggaatagaataaaaaaggcagataattagaggcagatatgtaagtgtttgaaccatttaagtaactatgttcaataggaatctattaaaaaacataaatcaatgaaaacatgtaacaaaatacctagcattttctttgactacatctgtgaaaatatggaaagtaatataaagcagagaccagcttcactgtgctctgtactgtctaacaacactgaaaatcttacattatgaatggaaggcagacaaatggaaaaatattcaaaggagagtaatcaaagcgtggggaagcatgccatctgaataatggctggaagagaagtggtagttgtttccagtttggggctattatgataaaacagctgctgtgacattttatataaatcattttcatagacatatgtttccatttatctaaggtaaatatctagaagtagaattgtcctatggtaggtgtacatttaacttcattagaaaatgccaattttccagagtggttgtactattttacactactttttaattgtttatatatttatttcaatctcattccttgatggaattatgtcaacctttccagatttctgtcttagaaaaaaattggaagacttaaccactctgcactcatatgcagtgaccaaaaacaagcagaattgaatatccattacccttttagatggtacaggaacagtgcaatttccctcacacttcattcatcactcctgactcactcactcatttggtaccaactgatacgtattagcatgagcttgcataccttcatgtaatgggagactgaaacagccccagccatttaacttgctgacagtaggccattgttgatgcttgcatttgagtaagaacataaacttcaaggtgtgtgtttgtatttatactttgtcattgttgttgctttttgtaagtgccatcttggagatatttgtgtttttccttttgactgcctcctccttcagttgcacccagagggtcggaacagaagcagcagcaggaatgttgctaggcaaaaaggttctgatgacaatgatggagattgcaaattatgattagtgcaaacccaggatgtgtcatcagcttaggattctgttatttacttaatttgagcctaatgatatgaaacatcgttgtaatgttgaagttttcttatccttttcaaggtgcttcaattccctgaggaaagaggcaagcagatggaatatttcaggctgcagacatagaagaacgagatagaaatatgctctctgtccttgatgtgaagattctgtcacttttaattctccatcttatttacttttctactacataagaactggggcttgttttagcagcattgattaagttgtcattgattttcaagataggaaatagaactttcaaatttcccacatgaattttaaataagtcagatattaacaacaagataaaacatttaccatggcaatgacagaatagtcaagtatcattcaaaacctttcaaggctcacaaagagcatatggattctagatgtcaatacatacatgactaggtattaattttattatttaatctaaagaaatgcttcaataagcttctagccccaaaaatagagagttcatttatttttatacatgtttgtgttcactcgaaatttgcataaaggtatattttctaccagtcaatagaaatcagtcttattaacagttaagatttattgagcccagtattctgctaaacctttagagcactatgtgaattaatcctcacaaaaaccttagagcagagtttgcccaacttggaactattgacattttgggctggataattctttcagggtagggattgtcctgggtattgtaagatattaagcacaatttctggcctctacttattagaaaccagtaacgtctctcatcccaaatggtgaaaatgagacagagtgcggtggctcacacctgtaatcccagcactttgggaggctgaggcaggaagatcacttgagcccaggagctggagaccagcctgggcaaaatgacaaaagcccatctctacaagaaatataagaattagctgggtgtgatggtgcacacctgtagtcccagttacttaggaggctgaggtgggaggatctcttgagcctgggaggcagaggttgcagtgagccgagattgcacacttgcattgcagactgggcaacagggcaagactctgtctcaaaaaaaaaaaataaataaataaaaaaaattgaaaatgtcttcagacattgcaaatgtgccctgggggaaaaactgcactctggctgacaaccattgctttaagacaaatattatttctgccacattacagaacttacctggagacacacagccagcaagatgagcatctggagcagagaggtaagcttctttggattgaaagcccaggatctttgcattaattgataatgtctccagttgatttcaaagatacatgaatagaattgtgtctagttacatgtgagggttttcttagtatttactttaatgtacatgtgaattgagcatttactatttggaaaatactacaccagggcaaaaagtgatgacaaacttaacttactcatggccactgaagaacttaaaccttgtcattggtaaatagcgaattcacaactgaggttttgaatttcatgtactgtattcaaatgcctttaaagatggaaatatacattcacatttcttaaacattatgctttggtcttgttttttaacaatgtttaaaaaacatcatgttttttaaacatttctgttcatttacgttttggcatcattgcacaaatatacaaatataaaattattacctatggtagaattctcttgtgagagaaagtgtatccattatagtacaataattggcaaatctggcccactacctgttttagtaaataatgtttcattgggtcatagctatgctcatttgtgtatgtgttgtctc

SEQ ID NO: 1881965 - DNA, 4001 bp, Homo sapiens
cggcgatcttgctccgccgtctgcgaccgccactgtcctcgcccctcctctctgcctctccacgctggactcccctgggtgccgtggctggctttcggctcttccagcagtgaacatttcaggtgaacggacccgccccaagggtcctccccacccggcatagctctcccttgtcccaagcctcgcacccacgcctcccccagcagctggacaggagcgccagcctgggagacctcccggcacctcacccagatcccacctgattcagccaggtgacccgtgagtgtacgggagcggctgtaacgcccagactctgagagcccccgagtgcgaggcctgaggttcatccacctgtctcttcgatgattatggggaccgcctgccaacacccccacacacaagcagacgcacgcaccctgggagtccacggctttcgtcgggagggtatctgtagttaagccgtcaggtagctcgccactggtccccgtgacccgacttctacagtggggtgatcttcctgtggggcaggcgtttcggggtccacgagtccgaggagccccgggagcgctagtgcccgaacgtgctggcaggctcctggcctctcccgagcgaatccatcccggtcttgacccacggtctcggctctttggaccggagcaggcatgggtgagagagggaagcgcatacctcccggccggagccgcagaccccgctcgctcctccacgcctcccagtcaaggcagtcacccctccggtctctacccaggtggccccgagcgattttctcttctctggttcaccggacagggattccgttttcgaaccttgagctaccctggagtggtcccggtataagccgcggccccacctgggacggggactcgctcagagcttttttgaggttccctccggctggagagagggcgcctgcgacaggggagtgtacggcgggacccagcgccgcctccacctgtgcccaggcctccaaagtgcgcggtgcggggaagacggaggcgggagccgtcccgagacccccagggggccagtcctgcacctgggcagcgcccccactgttcactgaggacttgggctcactttctacacttccgttaacagcaagaataaatcagtcagaaggccagcataccttagttatatattttgtctaaaataaactaaaattttgttttaggctgaaagcgaatgtgacaggtagagccgttactcccgggtcatgaatgtggccgtctgcgcttttccgtgttaactccacaggaagaaatcagaccttgcagcacggaggcggcggggacccgaaggccgagggcgcgcagccgccaagcgcagagccgcagaccagagcctcagcgcgcgcgtcggggaacgccgcaaacaaacgcatggcgggaaggggcgcggtagtgccatcgtctccccctggagagagggaaggagacacgagggcgagtccctagctggagtgggaagaccggagagaagcggaaagacgctcccggggagcgcgcagaaggaagtgagcggggtcgtggggagagggcgcgcggggcccagggaacccgtgatggaaaaggaagcccgcagtgggtctgactcttcaagagataaggaagtggtaggaaagtagccttgcgcggtgggtatcttagaggcaaaaagaaagtgactccgccaggctctggcctcccaggaaggcggaagtaggcttgcctatcttccacttttctatctttaaggaaagaataggaaaagacggaagcaggccccagcgagatttgaactcgcgaccctggtttacaagaccagtgctctaacccctgagctatggagccggctgttggtttccttttgacacaaaagcagttgacgctgtcgccggcgccgcgcagccgcagtccgctgaaccctcggccgagttctgtggctgctggacccaagctcctcccacggccgcagccatcttgcccgtgcgtccgtggcacggaacggccgttagtcccggcagagggctccgcgaagacagtgccgtcgttgggcgcgcgcgcgggcgggagctgtcggggcggggcggcaccgccgagctccgagctgtgaggaccgccccgggccttgggcggggcgggggccagggaagggcgtgcgcaggattggggagcacgttttgcgtcttgctgtgcgtgaggaagcggggatccaggtcaaggctatggaaaggtcagggaagggtgtcagtgcgcccgtcctgcagggagtccagatccgagaggttagggcgggacctggggcgagctgggcggtgggggaacagtggggtcatcaggaggtggaggcccagcgggagtgtggcgggggaggcggggaatcaggagggccaggtgtttggaggcgctggggtgggaagggtccaggcgaggttgcgggtgggtgccagccccgtctcacatttggatgaagtaggaaaaggcagcttttagggtacaccctgacatgttctgtcagggcccttaaagggcccacgggccggaggagaggggaaaaggatgagggctcagcctggcaaaggacagaaagtggtgggtgtaggaggtggaccttggtctggtggcctagcctgccctgtgctccctgcaatgccgggtgacttgggtcactgggcggccaggccagaggtgggcctctaggtgccccccattctggatgctgagggtccctgtgagggtctggcggcagaggcctgcgcttatgggtcagcagctaggactgatgggttgaataagaagggcccaagttaggccagttgttctcacagacccagaggtccctagagtttatgatgcccagagtctaggagagggaaatgcacacacatgccctcgaggacaccagcatcctgacatccaagttactgtactgccctggttagcaagaaagaacatctgttcccttctctatgcaattgttacagtaactgttgttacatttcttaagatacatagctatatatgtagtcactctgcaaacacacacactctgatagacacacgattgcactcatggacacaaaaacggaaaataaacatgcggacagctactcccagtccccagacctgaccctcatgtgacaccttcaccagacatggtactttctgggacctgtaatgtgtgttgtgatgcccagcacatttgttggatggtacaaagggaattatgatacttaatcaaaaagccatacaagccagataacattaaggcttaacggtaacaataggtgattcagttaggaaattaatgttagagatcggttttccttgtggaaatcagtggtattcaaatgcctgaattggctacccggttttagagctgctctccatgtatgagcaggacataggattcactctctggaatgcttctgtaggcaggactttgaaatgaccctgtcctcagcctggaggatgcggtattctgattgtctggtgctgtgtcaactgggcctgcctctgggatagtgttgtggctgccccacgagaaccctatatgccaggtgagcttgaagcacctcagagacagagcactgaagctccatgacacagggctattcagctatcattgcccctgtttgccagcacctctgtctaaataacttgtgtgggacagaattaggtccgagtctggtattctgttcatctagcctggtagccaggtagtgagagaagaaacctgtggcccttgtctaaatatgaggtggtcagtatttaacaacaaatcaacaatagggtatgaccagactgacttgggtctgtttgcaacacctgaaccttatgcacatgctcataaatgccctctccaaaatacacacacacacccccaagaaaggtgagatacaaatacacactcctcccacacagaaacatgcatgctcattcactctggcagaaaccctgatcacacttacgctcctgcactcagatctagggagtagaaaa

SEQ ID NO: 1881966 - DNA, 4001 bp, Homo sapiens
atatttatatatatatatttcatatataatatatattttatatataatatatattttatatataatatatattttatatataatatatattttatattttatatactatataaaatatattatatataatatattatatataatatattatatatcttatatattatatattatatataatatattttatatattatatactatattttatatattttatatattatatataatatattatatattatatattatatataatatattatatatattatatataatatataatatataatatattatatatattatatataatatattttatatataatatatatattatatattatatatatattatataatatatatattatataatatatatattatatataatatataaataaatatatatttatatattttatataatatataaaaatatatatttatatttatatatttatttatattatatataaatataaaatatatattttaatatatatatttatatatataaatatatataaattagacgggggtggtagcactcacctgtggtctcggctactctagaggctgaagcgggaggatcgctggatcccaggaagtcgaggctgcactgagccaagatgacaccactgcaccagcctaggcgacagaggaaaaaagaaaagaaaaagacatcagacttccctaagcccgtgggggacagagtgggtagagccagtagcactttggtggcaccgagcgcgcagttggtcggtcgctgcaccgttcctttcccagcgccggctgtttctcactggcaacgccacgcctttgtcagcgttatcggacgctctctggcggcaaccttctcacggccaaaaattatcttttgcaactgcacagacatttgctacgggcagctgatcgctgggtcccagcgccgctggtttcacaatttcgcgggtgccccccaccatccccagcccgcagcataatcggtgaagggagcctgcggtttctccgccgcgccttcgcccgttgcgtcctgcgaagccagtggaatcggtggtcacaaggttggtttcaccaagtcgggcgtttcttggcactggcaccgctctgcgcttttgctggcccaggccggtctcagcaccgttaggtgctctctaaaggcgactgtctgtcgtggttaggaaagctgctatgggacgacagttttttagaagtttctagtctagcccagctggcggtttctggatcgcagaaccactgattgcgcggagctggatgtacttctgtggccgcgcatgtttctctgtggtatccctacggctgtcgtcgaaatcgcggtgtttctctggccccaccgccacgtgggcaacttcttcagtggctgcggggttctctccactgagttgctggttttgatccacgctttctcccagagagcagacgagacacttttctgtttgtgtcaactgctagtcgtgctgtgcacagtttcctcgtctcggtgcggggctttctccatccgaggccctctagtgccggcttcgcggtcgcagcacccggcgtttccgttggctctttcgccagcggcgcgaagccggcggttttgctgtcacagcacttgctgcacggagtttctcggtagccgaacttctctttttttctcagagtcgacggtttcttggtgacggcaccgctggttgcgccaaaacaaatgttgtccttgacaaccccgccggctgcattccctttcaggctcctggcaccgccatttcggcgagccgtggtctcttgttcacagctctgtgcctccatttctcggtggcggcagccctcaggccgcggatctgagagatttaaagtcgcagctgcccccgttgcgccgagtctggcgttgccggatgggtgctgcagggctgggcggggggagcccgacgctccttggagccggtgacaggggagctgcaggggcacagtctcttcccagcgccgccgcacgggttccggctcggcctccagaacgcagtcctgtggcggcgccgccggcgtctctgtcgcaggaccccacggtttcgcgcgtcgttggcttcttagtcctagcaagtttcgatttcgcggtgcctgggatttccaccctctgtccaagtaggggaatagccaaaatgtattttctcagcccaagcaagtcctgacttaagacaaacaccggtctagccctggctgcgatatctaggccgtaggaactcacccgtttccccatgcgaaggcgaagttaccctgtgactcgttggtcagcagctccgggtttccagtggcctcggatttctaatcataacaaccatggggtcagcctagcctcaagtttcttagtcctagcaagttccggtttcctactggtaagacttgctttagctgcgcaggaaatgtttaactcctgtggaaatctgggtaccagcgaatgctttttttttttttttaaaggtttagcgatgaccagtttagcagtgttgggagctcttataccaagtttggtttcgcaatatcgagtcctgtcttagctatgcttgtgtgtttttaaaactcccgtggaagtcaggaaatgccggcgatcgcgatgtctcagttttaccaagctccctttgacaatagcaagtcctgcccatcgagactttttcctcttgtagaccaaatcgggatgtaccagctactacgattttttagacgtagctaaacacgtttaaccgtggatatttttgttttttttctcgtaggaaattatgacaggagcaacctgcaggggtttagatctgacagaaatattctaatggtaggcattgcatcgcttagccatatttgtaatttcttctttgtagggttggttctctgtaacttttgcttaccttaaaattatttttgtgtcttgctctgaggacaatgttaccgatgtgtttttcatttttacttgcatttcagactttcattattttaaattatgtattttttttttcttctaattttgagcgtctcagattcgtgcttcttgactttcattctctcaggagccggggagccgagctcggtcttagcctcgctggtatcaggttccgggttctgtctggaggctccgcttcctatgcagagctggcggttttgtatcagcacgtttgccagtggcgcccactgggcgttttctcagttgctgcacccaacgtgacatttcccgttcgcggggtccttaggttctcagtgctgtcactttttcgctcctacaaccgctagtatctcctaggaacttcctgaaccccgttttgccgtgcagaacggtgattgcaccgagccgctgttcgcactagtaattgtgtggtaccattagccggcgctttttctgtcacaacccattaaaacgggttaaaacatattaaacctatcaaacacattgaacggattaaaacacattaaatgccgcaacacatttttctggtacaacacattgaaacagagttggttcattcctccaaacaggttgtttaggtgtggaagcaccgctcttagttctaagagcatgctgtttctctttagcagcaccctttacggcgccaaaacggatatttgtttggcaataccagcgctatccgctaggtgccggcgcttgctaagttcaacgcgccagtttctcgtttgcaaggtggttagggcagagccctagcagacagttttccggtggcagcaacgctcatttcccggaaacgggtggttcttggcccttgcgcgctcttgaatacctgcgttctgtagcgctagttctcttcaagatttgcttagtgtcatttcatttcggtttcttttctcgccatgtttttctgtcggaattacggttcgttttggttctatgtactctctaaaatgttatcgtttttcatttgtctactaattttcgtgcatttgttactactgagtttcttaatatctgactggcctccgcccacggg

SEQ ID NO: 1881967 - DNA, 4001 bp, Homo sapiens
cactgaagaaggaagctggacgagaatgagggaaaatggacaacacttgggaggaaaggaagcaagtgggaaggacaaagttaaacaggtagtgagagaagaggctataggaatgaggaggaactaggaggaaagaagtattttttcccttccaccttttttctctctctactcttttccttcatgatctcagtcactattaggccttcaatactcctttctgtttgcatgattgccaaatatctccattcttgccttttctccaactactgagctggccacatccatctacatttcctattaacactgtaaatccaacaggtccaacctgaattcagcatctccttcatctcaagcctgctgctacttttatatgcacttctcttatacttatcaaacatccatctaaaccattctctctccccatattctttcaatcgttccttcatccaacaaatatttattgtgcatctattatgtccgatacattcagccacagccctagatatatccattcactcatgaagtcgggtcatttctatcttggaaatctcttctctcactacctcatgagctgcctaactcaactaaatttgtctctaagacgtcctgagaaaccctcttgcttgaaaaataatatatattaactagttttgcatgctattcattctatagtgatcatctagcacttggcactgtacctcgggcacagaaggggttcccaatggaggtttagggactgtaaaccagctagaaagggaacaggggcagcagaagctaggaaacgtcttgaacgagtatttgcataggaagcatggtaaactgtatgatctatacacataacatcagcttgataatccttgtgtttccgggggatggctctgggaggctggggagatcgttggaagccttctgagagaaagctccacctcccaccgcttgagtaggtcctcaacaaccacctgatgatgtatcaccttctgaggggaccatggatattgtgttcgccgttgtatccccggcccctacaacatctggcccatagtagggattcaataaacatcgatgcaggattctcgaaaggcagataattcaccacctcatgaacgacaaagacgaaggggttctgagggaaacagaaatagcgcgcgaggtttccttccctattccttcagggcttggtacagggtaagtgctgaggaaataaatcgccctcctgtacaactccaaaatcgggcccctcgctctgcagtcaggccctggagcgcggccaccatctggcccaggcccgcgcttccctccctcccagcctgggctcctgttacctccctgcacacatctgtgtccaccacaggccgaagaattacgcgctcccgctttcctgcatcggcccggccagtacacccgagcccccacgtcccgccgaggctccgaggacgcccgcggccccggcctgagaccccagcccctgcagcaggcgcgccaggagctcgtccatgtgctcggccgctttccagccgcagtcctctcgggcttcagcgctgagcctgggaggcccggcctccccggtccctgccctggcccctgccccggcccgccgcgctccccggggcccgagaggcccggaaggaggcaaggcgggaagtggctgcagctgtgaggcgccaggggcgggaagcgggcggcgggcccagccgagggtcgcgaagacgcgcgcccccaaacgaggcgacgctcactcaccacggtccggcggggcagcgcgccggaggttcgcgacagggcccggcgcagcctccgcgaccggcccgggcgggcgcccccggagctctcagagccgctgtcgtccgagatcacgatgtaatcctccatggctgcgggccccgaccgaagacccaggcagtggcggcggcggcgacgacttcggttcctgcttctgaggtggcggcggcgggggcggcggcagcggcggcggctacaacccgggccaccgccccgccggccccgccccgagccccgccccgccgggccgccaagccccgcccaccggcggcgggcggctgaggtcagggccagggtcgctgtgcttcgtggcggcgcgggtcctccgtttcccaggaggaagaaaaaaagaaaaatggagtcgcagccggcttcggcaggtgttggggccaggcgtgcgagacgccgaggccgcggggacttccccacctgcttccaaccgacgaaagcgtgaagtgaggcgcgcccagtcccaccctgcccaggtgtgaagcgcctcccggactgagagggccttgactgaggggcagggagagaggtcctggcccctgagtgaccgaggataggtgacctggcttctggccgagctaagggagagagagagaccccactttttggtgcacacgcccatgtgtatctgtaggataaatgcctaaaagcggacttattggggcaaaggccatgtttttgtagttttgataaatgatgccaaattaccctcctaaattgtaccagttttgcgatttcaccaacaatatgtgtctctcaggagtttaaactgagatttagagcaggggtgtccaatcttttggcttccccaggaagaagaattgtgttgggccatacataaaatacactaatgatagctgatgacctaaaggaaaagagttgcgaaaaaaaaaaactcttaatgttaaacagggagttaaacaagtttgacgtagacagttgttcagttggtatcaggatcagaagctgaaaaggtgcacaaaagaagccatgaagtagcagaggccatgaataattagatgttgtgaataagcagaagttataaaggtgaaaaaggttgtccccagtagaggaatcggtgggtagttggctggttggttggttgtagggcaggaccattaaaatcaagataggacctattggtacactaaatgtggggtattgacaaaatcctgctgctcaggctccagaagttttgcaaaatatgttaacagatccaaagaataatgtgtttaataggaggggaatttgttcctaaaggaatggttatcaggtgctctccaagcactgtctaatgcagtgtttttcacactttggtgagcatcagaatcccctagagtgtttgttaagacagactgcggccgggtgcggcggctcacgcctgtaatctcagcactctgggaggccgaggcgggtggatcacttgaggtcaggagttcgagaccagcctggcccacctcgtctctactaaaaatacaaaaattagctgggcatggtggcaggcgcctgtaatcccagctatttgggaagctgaggcaggagaattgcttgaacccgggaggcggaggttgcagtgagccgagatcgtgccattgcactccagcctgggggacagagcaaggctccatctcaaaaaaacaaaaacaaaaaacccaacaaaacacagattgctgggttgctggtatggtttggatctgtgtccccacccaagtctcctgttgaattgtaatccccaatattagaggtggggactggtgggaggtgattggatcatgggggtggtttcttatgaatggtttagtaccatccctttggtactgtccttgtgatagcgagttctcttgagatctggttgtttaaaagtgtgtggcacctcccacctcgcccctttccccatgtgatgtccactcccctttcgccttccgtcttgatagtaaggttcctgagacctccccagaagcagatgctcctatgcttcctgtactgcttgctgaaccgtgagccaattaaaccccttttctttataaattactcagtctcaggcatttctttatagcaattcgagaatgaactaacaatcacacatcagattttctgattgagaaaaagaattttgggggtgggcccctgaaatttgcatttctaacaagtgcccaggtgatgtggatgctgctagtctggggaccacactgtgagaactactggtctgg

SEQ ID NO: 1881968 - DNA, 4001 bp, Homo sapiens
gatcctttcaatagttgattttgatcatttatagtctgattgttgttgtacctgtgtaagagtggttggtgtgcagaccagccaaggagcaatgataagtctgcgcatctgtcagcgtgtgtaagttagagcatggggcttcttgtcactgcctgactttcaagtacatcccagttttaagtggctgttttctaaagaaactcttgtcctttcattgtgggcccaagaaaacatttgaattcatattcaaaaacactgtacttcagtaagggaaacacatgagaaacgtatgggaagtagatactttaaatagacctgcacagagaaaacatcctccccggtggcaatgtgatcagagagaccccatccctcctgcgctctactccctgccccagctctcatctcctgggctttgtgtaaatggttagctggctccagaggtttcagtccttcctaggcctttctcattgtgtgtcctagtagtcatgggagaacccacaatgtatcccatgtatcagaaacgtgattcttctgggctgtggaatcaactagaccttgctcagtcttgactctgacattcataaatggtgggagaagggagggagttggacaagttatacactcctctttatccgtttcctcacttacaaagtagaaatgatgcctacattatggggctgttatgggatttgaatagaataatgtacagtgagagcctggcccacagtaaacattcagtaactgtgtctcaggatgagtcaggatggagacgggagcagtgcttcagagacaggctcaagaccctgtcctctggggctaggctggtgtgtgaggtggatactcctgatctctggtgggactgacccctaggccattcttcacctggtcacccaagtgctcctctcagaatataaacttgatcaggccactgccgtcctaaaaatgctggtgatactgacctcaagttcagcctccaaatagcctgcaacataggcctggcaggaccttctcttggctcacacctcctgttctttgggcctctcaccagggtcctttcaccactttgctctagtcatgaaggaaacattgggtgagcagtgctctttgagcttggttgttagagcagtcatgcttccgtcctaccttgctggcattcagccatattttctccatctcctttgcaagatctcatgggaggttttctgaaatttagccacagtgtcaactggattcccctgctccactgcctatctgaaacaggaaagaggttagtcttgtgggaccagttttgcttgcatacctgtagacttgctgtattttttcttttagttttatttttaattgacacataataattctacacatttatgggctagaatgtgatgtttcaatatatctatgtattgtgtaatgaacaaatcaaggtaattatcatatccatcatctcaaacatcattgtttttttgtggtgagaacattcaaaatcctctcttctatgttgaaatatacaatacgttattaactgtagtccccctactgtgcaatagaacactagaacttactcctcctatgtaactctaaccttttacctattgaccaacctctccccatcctttgatgtatttggttctccatcccctcacctgtaaaatgctgggcttcatcaggtgatctcctggattcttttcctgcacaccagcagctgggggtttgcatgttccccagtgaggagctggctcattgatgctgctaggtccaagtgaaatgctgcacccacagctccaactttatcagagagccaagggaggcctttgcagagagagactgggtggagatcactgtaaaggggtggcaggccagtcagtgtgggccaagtcagtcggggagggagcaagaagagcagtcttgatctctgggatgttctctgccctcctccccagccctggctgccctcacaagaaccaaactgtgtatctcaatcctagaatgcgaggaatgtgctgcaggctgataggcatgaagcgatctgctgagaggcagggaggagccctgttccccaggcctgacagtgcaggagctgtgggcctgcaggctgggctgggctgcccctcccaccctccctgggcctcctgctgtagccgggatatcaaaggctgcattgtgcattgagcaggcctcggtccctcgtgtgccagggaggaggcgggaggagggacaccgttgggaggctgtcccttgcagcactcttctggcctgtgttcccaagggcctcggccagggtaggatggtacacacatgggtggctgcttctgcatccccagggagcggagtctgacccggggcccaggtgagtttcccagggggcccttggcctgtggcttggccaaagtggatggtccagtagaggctcagggacctgctgggttggagaaacttttctcccaaagatggggagatgattgtgctttctggctgcctctccttcctccctgggtaagtgtttgtcatgctggctctgtaaaaagggagcaaagcctggaagcatctattttttcctgaagaaagagcctttgagtttactctgtcaggagctgagcagcactgctcctggctgccactcccagggtgtgactaagcccttccttcctttcttcccgagatccccccaggacaggaagaaagttcaggcagtgagttcctctgtggcctatgggtggccataaacttggccttagtcattcaagcctatttttgtcagggttgctgttactggagaaaaacaggcagtttcctgcctccacctattacagagtgatttgtgtgtgagtgcatgtgtgagtgtgtgcatcaagttgaggcaatggagagttgttgctctaagaaattgtcaactcatgggagagtgacttagggtgaccagccattatggtttgcctgggactgaggaatttgctgggatatgtcagttccaggccaaccaggctggttggtctccctgaagcaaccttcttgctttttttcagaggagaatcaaggtagggccctgtgttctcttgtgtggtgtttatcaggatgagtggtggctttggggaaatgtggggttagattggtggggggaggcttgcttgggagataggggaacattgctccaaggaatcattcctaacccttgttagaactctgtgtcttcctggagctccaccatggttcctgagagaaggagctaaggagcatcccctagctgagggctttctactctctgacagacaactttcttctttagtcttatgacttgggcttgtagaaggcacttgaggtcattaaagtgaacccaaaacaaccatattctgcttcctctgcttgaagtcttgatctaggcaccttggcacctacagcagggagtgtccccccaaatgatgcccttggcacaaaaggcacgactttagctatgaacaatttcgcttctccagatttctcagatgtaaacacttttcagtccctccccctaagtcctattgtcattgtgccccatgagagtagaaacagcatggagggagacgtgcaggaccactggtcggagatcggggttctagatctgacttcctctagctctagttatgcagttgtcatcttggctactcacttggtctttgaggccaaagtgtctggattttatcttggttcttttacttgcctcgacaacttatttaacttctctgtgtttcagtttccttatctgtagcttttatgacatgattatgtcttcttcatagagctgtggtggagattaagtctacatgtgaaatggtgaaacagtctggtgcacagttagttgagcacaataaaattcaccattgttaattccattttgatgaccccagtataactcgcgctctccctgggcctccatttaatcatatatacaattttagggttgtaaactgctgtgtagaggtgcctcagagagctctgctcatgttccctcattcctacctagagcg

SEQ ID NO: 1881969 - DNA, 4001 bp, Homo sapiens
ctcaatgaaaatatgaaaagattcacctcattaggaattagaaaataaaaaaatgaaagcaaggcaatattattgacctatatttacttgaatttatcaacaaaataactggtgaaactgataggattataaatcatcagattattgtttatttgtaaaagatagttgctcctaaaatattttctaaaataaagaagattatgaaaaatattaagaaacctgaattgatattttgtaactatatgttcccactttggacagtttccatttttttttaatattctgatgtcatttacattttattttataatcatatcccataattgatatcttagttttacgtttgaatgggttaaaatctcaatgccagtttttttagtttttcatttttcccatattaatacctttattgctgagttatttactttgattactcttgattgagtggactttttgcccaagaaagatttttaagaagggttcttgggtattgtgttttttgagtttttgctgatttaggagaatcctgccccaccagtttggctgtaatattatgggatcatgcttttgttctcagccttttttacacactgcacattgccatcagatgccactgaggagtctaaggccactattgtcattcccttgtttttatgcctgggtgtgaatatagtctttatcctttatgtttagcaactttaccaggatacacattggtattcattgctccttgtcaatttttcctaccaaggactctccagcctcacttctcatcacctcctttgctggaggcacacctgccttgccaactacttgcccttctgtgaacttattatgcttcttcatatccctgtggcttgtcagaggcaagtgaaatttcttcgtgctctactcccactcttgtcatttactgccaccattctagcagatttaccttctcagcatcttctcactccccaggtgacacaaccactttccccttccacccttgaaatgtaacacagatccttagtattacagggaattatcattcatatttaaaactctcctacccaggactgtgagctccaaggaaagggacgtgtaacttacatccacttaacgacgcaagcaatttaaagccaagagttcttgttggcaagaattgggaaagttggacggacagtatacaattaccgagcagccaataaacaggaaaagtcatacagttcgaatgttctgaccaggcggatattctgtctttaagaaacactaatcatatacctgggaaagaaaaaaatcttgggccccttcaaactgggaattactcagggcaaatctgcctcctattctatccaagtcacctcttttgctgacaaagaatagatgcatattctgattgcctcctttagaaagacttatcagaaactcaaaagaatgctactgtctattacctacctggaagcccccagttggggggggcggggcttgcttttaacggtctccgcctttctggaaggaactaatgtactttttacatattgattgatgtctcctgtctccccaaaatgtataaaaccaagctgtgccctgaccaccttgggcacatgtcctcaggacttcctgaggctgtgtcacgggcatgtcctcaacgttggcaaaataaactttctaagttaactgagacctgtctcaaattttcgaggttcacataccgtaggtaaaagtgtcagaagcctaaaggtgagccagtggaaaagcctgaagacccctgcaaggttattagctaagcctccataacgcaggcggcaagtgtccaggagtctggcgtctgctcgcctgcaccacgacctccctcctggggagaaggacatgcatggtaagccatttctccatttccatactgattgcttcctctcaccaccacggcccatctgcgaagcaaaactaatcctggcgtggaacaggccgcctgagggaaacagctagagcccggcgcggggcggagctggttgtgcgcatgctccgtgcaggcgcaggcgggggctgagcgccgtcgggttacgcctgcgctccgggtgagcccgcgcctgcgcctttgcggccgtgattcggtcccgctgtcctaggcgggatggtgccgctgtgccaggtaagggtggcgggtgtgcgtgcgggcctgggtgcggagccctcctcgacgtgtctctcccgccctttccctccacatacccagccttggtcagtcggacctccccactagcccccaacctggccggcgtcttgggttcgggggcgcccccgcccccgcccccgggcccttcctgtctccgggctttactgcgactgccccagcagaagtcgggtcctctccgagaactcttgtcagctcacggcagcaaggacggactcgttctgaaggcgcctccaccttttatgaccacctctttcccagattattcgttttgatgaagctaaaattttaatctaaaaagaaatgcacctcatggagaattcttgtgaagaactgtgcttcatctgtggatttctacacccttgatcatttgcaaacctgtaattatttcgtaaagagttgtttgcacggagtgacaggtgcctattttacttcgtcggatcccttacataccaggctgctggcacaagtttgttctagcaaattccagtctgtcgtgtgtttcaaacctacttgcttctgtaaatgtcagatttactatgttgcataacttaatccttagcgtctggggacgatgttatacagaccggaatctaaggtcatttgacaaccgtgagaaacaggtttttcgcttatttattcatttattttatttgtgtaactcatctcttgactcaaacatttgttctttgcttacatatttataaaaggtgctatacttttatgtcaattaaggcaggcttaacatgttttcctagaagataaatacttaggattttaatgatggcacacttaagtttgtaaaactaaaaggcatccagaaattagtctgaattgtatttaaaacaacaagttttcagaatttgaacttgtaggtatactgaaattttttacgggttatttaattttctttataaaatttgtctttgattaaagcaatacatttggaaaatgagaaaactgctcaacattgacagtcagaaaacgagtatgagttgttattaaaagcattttctttactttcaggttgaagtattgtattttgcaaaaagtgctgaaataacaggagttcgttcagagaccatttctgtgcctcaagaaataaaagcgttgcagctgtggaaggagatagaaactcgacatcctgggtagttaaaaatttgtagaatgcatatgagtaacacttagatattttcaaaatacataaatgataaaagtaaaaaggttaatttcgatttccgtgcttaatgtcaaaaagaatcgttagttgtattttttttggaacacctgaaaaactctaaatgtgcaccgtattttaagaaaggttaaagatattttaccccaaaacacagtgaaccgcagagggacatgattatattctctttgataatttacaaaacactgcacatgtcacttctgcaattttataacattaaatgaaattgttacaaattctgttaaaaatgtgtgctttaaacattttgttctgcccctctctttagagagctcaacatagaaatttctaagattgaaagaaaaatgagttacaacaaatcctagatgctgctgaatttgagtttttgtaatatttaattttttttctggttcttgaaaaacctataattttacttatgtcattcccacttcaagttctttttggaacaaaatataaaagtgacttatttgagggtgattcaggaatattaatggtgttacttagcttgtataggtgtttaacctggaagtcctagttctgtgtaaaagatactccataataagtgtttaaaagcaaaccacttcatgatttcgtatcttttaagttgctctt

SEQ ID NO: 1881970 - DNA, 4001 bp, Homo sapiens
gtaagactcaaaacctggcaggtttcttttacagtgatttattgctttgatttttaaaaattgcacaaataaaatagaccattcagaattaaacgtggaagtcctccttttaatgtccccattcacctgcctcgcatgtgtgtcatggatcttcctagatctacttctacgcacgtgagtgcgtgtgtgtgtgtgtgagtgtgtctgtgtgagtgtgtgtgtatgtgtgtgtaatatgggtttgttggttaaattctttacacaaatcccatcagaatatgtatgtagataatttctagaaatttcttttttcatctaatagattttgaggaggatcactctgtgacataggcaatattaatttcatttactcttcacaatgaccctatgaggtaggggctagtgttatcgtccgttatacagatggagaaactgtgacacagaaaggctaagtgagttgcacaagatcacacagcaagtaagtggcaaagctgggattgaaacctaggctatctggctttggagcacgaatgcttaatcactcttctgcaatacttggctttaaccactgcatcacagtctagcctagagatggaccatagtatatttataaccactgcccttttgatccatatgcaggctgtgtccagggttccactagtataaaaaaggatgcagagaagagctttgtgcagcagccagaggggttcttgcagggtagtggcccagctgtggagtatgcacaggttacattccaataaatactgttagattttattcccaagaggttgaaactttcccattcccagcagttgtgttagtgtgcccatcccccttggtgccatcgagggcatgcaggcagaaggaacagcctgtggagaggggcgtggatatggtttggggaatggcaagaagtccagtgaggctgaaggttgggttgtagttgctggttgcgaatgtaatctattttatgctctgcaaatttgatacacgataccacgatatttcattgtagtttttgtttgcatttccccaattaccaggaagcaatatcatctttttgtgtgtttatgagccatttgtgttttttcttctgtaaactttatgttcatatttttacactttcccaatgggatgtttatcttcttggtttgtaggtgctctagtattatgggatgttagtcttttgtcagttacatttgcacgaatattatctcatggcgtgttgctcttacaaactcaagtttttagatagtaacctggattgtcaaatgcgacaagacggtttctcagtcacagctgtggaatgtgtaacgagacaacctctctgaagggcagcttggtaatagataccaaatgtgctttaaatcgtgtacacttgctgatgctggtattctatatccatcctaaggaaagatcagggataaagacagcaagttagctctgaagatggtcattccagttttgttaatgatgtaacaatttgagaacctttacatgtccagtaatagcgcattggaaaaatcaattacatcttaatcactggcaggaatataatgttaccatgaaaaaagatgcaataaaactgtgtttttgactgtactagtaaatgaaaaaattgatagcatgaaagattttgtccagtattattccatttttgtaaaaatgtttaaagttcaggctgataagatataccccaaaatgttgataatgatttttctctgcatggagctattatggggtaatctttactgtcttatttttgctactctaaattttttttaaatttctacaaataatattaattacttttataataaatatatatttttaaaattatacatacatatatatatacacacacgtatgcatatatttatacctaattttttcttttgactattggtggtagacagctcccagatgatccacaggccctcagtgaaacttacctcctgttattcatgcttttgtgtcctcttttctcaaactgaatcagagctggtcagtgttaccagtagaatactgcagaagtgatggtgtgtcacatccaaggctaagtcataagggcattgtgacttcaacctttgctcttggatcacttgccctggggaagcagctaccatgttgtgaggctgctcaagtagccttgtggagaggtccacctggagagaaaacaaggcctttgccgcagccggcaccaacttgccaaccatctgagtcagccaccttggaagtggatcctccagcctcattccagccttcagatgaccactgtcccagctcatatctagactgcaacctcatgagagacctggagccagaacacccagctaagctgttcctgaattcccgactcacagagactgtgaaagataatatatgtttgtgtctgttttaagtcactaagttttggctgttgcctaacagtagatagctgatataaagcttagtaccagaagtggggtgctgatggaacataaacctaccaatgtgggagcgtctttggaactgagcagagggcagaagctgaaaggactttgaagaaagtgtcagagaaagcctaaagggcactggagaagccagtagtgggaggagaatgttggtgagggtttataggaaagtgagaacaatgcattagagactggaagaaaggtgattcttgttatggagaggcagaaattaagcaacactgcaacaagatggaaagctcataaattgaatgatctagctaaggagacttttaggcaagcccagatattgggctcttccactaagagtatcttgctacaaatataaaagaaccagaaaatgcagccctgcccttggccttggcctctgggcgccatctcactcagtagcatgaactgtgcccactggcctccttgcaagtgactgatgcagaaggtggagagttgtcatgcttgctggttcccaggatggttctcagaaagcttggaactgaggtggaatcatgttcgtgttcctcccagagtatagagcagttagactctcggtacatttctggagagagatgggggtgaagagtgctcaagggaagaattgaatcaatgctcccagcactccaccctgcccatgggaagtcaggttgcacagaggctaacctgaaaactcagtcacaatgctccctggatctgatcatatttagggtatactttggggtgcctgggcccctcagcaggtgggtctggacagaggctgcacactgcaggttcctcccatgtttttcttcctaaggatggaaccactcacatgcatgatactcacacacatgacactcacacgcatgccgtctctccttgggatacctgacggtctgagctttaaagtaatttacctttatttacctgtaatgaacattcgtcccgctttcttcttgtccagtgcttcaaacatcttttctttggggagctcctgcctcctcagtccctgactgtctagaggagccagaaactctatttctcagacaggagggtgcaggcatgtgaccaaactcaccatacagatgtacctgcaccagactcagattcagagccaggggctccaggacgaagcaaggtcccatgggctccaccctggcggggaggcgacattggaagcccctttgcagttgccctactcagggcaggctgccgtgttgtttcctggagctgctctgcagtaggtggcacgtttgggccatattctagagcccagttcccaggtcattcaaaagatgctggggcccccaagtagccagtgataaatcccatttctgcttaaactcaatacaagtggtttctgttgtttgcaaccaagcctgcctgaggccttctactggcgctgcacctttgcaagggagacatttggtgtgatatataacagcaactttgggacgaattccactctaccagacacagctgggagcagaacaatcccagatacctcttcgggtaaatggacccctaactagggaaatgcattttttaatgtgcttttta

SEQ ID NO: 1881971 - DNA, 4001 bp, Homo sapiens
taggagaaaataagtttttgtggccaaaaaaattctttaagttatttttggtttttagggggttgcctccatgtcacagcttaatcatcagacacattaaccttgcagctcagcacgccctctgtttgtcagcagaccttcctcgcccatagggtaagcaatagaaagcttataggtatcagtttattttgcctgggatcagggtctggattgtgaagtgggacatgttgataaacctcttctccaaaattaggtcaatgggcatttggctcatattaccagaatgctggctggccatgtacagcctgtctccgagagaggctctaatgtggcccccacattagaacaacctgccaatgaccacattagaacctccattgttaaaatgcaggttcctgagccccatcccagatctgaatcacaatctccaagcatcagccccaagaacctgaattttgttgttacatgcagataaagtacgagaaccacttcctccatgggtgaactgaacttaccaaaatagtcagtcccgaggggcagagatggcgtaggtgccagttcttctttctcatcctagatgctcagagtcaaattcttggctcagcaatagacaagtgatttcactgtgggaagacaattcagagccctgttccaggctcctcacattgattctctctgtcttcttccactcctctttgtcatctttgatgtccccttgtgagctacgaaaagactttctgggacacgacaggataaaaaaataaataagtgcaagcagccattcattaaacgtttagccaggatgctgctttaactgcatcccatcatatctcattaatcttcacaccagtcctgagatcaggtactattattaacccgattttacagatgtgaggaactgaggcttaacgaaggtaagtaacttgcaggtgcgggtatccagctctctaactccagagcccatgctcttaaaaccctattacttgtccctggtggaggtgaacactgggggccctttcatataggactagccctcgggctgcaatctgagcggaaaagggaggatgagggcatacttcgaagcttcttttgcataactggcgctggatttttactgagactttacgttacagttttttttttttaattttcaaggtgcttttacgaacacatgaataaaatatttgtgtcattttgaaccttacttgtcttattttatgcatgtatttatttatgggggggcacaaggactcatctgtggtggtgcagccactgtaaataaattagtgaaactacttcacgtcaatttctgttcagtacactttagtgatggatcggaggaaattaatacatgtttacaaaaagcccctcccccagttgttacatatgcctcagagataccagttgtgaaaagtgcaggtgcacttacacacatacgcacacacaccccacaaatggtatcatacgaaaaaacatacctgcaatctgctttgtccacttaattgtatatcttggatacagaacttgtttcactggaaggctaaaaggcaaagtctggggaggcctagaggacacaggggatgggaggaggcgctctgagctggatgtaaggtctccacccacggccagagcacaaggtcggataaccagtgggcctgccggcttggctgcctgggccctcccctgccgagacaaacggctggagggaggaagtgtgcggctgggaagctccgctgctctggcccgggtttcccatttcccccttcccgcgctgagacggcgaggaaagttagcccggaaatctgcgcccgcctaaaacccggcctggtcccagccaccgccccaggaacttcccccaccgcaggggcggaggtcgagagcagggatggagaagtggacctgcgcgggtggactccggggcgcgggtggactccggggcgcggggggactccgaggagcgggtggactgtggggcgcgggtaccgtctcgcagcgacctctgtcggcggctctggggatggcccgcatctgtctgcgtgtacctggtatacgtgcaggtacatgttcctgttcacgtgcagactgggcgggggatgggggggtccacaccggtgtacacctttgcatacctcttagcaacttgaaattccaccacgagagatatctttattccgctattcctgtgcatctgcacggagcccctagggccatagatttgtgtgcaaatgaaatgaggatgtagtctgggtgcccaagggggggtgccttgagtgtggttgtctgtatgcctccctgagggtatttcactttctgctcccatccgcccctatgagcgagtacctatgagcacaggatgtgcacatatttgagtcttattagtggtacacgcagttttatcatctccccaggtctgtgtctgtatgaaatgtgcatgggtgtgtgtgtgcacgcgtgtgttcccactcggggaatgtggggagaggtgcatggagccaagatgggtggtaaatagtatgtttctgaaattaaaggactaatgtggaggaaggcgccccagatgtactaaaccctttgcccttcatctcatcctctctgacttgggaagaaccaggattttgtttttaagcccttgggcatacagttgttccatcccgacatgaactcagcctcccgtctgaccgccccttggccttccttcttcctcgatctgtggaacccagggaatctgcctagtgctgtctccaagcaccttggccatgatgtaaacccagagaaattagcatctccatctccttccttattccccacccaaaagtcatttcctcttagttcattacctgggattttgatgtctatgttccctcctcgttattgatacacacacagagagagacaaacaaaaaaggaacttcttgaaattcccccagaaggttttgagagttgttttcaatgttgcaacaagtcagtttctagtttaagtttccatcagaaaggagtagagtatataagttccagtaccagcaacagcagcagaagaaacaacatctgtttcagggccattggactctccgtcctgcccagagcaaggtaagcacttcccaagcccctacctccctcccctccctgtgggcctgcagctgtccaggtgtagaaaccgttagtgtgctaccccagcagctggcaggagggagttggtggattcctggaagcatccctggtgagtcatctgctggaacattagtgaaaacttagtactctagggaccgatgtacagtgtccattttaaaagccacctaataataactgtatagcaagatctgtgtgtatgcatagtttgtggaaatgtttgttttatcttattttgaagtggtgtgtattgatgtataaaagtatattcctaaatgttaatgcccatcagttaaaggattgtatagagctaaagtgagtggtgcctgccttactattgaaatttttaaaaagcctttcgtgcattccttaaagtaattggattcataattataataatgttacaaatcagacttgctcccatatttgtgatggtcttggtcgtcagttgtgatatcaaccaaaatgacagctgggatccccattcttgtggattaactaactttggccccagttaaaaaatgaaaagctattattgcttcctaaagagtttttaaatctgtgagaagggggaaaaaaaggtttttttacttgcccaggtaaaattgtgtgcaacaacaatgtcattttaacaaagggattactaaaccccaggtgatgacccactttttcaaacaaggaattgcaagatactagatggaatgtgggtaacctcttagagtttagtttactggaatctgaaattgtatgatttccgtacattccttcatgctactaataagtcatggaatccctctgtgctggactctgggggtaaagtgcaaaacaagatagacatgatccatggcataagagagttcactcagtgtggcaga

SEQ ID NO: 1881972 - DNA, 4001 bp, Homo sapiens
caacactccagggaattgctatcaacaaatcagatctgccactttatctaaaacacaaaagctgtttaacatagtgatcagaagcctaggctggagctataatgactgggttcaaatctaagctctgatacttattaaactgatgacctttgaatcagaaaggaagcattttactgcaaataatagaaaccaaactaaaagtgtgttaacaataagaaaaaattgttagccccctttttataacctaagaagcatgcacacgtgtgtatacacacacatacattttatatttttaacatctctgatatgaggtatgttatgcaattgctgttgctaagcattgcctgcccttgtgcttcgaacctgcagaatggtgatggcctcttgggaacaactccagagattacagaagggcactttcttaagaaacacagcatcaccaatgttcttcatgttacagaggacaagcgtatgtggaaaaactagaacattgataactctgattggacaagtgattcaagagagtttgactcaatgtaaagcagatttaggaataccttgactaatttactttatttatgtatgtatttatttatgtatttatttatttttggagatggagtctcactctgtcatccacgctggagtgtaatggcgctatcttggctcactgcaccctctgcctcctgggttcaagcaattctcctgcctcagcctcccaagtagctggaactacaggcgcacgccaccacacccggctaatttttggtattttggtacagacgggatttcactgtgttgcccaggctggtctcaaactcctgagctcaggcaatctgcctgccttggcctcccaaagtgctagcattacaggcatgggccactgtgcccagctaaatttactttaaattagtaaatttatatttaaatttaaatgcacaggagtgatatgtggtataaaaaatctaggcataagtaaatctaaatggactttttcattagctatattcaaaaattctaaaagtatattctaaaaatatattctaaaaattctaaatgataatatagcatcatagttaatttgacagcattacaattttttttagtcagagacaatgtaatggtgcatctcacaattgatggcatcttaaatgagaagaaatgtggcatatcatattacaaggccagagaaaagacagtgctggggttggccaatttggcagcttaataacattgttaaggacaaatttctttttattcttttaggctgtcatcctccttctatcagcttgttctttgagctgactcctcttgttactggctgggaagtcttgactatgagttgttcaggttcttggcacattgagcaaagaattgaacaaaatgcacaaacaaagcaatggaagatgaaggcacagatttgttaatattaaagcgaaagtatattccatagagtgtttgtgggcttgagcaagcagctcaagagccttgagtataatgtcccctggggtttttattaactagaagaacttaataacaccctttagaggcttccagttggttaaaccctatgcgaatgaagaattggcctgtgaccaatcagaggctagagcccctatgcaaatgaaggctttgcctgtggccattcaaagggctaggtaaaggctgggctcatggccaatcagaggcatttcctatttgttgacggggaaaggagttttgctgagggaggggcctccagcccattttcacctgggcatggagaggtggggttttccttttggttcaattctaagaagagagccatgagttgctcttaagctccctgtctctagaccctattctcctaccttactctcatgattctatgaagactgctgcagttctaggtactccagacagatgacaatgtccagagacagaaagaaagtctctctcatgtatctccttttagtctgcaaggattcctagcagacttcttttcatttcttcttgtgtacaattgtgtctcatatgcataatcatgaccaatgcgaatgggattaccattgacttaagccaattatgacgtccccctgggcctagggtaggactccactcccctgcaacacacgatcctctgaacaaaactgaggttcttctagcaaggagaagacagggagaatgactatcagttagtcaatcagaagtatccaccatactccgcaaattgcttatcttttttggctttagtattttcatgtgtaaaatggcaatagtaataataataataatgacaactacctcaaagggtagtgaggattaaataatgcatgtagggctgagcacagtggctcatgcttgtaaccccagcactttgggaggcctagataggagaattgcttgaggccaggagttcaagatcagcctgggcaacaaggcaagaccttatttctaaatatatatatgtgtgtgttttatatatatatatatatatatttatatatatgtatactgcttgtatatatatactgcttatatatatataaactgcttatatatatataaactgcttatatatatataaactgcttatatatatataaactgcttatatatataaataaactgcatatatatatataaataaactgcatatatatatatatatatatatatatatatatatatatactgcttagaatagtgcctgatatatggtaagggctcaagagatgtttagcattgattgatactgttcctgttttcactgttgttatcattatattaccctatatctagataggcaaagtctcaacctgccactgaagaaaaggaaaatgagggcttaaactagccttagatattagtacagatagtcgttggtcaacagacttttttcttgagcaagtcctctatactaggtattgttcccaatgtagaaagaattcaaaacacagctctgaggagtttatgttctggttgtagaggcaactagagagttggaaaaaaaagtagagatctcttgccttctagcctcttcgtatactctttcctttgtctgaaacacaatttatcaccacctctctcctaccttagcctggtgaactcgtattcaccttattacgtcagcttaattgcttccctgaccccagattttaggtaaactgtctatgcgaatgctttcataattgccatcataatagcaatattatattgaagtgtgtcagtcttttgtcagtcttcccactttatgtctaacttccatgagggcagagactatgtctgtctgtttcatgactgtatctcctattcacagtgcctgatacaaatgtaggcaggcagggtgaacctgttgaataagggagtgaataaaggaatgtgtttcacttagaactctttctgttgtaagtgacagatataacctggtttaattaaaaaagagatttataaatctcataactgaaaagcccagaggttggtctgatttcagtcgtgatttgatttaggggactcaaatgatggcattaatattctgtcagatctgccttttccagtgtgggtttcatttccaggcttcccatggtgttcttggcacttccagagtctcatctttccaattcacctacaaaggcaaagaacatatgcctctctcccaccagttccaccaatatgtgattctcactgggtcacatgcccatcactgaaagagtcactgtgaccaaagctggacttgaggtgggatttttctccacggagtacgtgtacggtaaccttacatgttacctgagagtgcgggatgtagtgactcccagggataagtttgggatattataattagaaatggggtaaatagatgccggaccacaaaacaacagatgttcactatagaatgaatgactgaatcatacaggaccatgtgataaaatcagatgtagagaagaaagtcctgcagaatttgtggtaggatagaaaaatgcacccgcccctgcaccccccacccccggacttgttaatatatt

SEQ ID NO: 1881973 - DNA, 4001 bp, Homo sapiens
gtggcaggacctgaggctagtgatgtgtatgtctgcacagcaccagcttccacatacacttggtgtctgaattccctggccgtggtttgtaacaccaggccatgtaaaatgtccacccctagaatgtattctggaatgggagagacatacatagtatataaatggggagccaagtggccaatgctgaggtacagagatacaggtttcactttcactgaccagcctccataactgtcagtgtaagcaggtttgccgggaaacttctccaggttcccataaacaaggctgcaatctgcaccagtatccagcagtgccagcaccaactgcactttgttgggggactagtggatccctaattccatatgtagcctccagtcatctgatttccccccaagctgggtgcctctgccagttccctaatcaaacagaaaagcctctagatttctgcccagctgcagcaagtagtctttgagctgaaatgcctgggtgggacctggtcacgcagcaatatccttatcccccttgggcatattctggaattgctgcttcagagataactgtctccagaaagttaagagaacttcattgtctgcttatcgattttctcttggtcaaccctggccaaaatcaaatatacccacatatgtgagtgtgtcattcattggagcccccttttctcccatggggtgcccccagaaggcagggcatcttccccttttgtatggcgcagaccccttggtcccactggcaaccttctgcttccctgagagccaccataacagtggtcattccatgtatgcggtgccctacctctggggtgaggactgtagccagggagccaaaggcacttgggggcacagaacccaacacgagatccctcatgtgggaggtgaaacattcatcatctggcccctggtttttcaggtcaaacagcctgccacatacccatctcccagatgacttgcaccaaatcggcatacgactgccatttactcatggttttgagtatttcttcggcattgatccacactgtctgtacggctggccatagccactcaatcagggtgtggtcaccttgcccttgcgccaactgcctgctcacctgcaactgctgatggagggaggggtgagtcatgatagaggccagcttttccacctcagaggcagaacaggagatgttatctgctccctcgtcctgcaaatgaagcatccatgtggacagaggttcctctggatactggagacactgcttgcctaattcctgcaactcagttggggtataggcagtatataaagtatttcatattacagtggggggtccctgagcatgcccttgtggcctcaatggctgttcatgatctaccttctgatggaccactgggtgagcccgcaatgggggttcttcctccttcgtatcagacggagtggggggtctcgggccaacatgatgcacccaggcttgcattcacagcagcctctaattccttttccaagctctgtagctgagcctccaagcatcctgcctgctcctggagtttctcattcatggcagcttctaactctttttctgagctgtgtagctgggcctccaggtgcccaacctgtgcccagagggcccttacctgtgctttacccctcagggacttggtgtgtacttcttatagcacagtcaaaaatgccatctaactctgccagcaaaagcttgctccttctttgtgctctgtgcttccagcttcatctgagcagcatagctgccactgggtaccacaacccatgttgtggccacatggctgacccggaatctgtggggaccaaaggctcactcacctcaggatctgttcatggcgccaaatgtcaggttctaactgaggtccaaggggagtcaggcgagtggcggtagctggaaaaacacttaagcaattgtggacggtttcaacatggctttattctctctctgggcacaggagagcctgaacgtaagccatatatacagcattagcagggtaattatactttttactgacaatagtggctccaagccaagcacaagctttcatgggtgattacctaatgcacctcacatggaatggttacataatgtgtggaggggttgtgtgcccgcactccaaagctgctgagtcatgctgcaccaaaaggctgccttggcctactcctgacggaagtgcaaccatttccctcacaggtgggaatgaacaattgaaaaaaataatacaatttactatattaaggctctgtggtagcaggaaaataacaaaagacctggagacctgcatggctagagctgagagagctggtagaggcataatgagagaggggattggggtggcaggtggcggccaacccgggtgagcaaatctgaccttgatactgtgagcagtgggaaaccactgacctttacccatctaatgtctctctttagtggttaactgaatacttttaatgtttttctggtctctgaagtgatacctgttcattataaaaaatttcaaaatgacagatgaataaaaagaaaaaaatacaaattacctttaattttacaactcaaagaaccatcattggtttaaattttggtgaatacatctctaaatgtttttcatgcaaatattttaaaaagcaaaattggatcaccttcatccattgttatgagtattttttaccttattaaacattctctctatgataatttagtcaccatatggatgcaccacaatttaactgatttcctactattggacatctgggtttttgtaatttctccattttaaaaaaattccacaatgaagttccatatatttagcaacattgatgcaacttttaagaaggggcatttttatcttagagggtatgacagattttaggccatagatatatgttgcccattctcactaaaaaagagttgtagccgatcacacacaacctcagagcatgatttgccagctctgattataattatttcatattgcaaatttgatcagtggacaatattgtcttatttttactttgcatttgtttcctaattaaaaatagaacttttaaaaaaacagttcgccatggtttcatcagggaaagactcatctgattcaaaatctgggcctttggatttgctgcctagaatgcactcctgatttctcttcaacaaattatagctactttgtcccttatgactcattgcaatattttcttcggctttctacaagactctttctcttattttctctgtcccaattgtctcctcactgtagaagctgctagtgaagatacaggtagtgggttccgcaatgtggtgagatgacatgactcacatgcacattgtcttcatacggagagggtgctctcctgtgatttaactttgtgaccttctacagtgtctcaccctgtgttctgcacatgttatggtccataaatatttgtgagtgaatgataagaaaagtcaccatggcacaaaagagtggataatttttgacttgatggatgactcaactgtggagccttgtatacagatatattaataaaatattgcagaccaaagtcatcacgaatgccgctcaagatctctttttagattgtgcacctatcaccaatatatttggataatttcaactttatggattcgggggtacacgtgcagatttgttacatggctactttgcatgatgctgaggtttggggtatgaatgatcttgtcactctgagagtgagcacagtacccaatagtttttttaccccttatctcccttcctctctccccattctagtagtcccagtgtctattgttcccatctttatgtccatgcccaccatcagtttttaagctttcacactacagctcagcaacatagaacattttgatttaacagaagcccaattacgttatctctttctgatatttttatttttccctctggcttagagacaaaagcacttacatcgatttgaaatgtgacatagtttccagctaatttttattaagggtttgaggg

SEQ ID NO: 1881974 - DNA, 4001 bp, Homo sapiens
gcaaatgccccatataataaattgtccttcacttactccacccatgtgtttttgctttaactaaccatgaatagctgcttcagcaccagcctgtttatcatcctcccacgtccagcctagcaggactgaactgaaaggatctcagagtagtggactcgctggactgcaagatgctactcctgttaatcttccattactctttgatgttacgtctgtccctcagatatcacgggcaaagcatgccaagatattacagttgacacctggggtaagccagtcttttatcccctattatagctgtatagctcttaaacatagtgtgtcattgaataccatgctctactatttagccttactaaagacctgtgaggttataaaatctttattacaaatttcttattcataagtttataatttaacagtatgctattgaggcatacatgaactgagtgggtcaactaccacactgtggacatgttctagaatgttactgtgcttttggttcttcccagagggctgctgtctccccagatcctggaagcagaatccctgtagagcacataacacccccaaatttaacccagccatggctgtcatttggctggccagcaacccatgagataatttcttctaaaatttggctttcaatttctggtccagcatataaggagcttggaagtcaccactccaccttaacaacaagtcaaaagctaaacaaatggaaacatcaaaaattcttcttagatccatcatagaggtgaggtcacagggcaaacttctgccccacaaactggagagacaggcagatactaaaaatcacaacttactggagcagaaatccatgagcagaagcctctttggaaagtcacgctggggtaggaaaatctgaaccgtaattgacagttgctataaactcagcgtggacaggtctgaaagttaaaaactacagatcaatacagtgatcagtccccacctccccatacccctcaccacctttgaaaattttaatctcatggagcttaaccaggttctcacggtggctatcggagaaaaaatcactcgtgtcttcagcaggtagaagggaaaagtaaccattttgaaatatatcagataattcttttttaaaaaaaaatgtgtgagtatgtagtaagtgtatatatttctggtgtacatgagatgttttgatacaggcatgcaatgtgaaataagcacatcatgaataatgggtcatccgtcccctcaagcatttatcctttgagttacaaacaatccaagtacactcaggttattttaaaatgtacagttgagttactattgactatagccaccttgttctgctatcaaacagtaggtattattcatccatttttttgtacacattaaccatccccacctctataagtaagtgaaaaaacctacaagtaagtgagaacatgtgatgtttgtctttctgtgcctagcttatttcatttaacataataatctccagtttcatccatgttgtcctttattttttccaataggtttttggggaacaggtggtgcttggttacatggataagttttccgtggtgatttctgagattctggtgcagccatcacctaagcagtgtacactgtacccaatgtgtagtcttttatcccaaccctcacccaccctttcccccaagtccccaaagtccattgtatcatttttatacctttgtgttctcatagcttagctcctactgatgagtgagaacagatgatgtttggttttccatttccgagttacttcacttagaatactggtctagccacccaacagacctaccaggctctgggctggtactggagaatgtctgcaaggagtcctgtgatgtgatccatcttcaggtctctcagctgtggataccagcacctgctctggtggaggggagttaagtggactctgcaagggtcattggttatatttttgttaagtgtgctggttttgtgttgtttggcctccagccagactctccttgggtgaggcttgctgcagctgccatgacagatgggagtatggttcctaggccaacagagttgtgttcccaaggggattatggctgcctctgttgtgtcacacaagttgccagggaagtggaggaaagccaggaaccacaggcctcactcagttcctgtgcagcccagagctagagagaccagtctcactctcaccatgctccacaaacagcactgagtttacttccaggcagcaagtgagcaggcctgagaacctgccccaggctacaagcctcccagctgataaagcaagcagactcacagttcctcagctgtcccacagaacctgcaatggcaatccacctccttcaaagggtctgtggattcttttggcttttctggtacattcttgcagtagttcctggagcaaaagttcattatgtgggtctccacatcctgctctgtccatctgagtggtaactgcaagttagtcctgcctcctagccaccactttcccccagaaaatatccctgttgctctttttaacaagctctgactgcaagataaagtattttaccaaagcctgatcttctggggatgtatcagagcctaattgacctgatggaaggaaaatacccccaatcaagctagctctagccttacatataggagaaaggacacccaaatccagcccccgacatccatcctgtctcatctaaggcttgagacctacccataggactatgaaacactgtcctacatcttaccacccaccacacactaaaggcctatttacaagacttccttttgcccagtacatcacatccacatttcaccaaacatgacaaggcacactaaacggcaaaaaatacagtctgaagagacagagtaagcattgaaaacagacccagatatggcagggatgttgaaactattagaccatgaatttaaaaagactataattaacatgcttaaagccctaatagcaaaagtagatagcatgtaagaacagataaataatgtaagcagatatctagaaattccaagaaagaataaaaaagaacactagagaacaaaaacactgtaacagaaaggaaaaatgcctttgatggctcattagtagaccgaatacagctgaggagaaaaatcactgagcttgactacattaaaacagaaacttcaaaaactgaaaagcaaagagaaaaaagacagcaaaagaaacagaacataatatccaagaactgtggaacaactatgaaaggtgtacatgtaatggtaataacaaaaggagaagaaatagagaacacaaaagaaaaaagtatttgaaacaataatggcttagaatttcccccaaattaatgttagacatcaaaccacaaatcttgtaagctcagggaacaccagacaggaaaaataccaaaaaattcctgcacctaagcatgtcatatgtaaatggcagaaaatcaagacacagaaatatcttgaaagaagccagaggtgcaggaaaaaccttatgtatagagaagcaaatatgaaaagttacatccaatttctcttcagaagccatataggtaagaaaagggtaaaatgaaatatttaacatgttgggagaaaaagaaatgaacctagaactttgtactctgcgaaattattcttcaaaaaatgaaagagaaatcaacactttctcagacaaacaaacattgagggaatttgctaccagtagacatgcctcaaaagaaatgttaaaagttcttcagagagaaaaaactaaagatatgtcagaaactttcatctacattaagaaaggaagagtattaaaaaagaaataaaataaaagcatgtgaaatgtattcaggagcttatagaatttactgaacctggtcagttttccacaggatgagcagtgaattgtactgcatcttaacagtatgtattaggattcttgcagtggcatgcaggaagatatattttaccagatattattcttccaagatactgagccccaggggggaggaaac

SEQ ID NO: 1881975 - DNA, 4001 bp, Homo sapiens
gctcatagaggttgaaagaaaatgtagctcagtggttttcagcctggagtgattttgcctcccaggagacatttggcgatatctggggacatttttggttgtcacaactggtgctggtgctggtggtgtgtgtggagggtggtactggctgctagtagaggccagcaatgaatgccagacatcctacagtgcataggacagccttccacaacaaagaaatatctggccccaaaaggaggtgggaaaacctgcatcctccatttagctttatagatggtgtactggtgtgagggaaataaatattcaaaagaataaaatgctttagaagcaacctcatttgtaatttgcttccctggtattttactacactaactttttatttcactttaaatggcagaaagagaaacaggaaaaaacaaacagttcccgcttttttcttacctttggtttaaatttgaacatttccagctggcatgcattaatctaatttggtgctgcctcctatgacctgtaaatgtgtacagtagggtcgtcaagtgtttccactgcaaaatcgctagtgcagttgagtaaatattgccactttgcttaattcaaatatgtacgttaaagttacgataagttaattttcctgttaagtgaaaatgcacttacctttacccagttgaatacagatgtacttgcctttgacgtctgcctccctaagtatggttacagtttgtcactccggttctggagggccaccctgtccctgaattcacgcccaggtcctgagggcagaaccatcctgaggacaacctgcagctccatcgattttttcttggctgggacgcaggcgagcatgaaagcgatccaaacacagccagagggcgccaaaatgccgcaaataaaagttccaaaggcgtcaactggcttttgcgggaaggtaaaattggcttttgtgtaatcaaagagctaccgttgtcaacgatgtcacgttacgttatttttgtatgtccctcttgccaacaggtaagcaaagtgaacgcatcttcctaccccggtggctattctgtgtcccggtgctaaaccaagtgtccgcccccttagggcacccggacaagccgcggttggccctagctttgactcgagcgctcgcaagcagcagcgtgcgggctgcctcggccaaccccgtcttctcaatattggtggcctccattaaagcacagacatcaaaaacatcgacggcccctttcccctcttctcttccctccttcctctcccaagttccgagagcatcctccgaggggcgacgtctctcgccccaccagctggacctcggcgaccgcgcctcccccgaagctgcagccttcggggctgagccccgcgggtgcgggtgcaggtgcggagccgcccaaggtgcgcaactcgtttgcagcggcgcagcccagacgcgcctgcagctggggctcaccccaacctcgctgccagccgaggtagcggaatcgtagtcgacgtcgggagcgggctggactggggtctgagaagggtagctggtgccagggggtgtcattcatcacctcgaggcagctccctaagtctgagcgagagcccgagcacttcttatccaacggttccaaataaatgagggggagagagagagagagagtgagagagagagagagagagagagagtgagtgagagagtgagagagtgggagaagtccacggacagcccaggcggcgcggcgggggaagggggacgcaggaatggaggagaggagaggggaggcggaggggggatctgaatagagggcatttaggaaacgttggcggggcacagagttgggaggtggggggaagggaggaaccaggatggcggataggagagaaatgggggtgactgtgctggaggggaggggaggtgggggcccagagctggggggagtcaaggggaggcgggcgtgtccaggctggaggggagaggggagggtctgcgccggaggaggggaggggagcagagggagtgcagggggtggggagatggagctggagggggtggaggggagacgggcggggcgccgggctggagggaggggagagaggcgggcggggagcgcgggaggagggaggctgggcgggcggacgcgcggggggagggcactgggcaggaaggggagggggagcgagcgcgagaaatgcagaggctgcagcggcggcggcggcggcagtagcggcagcggcgacgacggcggcggcagcgctccaactggctcctcgctccgggctccgccgtcgagccgggagagagcctccgccagcggccaggcaccagccagacgacgccagcgaccccggcctctcggcggcaccgcgctaactcaggggctgcataggcacccagagccggtaaggaggcgcgcccggtggccccgcgccgccgcggacccgggggcctccgtcccccaccgcgccgcgccccgccccgcagcccccgggctctcccttcatgcagcgggcagcagggatgtgggcccggattggacggcaagggcctggggtccctctgtgagggctccgtcgcacttcggggatcccgggtgatggggggcccagaagtgggaggcttcagccgctcgcatggtggaggggtgaggggggcggcgaggttggtaaacggagctggggggagggggctgtcggggagaggagctgcgggtgacgggaggaattgccgaatgcgaaaccccctcagtgcgttgagtcccggggagacggttctgtgggctgaagggagcgcttccgtcatcggagcccttaccagcctgggagaaagcgctcggggcgaggggcgcagcagccaaagatggagggtgggggtggggtggggcgggagtccggggagaaagaagatggggaatctggcccgatcagaaggaagtgggtggctttttgctttggcaaacgggttttctcgacccatgggactcctggatcttggttctggggccaaggaatacgaggttcacacggcgacgtgcactcagaagcacctcccgagcagatcggagccccagcctcgtcagtggcggaattgccttcctacgaacccgtgggctgcctcggagcagtttgttttttcgagcctttggttccaagaatgcgccaggcgcctccgccctgggtcccggccccggcccgggcccggggggtgtgggcttgaacctgacagcgcgcggccctaactgggctcagccccgctgggagcgtagggttggggttgagcagcttttgcccaaagcgctaaagctgaaacccggcgcccggttcctgctccccccgcccccgtcccccctccatttccagaaaaataaaaattgcggaatcctggatccgatcgcacgcacaatgcgcggctgcaaaccgcattcttttcatgaatattcatcgaacgcttggccaggctccttatctgcgtccccagagacatttccgccttgaaacgaactcggtggacagcccttgcccatgtaattctcactctgctgaaattagcacagcacacatgggtgcattttttaggaccttgtacaggttgacaacacctctgtctcccccgcggccactcgcactgtggggcgggctaaaacccaacactagcgtcgaaatggccttctgctatagggttgtggaccgaccccccacccccacctcccgggattacagcccgggccaacagacccccagtatactgcaggcaaaatgaatgaatcgggactgtaattacctattcctttgtcttggcctcgcgcatgcgccggagagcagggtgtggagggcccggcagccccatcccatctccatcatccagccacccactcccctcccgagccgaggaacaaaggcgtttgccctaaatgttgcgggaaacccttggacaccaatgacagtttttcccgcctgtgtgtgtgtttcttcttttccaggctgtctctcatcttttgctttcttgctgatttcaa

SEQ ID NO: 1881976 - DNA, 4001 bp, Homo sapiens
gggcacaaacggtgaagatatttgagtcccgtgtgaatgcccaaagggcatcattactgtagaagagattaataatcagacaaaataacatgctcagaagctgtcagcctcttccctcagccaccctagtgcttgctcaatgggaccatgaacaaagaagccaagttggcagggatggaggctatgcaggagcttaacagggtggacttccccttataaaggctgtactaatactatagctgcgtgcctaacctatctacagcagagactaaacactgagcccctgatatgacaccattccctgggggtgagtagacagtcacctggtggcagattgattacaatggaccttttctattatgaaggaggcagagatttgtcaccatgagaatagatatgtattctagaaatcgacttaccttctttgcacatagtgcttctgccagcaccaccatccatggattcacaaaatgcctatccaccattatgacattctccatagcgttgcttctgatccaagaacccacttctcagcaaagaaagtggtgcaatggattaattcccatggaattaacaggtctcactatataccccattaactggaagtggctgggctaaatgaaaggtgcagtcacttacagaagactcagttggagcaccatttgggattaaacaccctgaaaggattgggttctgtcttaaaggacatagtatatgctttgagtcagagaccataatatggcgttatttccccatagccagaatacaagggtctgggaatcaagggatataaatagagttacatctcttactattatgtctagtaatctatgcacagaattttagctttacacaggagctacaactatgatttcattaaactgaaagaaggatctggtcattttgggcttaaggactgtgatagtctgaatgtgtcttcaaaattcatgtatcagaaatttcatctccaatgcaacagtgttgggaagtagggcctaatgcaaggtgtttaggtcatgaggcctccaccttaatgagtagattaacaccatcataaaagggcttttgtggtgggttcacgctcttccactcttctgccatgtgagaacacagcgttcatcctctcttgcccttccaccttccatgggaagacatagcaagaaggcccacacaagatgctggcaccctgatcttggactttccagcctctagaactgtgagaaataaatttctgttctttataaattactcagtttcaggtatcttgttataactgcataaacagaccaggacaaggccactgaatcaaaaggcagaataagaagttactctactggctggagtgattgatcctgattaccacgggatgattggattgcagctatataatgggggcaagagagactatttctggaaccgaggagattctgtaggtcacttccatacccactagtaaaagttaatggaaaactacagtaaccaaaatataggcagggtaattgaggactcagagccttcaggaattaaggttttggtcactctaccaggtaaagaccccagtctgctgaagtcctgactaagcatggggaagcacagattggttagtagaagaaggaagccatagatatcaattataacctcaagacagtgatagagacgaggagtgtaccagttctgcatattttctctagaggaggaggagactgcaggctagttgaggtacaaagagtcagagggagggagaagactttcccataagacagaccaatctccactccccataagcttcctttggaagataaaggagctgaaagcagtgagagcaaaatcagtaggccatgtccatgatgggtggccagagaaggaatatctcattgacagcgggtatttccttatgggatccaacctccaggactgagttgttccaggaattgtatagccagacacagccacagggcaagcatatactcagggttctcatagggaatgttgttctctctggggctgggaagctttggatggtggtgagggtagcggcagggctaacctgggacctgccatatagagcccctgtttcttagtggcagtggcagccagagagccacagcctgcttatgtaacagccaccagtgggacccaattgtgacattttcagcaggagagacaaaaatgggcaaccgtctagggaaaaggagtgcccaaaattgtgagtacgggttactaggtacaatagtgcaagaaggctggatttctgggcccatgtattacggcaatggaaaaaatggcatcatgtattggttgctggtttaaaattgcaactgtagcctgttggagagcccccagtcttgcaaggtatggtcttgcaaccagccgtagctaagggctcaggagtcgattccaatattctataaggccagacgattctgggacatagggtttgtatcagttggggttcagtcagggaaggagaaccattatgagtgaaatggaatgaaagatttctttaggggattcaaacttatgtaagtgggggagctggtgaagaattccacagaaagctgttttctctgcatctcatggtgggcctaaagttgttataggttacagacctacagctcaggaagaaacactggacataaagtgggcagggcaaggacaaacgagtctgtggtgatggttgattttatgtatcaacttggctgtgctacactacccagttatttaatcaaacacaaatctagatgtgattaacatctgcagtcagttgactttacataaaggagattacctttcatgatctgggtgggccttgtccaatcagtcagaggccgtaagagcagaaactggggtttcccagagaagaagaaagtctgcctgtggcctgcagcatcagctgctgctggagtttccagttcttccacatagactgcgagaactcggcctgccccactcctgtgtgtattcctagcagtgctgagcataaggcttggcccagagtggatgctcaataaatatttcctgtattgaaacgacatccatctgtcggagtcagtgtgaacagagctgtgccttggggcagaggcggaagctgggggacctagcagggcctttcctgtccttaggtcctatgacattaagcgggaagcactccagattgtgaataggttgttgggagacaaagcgggaagcgaatccgagatctataaagcaaaaatgaaaattgagggggagtgctggaagagatgcaacttcaggggaagattccaaaaccccggctttgctaagagtgcttgctgcaggtgagaacttacattggctgttctgaggggccaggcgctttctaagtgcttcctgtgtattaactcatttcactctcacaaggaccccatgagataagtgctcttctgtgctccctgtctcaaggatgagaaaatggaggaacaaaaagttaagtagctagaaaaggattcatttctccccctggaggcttcttctccaggcagaccactcagacagtgagaagtggtccttttgtctatcgcgtctaattccagcccagagctccactggattgtatcttccagagtttgccaagaaagtccccaaagggctgagtgagtttcctatcctctcagggcccatagtacgctctacatcagccctggtggtcttcagtgtggggacagatttctgtgcaaatcttttcactcagagctgcagggctggctttgtggccacatgtgtgattcataaagtttgcattttccacaggacttggtttccagagccttttggcctgagcactacaagctttcaagaatttcagctgagaaatgctatccacagattgctcagctacatgcatcctccccacggctgtgaagtttggcatgggtgttctattattgctctgggatcagattttggaattttattttattaatattcttttctgcaaggatttgggaggggggtctggagcaatactggtttctccaggt

SEQ ID NO: 1881977 - DNA, 4001 bp, Homo sapiens
gttgacacaataaaattagttatcacatttacaatcaatataaagaaatgttcagatgttcagatcttttttctatggccaagtttcatccatccaggttacataaaagcaaaattactttcaaggtatatatgtgcatttttaccttgttatttaatacagcatactgcttaatttgaaactttggtctgtcaagaaaatgtcctgtgcattagtataggacttaaatgttcattcgataaaatgtatttaacaatttaggcttgactaaccttcatcagagatttgcctaaagtaaaaggctgatagaaactccatgaaagctccaagaacgcttgtggtttatttgtttgctctttcagcagttgtcaatagatgaaaatataaaattgagaaataatattatattttgtgccagacattggcttgctgtgcacacagggtattattggacagaaactgacaactgtttcattaatgaaagaattgcctcagtactcagaaattatgattcaatgggcatgagcccacagttttgatggagtagaagcttattctttgaaattttccttctgcatagcatatttattaattcatttttattatctaaaaatcatgttagagcactctctctgtatctaggatcagaattcttattatcctgaaagctgtgggaataggggatttctaccaatgctaaacctttccactttcccttctacgtttcatttttaggaaaaagtggaggacactttgaagtataattttaaactactttcaagttttgttaagagagtctttcttctaataagatgctgtctggggctaataaatagttaggcattataaagagtgggtgtaaaccttacatacaattcattgatagttttttgctctgataagattgttactatatctataaaattatatcataagaggcagttttaaataaaaaatgattgaataaatcctgatagctgaaattgtataagaatagtaattattgttattattaataagttcctttgaggaattattacttaaataatacagcaaacatgtaatgatacattctgaatacatcaataatgaagttttttagactacatgctttacagaaactttgaacaagattttcaacctcaatttgcttcatataggagagaaaactctgtaactccttaaaagtacatctaaaaaagggattttctccactttcctcacacgtgcacgcatgtgtgtgtgtgtctgtcacctgtgtgaaagatgacagaagcagatagagctaaaagaattttctaaaaataaaatgcactgcagaaaagctctgagatctcacagagagtgccaaaatatcagtgcatcagtagccaaggggataaaaagggtataaaaattccatttccttaaactccacactttcctggaacaatgtaaagaagagagccgtgctgccaaataagaccttaacttgaaatgccaaagtctctcggaagcagtttctcaaagatggtattttagggcaaatgatcagcaagtctttggtttctagtgttttgttttcttattcatgtggcttctaaagctgaaaataataaacttgtaagttggattgaaacattaaagtattagatattataaatgtcaatatcagacacatactacctttgttgcattttttccctatattgtttttagatgtctatcagtttgtatgtcttcattcaaatctgctcttctatgaagccgtcctcagcttgtggaaaaaatgccctctttatcacgaaaactccaggagaatttacttgttgcaactctcatagggctactttaaaaaaactctgaataactagagtaatgaagagaagtctaggcctctcttcatctcgggatgaattagaggattgatgatcaggtttttataaaattcaatctgagctaaagaatgtgaccaaaattatattttaaacccttcccaacgtgttgtcatttgtgacatcacatttaactcaaacgtcatcttctgtgagttctctaatctcactacttaaatccaatcccactattatgccctccttttcaatgtctccaggtcagtttcattaggagtcaaaatattatgtgcctttcattgaaatatcttcaataaagatagcttttcattgaagaaagatttgatctatgtcagtggcaacttccaacagctatgacacaggtgtcaagcaacttgaattttatatgtcagcatgatcatcagattgaaggtttgactaaagcgtgtgagtgtgtgtggggtatgtgtgtacacttatactcctccccagataaattttcatttaatgggtctaggacacacaaaaatcatgtgtctaaagtttcagtaatttccaaataattgcaaatggctatcatatgtctaatagtaactattcactacccccacatccctcaggttcaacagttaggcaatccttccctttattatcacatattttgagcaaaatttttccatagtatttgcactgtcctgctgtgctgtaatctttggtttattgtccactttcccactagacagagatttttgtggacagagcctatattatttatttctatagctttgaaactacaatttaatctgacatatatatgttaaacaaagtttaatagacatatttagtttgctctatatttgtttagatattagtttgctaactatggtgtgaagagagagaggagagtaacatttagagatttattttggaatcaaattttagtctgtaaagatcttcttagtatttgtcctttattcatagtatcatcaaatttttttgttgttgttgttaaaaagagagaaaccgtgatgtgcatttaccctgtacaacatttagcagagcgatcaggaatcaggcataggggatttcacactgaaactgtgttattttcttttcttactcaggagggagctcaaatatggcgtgctgcctttgtggacatttaatcaccagttatgttttctttacatcttcagagtaaaacttctttccttaaacattttagcccaattataaaacttaactgacacttctcaacatatatgagtagtattactaaaccatgaaaatctcctaaaatatgtccatcattgtcttctttttctacctcaaatttcgctgcctcagattgcttgctgaacatctctcagtttatatatttcaccaactaattgcacacatataaaaagaaaataagaacaatacttttccacccagatcaggtgtgtttcttctctcttagtaatgtctctgatgtctcttattgtcaatcttgaccccctctcacgtcaaacacccccacccccacacgtcaattattctggcttgaagccacctctgagtgacctttacatctcccaatccttggtcatccctctcctttcctaatagttgccaagcacctcctctagggatgaaaattgttataatcacttcttacttcattgcccttgacagtgttcttgcttacaacctacacaacctagttatttcattaaaatattgaattaatagatgttaattctgaagaaattaggcaattgacttgaaaattcaatgcagcaaaaggctttctttttctattatatagttgtaattacttatcttctaggattttcctgtaagacactattttcaagttctctatgtttaaaataataacagtaactatattaataattcaaatatcatcatcatcgttgactgtaaaatgccttaatatctgtgattttcttttccttttttattttgttggcagaaatcacattaataagaaccaacatggaatctcaacacgtaatacagatgaagccaaagaaacacagatagattgaggcagaaaatgcagagactatgaatcttcttggatccacatgaaggtacctactgagagctcacctaaaacattaggtccctgcagagtgtgcatcagataatattgtaaataaa

SEQ ID NO: 1881978 - DNA, 4001 bp, Homo sapiens
atgttagaaattgaacaaatttgcaccagtctaggagggtttgggtaaagagaggttcagcaacctctatgtcccttctcacctgtgcaattcacaataataatgaatcactacgagcttcaaagtcacagtctttagctatccaaagtaattcatggaaaagcatttacaacagtgtaggcactgctttttcgtagtacacaaatggcgtagtggttttggttggcattgaaaggaattctggattttataaaaattgaagtaaaacaggtgaaaaatattatctggaatatgtataacaatttatttgcaatctcagataaaagttatgtgatattgtcacctcaattagcctcatatatcttcaagcagctctgttttcacattcagtaaatagttattgagcctgtaattcaggactctgtgctaggcgttggagatgcagtgatgaatgaagtaaagcatctacccccatgaagcttataatcttctggaaatagactttaaagaagcaaacaaacagataaattacaaattgcaaaatacgggaagataataaacaagacatcatgatagagaattacagtgaagatttacagtaatcagaaacagtctcctaagtcatttcttggttatacaaaaggagccaacatgttattttaatgtaatatattaaattcaactacatgaaattgccgtcatttggccatatttaagctaaaaaatggcaatttcgatgggcaacctaacaaaaagaaactatgcatttatatttaactagtcaatttggaaaaattcatttataaaaaatagcgtaactcacattctctagacatgcacatgcaaacaaataaacatgtttagtgtctttctgttttttctaaaaacctgaaaactggcaaaagctgggacagagaacaagtttgaggcagggcagatttttattgctgtatccgggatgagaaaactgagacccagagaccttaagtgacttttcaggaatccctcagtgatgttgcaagtattttaaactagcgctaatagctgcttatctattatgcgtctcattatttaattgactctacttcacaatgaaatttgttgtttttccctgtccctgtttttttatattttgtcaaaagatggccttgcccagttgtggctgagactgctatgtgttagtcaagttccaaatttccttttcctcgaggacacagctagactacatttcacagcctcccttgcaatgaggcacatgcattcacctaagctctggtaatggttgcctcttcccatcttcaaagccatcgatggccagtcacatcttttttatatcacatcactctgacactgactcttccactttccttggccacgtgaatggtcttgcgattacacggggctcatcgggctgatctagcataatctcctggtcttaaaggtcatcttaattagaaatcttaataccatctgcaagcttaattcttatttgccatgtatcctaacataatcacagattcgggggattaagacatagaccagacagctttgggggtcctttattctggctactctccaagggtacctaaaatgttgctttaaaatgaggcacatgcattcacctaagctctggtaatggaatggagttggaagtgatgtgtcctctccaggccaggctcgtgaaatccttctacataatcctccacacattctctccttctgcatctgctggaaggagaaaggattttaaggtcttggaagaagtcggagccacaggatggaagaagactggacttggaatgactatatggaaagtgactagagcagaaacaaacatctgtctgaattctccggggcaaatagtacattctaattatattaagccataagatttttagagatttttgttatggtagcgaatatcacttgccttaactaataccatgacattgtttttttgttttttggggtttttttttgtttattcagatggagtctcgctttgtcgcccaggctggagtgcagtggcacagtctcggctcactgcaagctctacctcccgggttcacgccattctcctgcctcagcctcctgagttgctgggactataggcgcctgccaccatgcccggctaaattttttgtattttcagtagagacagggtttcactgtgttagccaggatggtctcgatctcctaatctcatgatccaccctcctcggcctcccaaagtgctgggattacaggcgtgagccactgcgcctggccgacattgttatttttaagtggctttttgttagtattctgtaggcatagcctgagttagaagatatgttacttttttgtggatgctgtaacgaattgccacaaacttggtggcttaaaatcacacaaatttattatcttgcagttctgcaagtcagaagtccaacatggctctcactaagctaaaattcagatgtcctttctggaggctctagaggagaatctgttttcctccctttcccagccttcctagaggctgcccacatttcttggctcgttgcctcttcccatcttcaaagccatcgatggccagtcacatcttttttatatcacatcactctgacactgactcttccactttccttggccacgtgaatggtcttgtgattacacggggctcatcgggctgatctagcataatctcccggtcttaaaggtcatcttaattagagatcttaataccatctgcaagcttaatgcttatttgccatgtatcctaacataatcacagattcgggggattaagacacagaccagacagctttgggggtcctttattctggctactctccaagggtacctaaaatgttgctttaagatacaacataaaggtggaatctaaccttaaacttaaactgaggatgaacatgttcacccagatcttcattatattttgatatctctcaggataaaattagtgtgcctgttagaaatactaaaatgatacttgctaccaaatggctctttaaataattaagagtatatatacctaacatcacataatcattatttaatttgtacattctttagagttcatatttttccagggtagaacatgaccaaatttataccacaattcaggataatctcaccaggtgggaaaaattaggaaaagtaatggtgcaaacattttttttgtcaggtaaacattattcagagagtcagtctttgcatctttttaggatcctcaattagaaagaacttctactagagttcatgtcctttgtagggacacggatgaaactggaaaccatcattctcagcaaactatcgcaaggacaagagaccaaacaccgcatgttctgactcataggtgggaattgaacaatgagaacacatggatacaggaaggggaacatcacacttcggggactgttgtggggtggggggaggggggagggatagcactgggagatatacctaatgctaaatgacgagttgatgggtgcagcacaccaacatggcacatgtatacatatgtaacaaacctgcacattgtgcacatgtatcctaaatcttaaagcataatcataataaaattaaattaaaataaaataaatcaaaaaaaaaaagaagaaagaacttctactatgtgtagggccgggtgtggtggctcacgcctgtaatcccagcactttgggaggccaaggtgggtggatcattaggtcaggagttcgagaccagcctggccaagatggtgaaaccccgtctctactaaaaatacaaaaattagccaggcgtggtggcacacgcctgtagtcccagctacttgggaggctgaggcaggagaatcacttgaacctgggaggcagaggttgtggtgagccgagattgtgccattgcactccagcctgggtgacaagagcgaaactccgtctaaaaaaaaaaagaaagaaagaacttctactatgtgtgtatgcatacacacaatcatacatgtgcacgcattcacacat

SEQ ID NO: 1881979 - DNA, 4001 bp, Homo sapiens
gctcagagcaaaagggaagatgccaggtggaaggaactgccctgcagaaagggtccccaggagccctgttaatgggaatttattcagcaggtcaggcagcaattttccctggagaccatcctgaaaaaaaaacttccccaaggaagtaattgaccgaccctgggaaaaagccgaagaggaggtagtatcatcaaaatgtcctgggcggggaggtgtctctcgcttgggtctcctgctcgggatcgatctacccttatccccttttccaaagcggcgcaaacaattaccagcacgttctcagcgctaggtctaattgggtgagtttttattgtagaaatgcgcccctgaagatgtgagacgcgtaggtgggcccctgcgcctttccaccggcctcccactgcccgtgctcacagaagaaactgggtccttagacccaggcgggacccactgaaaccccgcgttcagtcatttcccagggggatgcggccccccagtgccaaccttccaaagttcaggtgagttcacgacgctcggatcctagtggggtcctcctcggtgtcaaggagcaagagaggccgtagcagctgtgggaaacagccacagggcctgcgagtccagacgggtagctccaggctagttgcacgcttgcggttcctgccccttccgtgtgcaaagtaaggaagtcagcaggcggcgagcaagcaagacgggctggcgcgccgtctttcaggaaggtttcccgacccgaccgccgtctttcgggaaggtttcccgactggaccctctgtccagaggaagaaagatttggccaggggatcagaatcacggtacctacaggtactgggatcgagaccctacacaggctcccgacgcctcggtctccctttcctctcgggttgccactctagttcaggaagggtctttgggtcagggcaccgtgttcccaggggccagcgatccccggtgtcgtgccctccctaccaggctcaagctggctgctcttggctaggtcgggacggggcgcccggcggccgtggctcagtcccaagctacaccggccgcgtcttccagggcgcgcgggcgtcgcgcagcgagcggtcgtggggcagcgcggcgaaggccgaatggcgcagctggcaaccgatgaagaggacgacgagcgccaccgagagcagcagcaggaagaagagcagcaggtaggtgggcaggtcgggctttgtggccgcgccgtccctcataccgcgcgcagtggccagctccagcggcaaagcgccttctgccttgaccgtggctcctggggccagcgcgctgcctaccgccgcctcggggccgcccgtggcgttgaatatgtcgccgtacatggcccgcgggtcccgccgaccccagccggaccgcttcacttggcctggagcatactggcgcgacccggcgcctccatggcgcgcccctcccgccctgccgcgcccaactgaccgagagtcggtgccttggggccggcggggactgcaaagaccccgggacgcgtccgctcactcgcctccgcgctcagctgctttccccgccggctggcggaccccagttctcggagctggacagttctgtgcccgcgcccctcgggctcactgtttctctccgtcgccaccaggacagaggtcccagtcactgactcgcctttcggctttacaacagcccgctcagctcggaccctcagctccagtgagctccaggtgctgggcgcctctgggctgcggcggcggggagaggcactcagcaagtgcagccgcagcccggggtctctgctgagcgcccggtggcagagcgcacggagggcgggtggccagggagtcctccgcgtcctccggcgccgccgccaccgcagcgtctcggaacagtcctgcaggctctggtccctgtcgagacgcccagtgttcagcgagcttgtccccactccctccggctgctgcgctcctgttttgagcaggagactgagctttctggcggctctgagcgcgctcgtgtcccgggcgggggttcgggggaggggcgggactggcggcggctgcccgggggagcggctgcgaaccaatgagggcaagagaggacgcggctgcgactgcccccagcccggcctcacatcactcagggacagagggacagagacagggacagagagagagagagaaagagagaaaagcacagggtcacaggaagactgacgggcaaagacacagttacagacctatgaacagagccacacgccaaacagggacaaaccgttgaggtaagcaaaccaactcagagacaaagctcagctgagcgtgcacacctgcgttcattatcctccttgacaggctccctccaggcatggcctggtttgttccgagtgcccactggctgctgggtagcgcaggccgggcacaccacctccaagggtgtgcagacgcgctcccagacaagcatgttcaagccaggactgattctgtgggccccgtgtcctctccggctgcgtcctgccggtctgtgtgcatcccgcaccgtgtgcaagaatgttcagctcccttttgcctattctgcctgggcacagaggggcaaaaggaggacatggcgctggcagttgcccccctgcccttggcaggtctggaaaggcgaggtggccaggacagaggtgtgcaatcagttggattgagtggggaggtgtctcctttcccaggagtctgaactgctcacttcctctgcaaagtcttccaggacccccagactagagtgggaacaaccaccctggaccaccacagcccctgcacttctcaacaagcacccacccctcacctctggcctgtcattttctttcagggccagaattagggggaggtgggtgagaagtctagagcacaatactgaatgagacactcgctctcagagtctgcaagtgcagggttgggagtaggtgtctccttcagttttgcccctagatgcctcacccctcaccctagtcccagccctgttgtctgctcatttgtcagagaccctcaaagggtcaaccaagttcacatccatgtctttctcctcttttcctcatctcccattcaggggtgcaatacatggggagagcttggtgacattggctgagagagccagtagaaagatgagttagttattctctcttcccactgcacctcatgcctggccaccagcataacaagaacaatcagggtgtgcaaggcagaccttggccagagctcatacccacaaatccctgctcagcccggcagaatcacctccgtgagctctttgtcgaagttgaaactgtggttccaagtcctgactctacagtgtttgccaaatgaggtacaaaaatgccctcttgggtgtttttcacttagtcccatagatggacctgtgggggttttagcagggcttgacagtattcagcactgccccatctaccaatcaccatcccagacagagccccccttggtcctagagggctgcctggtctgcttccagggtgcaggatgctgagcccctccacatggctgccatcaatgcctcattttccagatggcagagttggctctgagaggggccagggcttatccgtgttagcacaggacagccaccatgtatcagtgatatagcagcagcagtggcagtgggccactcaggagatggggggagtccctttctctgaagacctgacctgtttcagacagcatttttctcggccagcagcacgctagagaacattatgtgaagccagaacaggcctcctcaccaggactttcagccagggggagactcagctcatgagttggatggagggggttgggatggaggtgacgctcctgctgtcagtaacttcctgggtcctgggaaggcatgaatgcgggacttgggtagctcagtttgggatttggcctggaatttcctcctgggatctatatgggaagtggcatggcctacctcccccactttctctcaggtccaccataaccccaggtatg

SEQ ID NO: 1881980 - DNA, 4001 bp, Homo sapiens
tgaatgtacatcctttgccagttaagccttgagatgatggtagcctcaggtgacaccttgatttcagcctgtgagagaccctgagccagcaggcccgcctaagtggcacccagattcctggcacacagacctacgagataataaatgttgacttaaatcaacttgttttacacatcaatagatacctaacagatctgaaagttttcacacctatatttgatcctcgattcaggatgaatacctgcagaaatacagcttgctttctatctctaaagtggtgctgtccaataaaatatataatgagccacaaatgtgaaccatatatttttcagccacattaaaaaaagtaaaaagaaacaggtgaaattaatttaaataatgtattttatttcatccatatgtcaaaactacattgtttaattatgtaattcatataccacatgattaaagagataatttagatatatattttttggactgagtctttgaaaacccatgtttatattacactggcagacatctccattcagactagccacccaatggaccacctgtggctagcagctaccatactggacagctcagcttgaaagagaaaaacctggccaggcgcaatggctcacgcctgtaatccagcactttgggaagccgaggcaggaggatcaactgaggtcaggagttcgagaccagcctggccaacatagtgaaaccccatctctactaaaaacacaaaaattagctgggcgtggtggtgcatgcctgtagtcccatctactccgggaagaggctgaggcaggagtattgcttgaacccaggaggaggaggttgcagtgagctgaggtcgtaccactgcactccagcctgggcgacaagaacgaaattccgtctcaaaaacaaacaaaacctcagtttgctcaaaaaacaatttctcttcaaacattttttttctgttttatttatttatttttttgagaaagagtctagctctgtcacccaggctggagtgcagtggcgccatctcagctcacttcaatctgccacctgggttcaagcgattctcctgtctcagcctcccaaaggtctgggattacaggcgcatgccaccacacccaactaattttgtgtttttattacagacagggtttcaccatgttggccagcctggattcgagctcctgacttcaggtgatctgcccgccctggcctccaaaagtgctggaattacaggcgtgagccactgcacctgcctttttttttttttttctgttttaaaaaaggtctcttttgctgggcacagtggctcacacctgtaatcctagcacattggggaggccaaggcgggaggatcacttgagtccatgagctagagaccagtctgggcaacatagtgagaccccatctcgaaagaaagaaaggaagaaaggagggagggagggaaggaaggaaggaaagaaggaaggaaggaagaagggaaaagtatcttttgagaattttccaaccagttgaatttgcttctgtggcctccccgggtgccctgtagccgtgtggacaaaaccagcatggcgtcgagggaagcgctagtcccctaaaccccacatggtctccagaggctggcttctgggaaatgcctcattctgttggtgtgcgggtttcccactatagtcactgtgcccaagctcccccacgcctgctctctcagcacaggtctgccctgcccttggttgtcgggagctctgccatttccccatcggtttccccctagttccgctgattccccgggacttggaagactcctccactggctctcagctttgggctgtccttcctgtgcctctgctacggggtctcctggccccacactttggtgaccctcggcaggcatacaacttactaattttctgttcttttcctcctcagggcctatgagaaattttctgggtcttctgcaggcctcactggaaatgagggggcctggggtggggacctcccagcccttctgcgcttggcccccgccccatcctgttcttctggagctgctccgtgttgggcaggcagtctgggaagctgcctcgccttaggattccaaatggaaacagctttctgcctttggattctcatacatatgatggagatttctttcctacccctcacatccatcagcctggattatcaaccacggtctctccttttcccccaacctgctgaaacaatcagcagtatctgatttttttttctctttccaggctcttaactacagcaaaataagaaactgaaacaagcaaacaaaaaggcgtgggcagtgttaattcctttcgccagtgttaggagctatcctgcagccttccttattccaatgttaactgagacagactctttgcctaggtatccaacctctgtcttcatcttcctatcaaagcccgcttagttttgagagcaatacttttccctcaactagttctaagcttttgctagtttaaaagcactttggtgtaagatcaacatgaaagtcatgttaaaaagaaaaatcatcattcaccacttcaactgaccccatgtgttgttagtctgggcctgaccccccaatgaatgtcactgagctagtgggagaagagaagcatacctcattaaaagtatgtaaagatattattctctccctctgccaccctggcatagcccccaatgcagtctatccctttctgcaggatttttttttagaccgagtttcactcttgtcacccaggctggagtgcagtggcatgatcttggctcactgcaacctctacctcccaggttcaagtgattctcctgcctcagcctcccaactagctggaattacaggtgtgcaccaccatgcctggttaattttgtagttttagtagagatggagtttcatcatgttggccaagctggtctggaactcctgacctcaggtgatctgcccccctaggcctcctaaattgctgggattacaggcataagccaccacacctggccatttttaaaattattattattatttttgagacaagatctcactctgtcacccaagctggagtgcagtggtgcgatctcggctcactgcagcttcaacctcccaggttcaagagattgtcccacctcagtctcccaagtagctgagattacaggcacgcaccaccacacccagctaatttatatatttttctgtagagacagcgtttcaccatgttggccaagctggtctggaactcctgacctcaagtgatccatccgcttcagcctcccaaagtgctggaatgaccagagtgagccaccgtgcctgacctctgcaggattatttaccactagcttgaaaacaggctgcagcaggaatggccacattctgtaataaaactctcccttttctccctagatttctggttttgtagagagaggtatgcccaagtacattttctcacatcctttgcagagagatgaggccgatgagaaacaaatccaaatcactagtgttgcttctgggaaagctatcttaaaaatgattactcagctggtagctgccttttgctgtctccctccttttgcattttttccttatttggaatgtagaaagtgatggctggaactagcaaccatcatgtgatcatgaggcatccttgagaattgaagcctggtgctaaaaatgaggtgacagggtagaaggagtacaatattgatgtctaatgtcagcttagatagcctagatttattaccacaggccctgggatatctatctctacatgtcatgttatgtgagaaaaatgaactcttgtctggttgaagcaatatttccatttctagtagtcaaattcctatcctaggcatgcttactttaacttcacttttactgtttccaaccattgcaacttggactttcctcctgtcacttctttgaaactgctctgtcaagttttttaaatttttttttattattttattttatttttgagactggtctagctatgtcgcccaggctggagtggagt

SEQ ID NO: 1881981 - DNA, 4001 bp, Homo sapiens
taggggggccactaggcccaggcagtcttgggacttgggtctgtcctgctgtgcatccatagtgggtgctttagaaacgggaggcccacccgaagcccctgttgcaagtgaggacaaagtgtgggaaggccgtgagggtctgcagtccgagatggccttgtcctcaacgtgcagtgcactgttgatgcgctggaatgccttctctttttccaggtgcaggtcttcagccgtgacccggtaccccagctctaagcgatgtggcagcatcaaaggctcccctcgcctgcgtggcagcaggggaatcttgcgtctacggggcctagagtcctgggatgtgggggagccacccgttggggcgattgtctgccctggtgctgtatctgcccccttttcacaccgtgtgtgacccgaagagacagcctgaggcctgtcctcactcactgtctttgagtaactgagggtcagctggcagcgggatgaggctggccccctcctctgctttagccccggcaagcctcccgtggagctgtaggagctggagatggcatttcgtttggtgctcgagctcgtccaggatgtctgggatgtgtggttatatctgatttctgagctctgggcgtggaggtctgtctgcagaggcccgggcctgggcacaaagggagaggggcctccattgtcccgcaggggccaaaatgcagaccgtgcatccccggtgacctcggggaccgttctctgatcatcaggattttcttggactctggggtccttgtcctgctcaggcatccctgccccgctctccttgagggccctcaacactatcttccctggacacaagtctggggacagccgggtgttgtggaccccaaaggggtgactacctgctcctgggccccacagagtccttgtgctcagtgtagtggctgggctgggggatgccctggaactcggagcacacagcactggcttactgtggtacctgtgcagtgaaattgaagacggaatcaccaggatggaacacaggtcttgcaggatcacggaaaaccttcttagagttgtcttgacaccagtgatgtcgagtgtccgggtgtttgtaggatggcctgccactcagtccaggggcaggagcaacggggagatcccacaagcaaagtgaactgggggatgggctgaaggggctccaggcaactgagccctactcgcaggtcctcggccttggcccaaacaggaatgaggggcacagagtgcccgggtaaccgctcctgggagcagtggggaactgtcggatacttgaactctcaagagctgggctctgagcgtcctcgtccagctgccaacttggccaaaggctaagccagcagattgttctgttgccgggcaacgcgacttctaaacctgagggagtgggcatgtgagcacataatggcaccagtgacagagcgaccataatggatgaataagcacagccaggtacccgcgcaaggcacctgctggcaatggcaggaggcggacgtggggggtcgtgcagtaggtactggagggagagacgtgggcacaaaggtcgcgggaggaacaggtgcccacaatggctgcatatttgcccgtggatcactgaagattcctgctctcctgctgaggtggagactgcagtgagctgagatcgcaccattgcactccagcctgggcaacgagtgcaaaactcagtctccagataaaaaaaagaaaaagaaaaaaaagaggccgggtgtggtggcttatgcctatgatcctagcactttgggaggtcggggtggacggatcacgagatcaggagttggaggccagcctggccaacatagtgaaagcccgtctctagtaaaaatacaaaatttagtcagacatggtgggcaggagagagcatgtgcaggggaacatccatttataaaaccatcagacctcatgagacttattcactaccatgagaacagcatgggggaaactgcctccatgattcagttatctccacctggccccacccttgacacatgggaattgttacaattcaagatgagatttgggtgcggacagagccaaaccatataattcttccccggcccctcccaaatctcatgtcctcatatttcaaaagcaatcatgccttcccctaagtcccccaaactcttatttcagcattaactcaaaattccatagtccaaagtctcatctgagacaaggcaagtcccttccacctatgagcctgtaaaatcaaaagcaagttagttattttctagatacacagggatacaggcattgggtaaatacactcgtttcaaatgggagaaattggccaaagcgaaagagctacaggccccatgcaagtccaaaacccagcaggcaaatcttaaagctccaaaatgacctcctttgactccatgtgtcacatctaggtgatgcaagaagtgggttcccagggtcttgggcagccccgcccctgtggctttgcagggtacagccccccttctggctgcattgagtgtctgcagcttttccaggcacacagtgcaagctgtcagtggatctaccattctggggtctggaggatggtggcccttttctcacagctctgcttggcagtaccccagtggggactctgtgtgggagctccaaccccatatttccctttgacactgccctagcagaggttatccatgagggcccccccctcccctcccccccacagcaaacttttgcctggatttccaggcattttcatacatcttctgaaatgtaggcggaggttcatgaacgttaattcttgacttcggtgcatctgcaggcttaacaccacctagaacctgaaaggcttggaacttgcaccctctgaagccatggcctgaggtgtaccttggccccttttacctatggcaggagcagctgggatgcagggccccaagttcctaggctgcacacagcagggggttctggacccacaaaaccatttttccttctaagcctcctggcctgcgatgggagggtctgctgtgagggtctctaacatgccctggagacatttgccccattgtcttggtgattaacatttggctcctcattacttatgcaaatttctacaacccagtctcctgagaaaatagatttttcttttctgttgcatcatcaggctacaaattttctgaaattttatgctctgcttcttctcgaatgctttgctgcttagaaatttcttctgtcagataccttaaatcatctctctcaagttcaaagttccacagatctctaggcccagaaaaaaaaaattagcctggcatggtggcatgtgcctgtagtcccagctactcaggagtctgaggtgggaggattgcttgagcctgggaagtccaggctgcagtgagtcaagactgcaccactgcactccagcgtaggcaacagagcgagtctgtctcataaacaaataaaaaataaaataaaagaccccactgtgttgttgcctataacaattcactttaaggctgggtgcagtggctcatgcctgtaatctcaacacttagggtggcagaggtgggaggacagcttgagcccaggagtttgagatctgcctgggcaacatagtgagaccccgttacccacaaaaaggaaaaggaaaaaacaagaattgactttaaatatagtcacagatagattaaaaagaaaataatctaaaagatgtaacatgaaaaaactaataaaggcctaaaaaatactatcaaggataaagagggatatttctgttttttagagacaaagttttactctgtcacccaggccacagtacagtggcacaatcatagctcattgcaacctatactcctgagctcaagcgattctcctgcctctgcctcccaggtagctgggactacagatgcatgctaccacaccctgtttgttttaaaaattttttgtagaaatggagtctagctatgttgcaaaggctagtctcaaactcctcgccttgtgcactcctcccacct

SEQ ID NO: 1881982 - DNA, 4001 bp, Homo sapiens
aacagaaacctctgatactctaactctacctcctcaggaaacggaagcccaaagaggaggggagtttacagcaggctctggactagggattaacacaaaaacaacaacaacaaatctgatttaagcttcacacatgtaagtaaaacattaccacccctattttacagatgtgaaaagagaggtccaaagaactcgagcaattttccctaaaccgtgtccctcgcagatggagagagaggtaggattcagacccagaattcttaaccagtacccggcagttcttccttccacaatcttaagttaccctcgacctccccttgtgccccttgtcctcaggagactggccccccaagactcacatcctcaggtgaatggcaaccccccagaagtggttgtctgagggttagtgccattatttattttcttctttttggtgtcggttgctccagtaccaacaccagcactgttccactgatgatagtctgtgaactgtggaaaagaggagcagtgatactcatgagaactacaagctcctacagtcactttacagtttatacaaaatactctcatagacgatctgatttaatgccaccaacgactgtatgaggtgttgtcgcaatcacttagtgactgagagggattgataccatggctaaaagaaaggcaataatggaactgaaactcagtcttctgactctgagctctggggtgttgccacaaatcagcagctgccagagaccaaaaccagaggcagaggtagaaaagtaagaagtaggcaggaaggtgtacactgtgtggtttacagtcgtacatcctcttagagtcatgtatcctcagggcagaaggcagcctttctgttaaatgtgggaattaaacagaaagaggacaacccaagctgcatttcagagagaagtcttgtatactcttagaaatctatgtgactatcatccctaagaacattaatgttttgtctctcccacgagaatcaaggaaaactgatgcttcagaaagatgccccatatgtatcctgtggcactcaaagtaccccaggttgagatgagatgaggaagattcaagttgtcaagtccagtttcccaagatctcttgcacagaagatgagcaaatctcacttcaaagatcactgagtgatgggcactctggtcccagaaccatggagaattcaaatatgaggtgaagaacttagaaaaaactgttaaagtctctctggagagtagaagcctgggagaaaaccaaaccaaacccattatcccatcagtgctgtgcccaagttgcctctttgagattggcgtggggtcacagggttgggccccaggtacttggagacgtgagcccaaagagcccagggaagtcaggcttggggcagcagtaggtgagggccgagtatggagtggggagccccaggagtcacctgcccaaagtcaccctggggtgactggtgagggcaggtgctggggcatccagttccttgggaacgtgagcccgaagggcccagggagatccgtttttggacaataggaggtgagggcagagtacaaagcagggagccccacgagtcaccggctgaaagtcaccctggggtgaccggtgagggcaggggcaggactgctgagggattggggctgacaaaagattttggttgggggagcccagaggcactgggggggcccagccccgtgtgcctctggagtgacatggattctggcagctgttctgccatcagaggggacctggggctgggttggggttggggtgctgcaatccgatgcattttacctttctcttggtcccagccaattttctttgttgggttttttcggacatcatggggtggggagggaggtggggttggggtcacattggcgtgatccaggcgaggacagtgatatgcctccagtcatgtaccacacagctatgtgactgagccacaggaggcgtcaccagggctgcactagaatgcggaaaaggggcgtggccttaatgctccaagcccattggtcaatgagaaagatgaaagggaaaggaggcggggccaggcagctgtgtgtcatgaaggtcctgtgatgtcacaaggaaagccgcccatgcaactgctgtccccgcccactctgggagaggggcggggctggctttcactttctaaactttaaaactttatcaccttaattgaggtacaaatcctgttgtaatggaaaatttacagtgtgcgtaatgattagtaaagcagattatattatccaacattccaataagataaaataatcacagtgatttctcttttttggaaaaagtttctcttattctcctacatgattgttaagtttttttttttttaaactagagacatgtctaatatatttaaaaacacaaagcttttgaggtgggtgtggtggctcatgcctgtaatcccagcacattggtaggctgagatgggcatatcacctgagatcaggagtcaagaccaaaattttagtattttagtgtgtaatttagtatttattttagtatttaatacatcatttagggctacatgtagccacagaaagaataaatctgattcagtgacttaaagaaatatagatttcatttttgtcacttaaaatgtgcagaggaaggcagtccagggttcttttcagtttcctgatacttccttagcctggtttctattcttgtggttacaatgtggctgctgtttttccaggccttggattgccttccaaggagggaaagaagaaaggtcaaaaggctgagtttgtctctttttagctgaaaaacatagatttctcaaaagttgtaagattatactgcaattcaattttcatcctttttttttttttttttttttttgaaacgcagtcttgctctgttgccaggctggagtgcagtggcacaatctcggctcactgtcacaatgtccgcctccatggttcaagcgattctcctgcctcagcctccctaatagctaggaatacaggcgcatgacaccacgcctgactcatttctttttgtatttttagtagagacgagatttcaccatgttggccaggctggttttgaactccagaccttgtgatccgcccgcctctgcctcccaaagtgctgggattagaggcatgagccaccgcgcctggcctgcaattttcatcttttggctgcaaataagttatgtcactattctcagctgggggagtgtttaactcacatgttgcttcctctctgttagacaggttttaagatttatgaataggtactgaattgtatcaattgcttttttctttcttgattgagcagtgttttttcttatctttttatgttgataaggtaacttaacagtgattggcttttgaatgttgaacattgcatttctggaattaaatcacctttgttgtgataaatgattaataccatattatatatggttgagatgggcttgctcctagttcatttggtagttttgtacttacgttcacaagagaaagtggagtctaagtttttctgtttttttttttttttttccgcggagtctcgccctgttgtctaggctggaatgcagtggcatgatctcggctcattgcaagctccgccttccgggttcacgccattctcctgcttcagcctcccgagtagctgggactacaggcgcccaccaccacccctggctaatttattgtatttttttagtagagacggggtttcaccatgttagccaggatggtctcgatctcctgacctcgtgatccacccgcttcggcctcccaaagtgctgggattacaggcgtgagccactgcgcccagacttgtgaggttttaatatgaagtattaaagctatgctggttagacaatttgagaaatgtttcttctatttctgacagaatttatgtaagatgtgtgctatttcttccttaagcatttggaaagaattcacttattaagccatgtgagactgtagttttcttaataaggtgtttaattacaggttcaa

SEQ ID NO: 1881983 - DNA, 4001 bp, Homo sapiens
gaaacaaacaagtcctgtgataacatctttatcataatttttttaagtctattatgctttatgcaaatgtttagatttccttgttaaaaatctgctggccaggttaggttccctttctgtagctttattttcaactcataatatagtgactattaaatattctttactcaacacattatattgtaaaaatatacacttagttctgtttctatcactaagccactactattttaaaaaggaatatcttgcattgttaagtttagcagcccaaattcttaaaggccttaggaatggtgctgtccaataagataaccaatagctacatgtggctactgagcacttaaaaaatgagtctggccaggcatagtggctcacgtctgtaattcagcattttgggaggctgaggtgggaggattgcttaaacccaggagtctgagaccagcctgggcaacacagggatgccttgtctctgtaaaataaaaaaaataaaaaaattagctgggcacggtggcatgtgcctgtagtcctagctactcagcaggctgaggcaggaggcccacttaagcttaggagttcagggctgcggtgagctatgattgtgccactgcactctagcctgggtgacacagtgggaccgtgtctccaataaataaatgaataaataaatattaaaaaataaaaagtgtggctagtccaaattgaaatgtgctgtaaaatacacactggattcctttttttttttttttcaaatcctgagaacctgtgaaacacactgaattcttaagatttagtatgaggaggggaaaaaaagatcaatgatttacatataacaatgtaaaatatcaataatttctatattgattatatgatgaaatgatcatgttctggatatacttgattaaatataccattaaagttaatttcatcttttatttttactttttaaatatgcagcattgcccaataaaatacaggacaaccagttacatttttattttatatattcctgcttgggacataatatttaaaaattattcattctatatctgaaattcaaatttaactaggagtcctatatttttatttgctaaatctggcaattttattaatatggctactagaaaagttaacataacaaatgtagctccttatcctatggaacattgctgctttagaatcacctcgctgctttttttttttttccagttagcttctgaataaactctgcacggaaataactaatctgtggggaatatttaaccctaggctaggatcgttaatcgtgaagttaaatttttacatctgcatgaacaaaatggcttgttacagacgaaaatgtggaaagggcatctggactagaatgaaaagtcatagctcccagcctctctactagggtagttaacagtcccaggttcaaaataatccccgtccctcttataagattaggcggtgtcaagagcaactatctgtgagaccctgggccagtgactttctccttacctccgcccccaagtaggccttgcaaaaagctgggaggggtgcgttttcaacactggagcttcgcggccgctctcccactcgctccccgcccggcgctagaggagcgagttcggactcggaccccaaggcctcgagtcccgctgccttcctaagccgagcccgggctacctcggtcgtccccagcaggcttggctggcagaggccgggcctcgccaggtccccaggacaggccccgcccgggcctcaggtgcactcccggcccgccccgcgccctcgcgtcccgccccagctccgccttcgccggcgccgctctgcctgccagcggggcgcgccttgcggcccaggcccgcaaccttccctggtcgtgcgccctatgtaaggccagccgcggcaggaccaaggcggcggtgtcagctcgcgagcctaccctccgcggacggtcttgggtcgcctgctgcctggcttgcctggtcggcggcgggtgccccgcgcgcacgcgcaaagcccgccgcgttccccgaccccaggccgcgctctgtgggcctctgagggcggcatgcgggactacgacgaggtgaccgccttcctgggcgagtgggggcccttccagcgcctcatcttcttcctgctcagcgccagcatcatccccaatggcttcaccggcctgtcctccgtgttcctgatagcgaccccggagcaccgctgccgggtgccggacgccgcgaacctgagcagcgcctggcgcaaccacactgtcccactgcggctgcgggacggccgcgaggtgccccacagctgccgccgctaccggctcgccaccatcgccaacttctcggcgcttgggctggagccggggcgcgacgtggacctggggcagctggagcaggagagctgtctggatggctgggagttcagtcaggacgtctacctgtccaccattgtgaccgaggtgggtgccggcccctgctggggctgagaccagggctcggaggacctgtcgcggtccttgaacccgagctcctctctcccagatgcgcactggacgctgtcactccccctcccccaacggtcaacaccctagcgatggagaccctccagccaggtggcttgggaacgcttcacgaggtgacctccagccacagtgtgctcctccctgcacaggtggtcagtctggcctcccgtcctgatggccactttgaagagggtaccaggaaggtcctggcggtccctgggcgatgctctatggccctgtgtgtccaggacttactctagttggggttgggggtggtaagtagcagagccaggacttgggccaggggctatcccgtttttcctctagtctcttgatttctttttagaagagaagaaatacttctctttcctgaacttttaaaagttaaataaagcatgtgtatacaactgcctcttccctttttcctctagttactccttcccctaccgtccacaacccaaaaacgacaatctggtcatgccctgtaagtaattgtttgccttttcccatggtcagttgtcagtcttttttttttttgagacagagtctccctctgtcaccaggctggagcgcagtcgtgtgttcttggctcactgcaaccttcgcagtcgtgcgttcttggctcactgcaatcttcgccttccgggctcaagtgattctcctgcctcagtctccgagtagctgtgagccacgacgcccagctaatttttgtgtttttagtagagacggggtttcaccgtgttggccaggatggtctcgatctcttgacctcgtgatctgcctgcttctgcctccaaagctgggattacaaccgtgagccaccacgccaggccgtcagttgtcactctttaagatccattcatctgaagatgggttcagggtgacttgttgacctggaatattttctcaggtattatgaggcaaggctgtcggccagatttagttaaagcatacagccttaggtcatagggtgtaggggagcctttctcatttctcatccccttggattttccctctgggtggttttgtctgtcccctccgaacctgttggagcagttgttggagctggatgtaggaacatgatgttaatgatgtatgtgttttgtgtcttttttagacactggcactctagctccctgaagtttcagcagcattgagtaagtagccagtgaatagccctcattgatagataggctcactaaatgtgcagatgaccaattcgcaggttagagaaggcttcccagaagaggaggcctctccgtgagcctagggtgttcagctcagcataatagtgagctgaaggccccagtgcagcagcaagaaaccacccagcaggacggcggagttcacagagaggggagagttcatagagagggagagtgccacaggccctggcacagcttcaagccctgctggatgttggtgctgagcctcccctcctggagcctcagaggggcttacaggggctctggagatcccaactgtgttg

SEQ ID NO: 1881984 - DNA, 4001 bp, Homo sapiens
gtgggggctggtttgaaggaggatggatagtgagggtgctttgtggatctcaaatgtaagtcatcaggcttctggtggcttctggtgtttaattccatcttataaaagtggcatgatggaatatgactaggtaaaactctattttctggcattgtggtggtatctttttttttttttttttttactagggtcaacatgtttatctctatgggaaacacacacaaatactaggaagatttgcttcgtattgagattaacagcatcagctttgcaaaagcagcctgacaaaaggctccatacatctaataccagagactagaaacagaccaaaaaaaaaaaaaaaaaaaaacacacaccacacaactggtaaacttatcaacctaggtctatccaactttcgctttcatacacgcgctctaaaacaacttataataaaaatggaagggaagacagatccaatttgaaatcctccttgagaaaaaacaaatcaaaactagttcctggggaagaaagcctcagctaggtcaggaggaaacttacgcatctttgattccctttccgctttggagaggcattacccgttcaagcccagccaatgcggccggccaggatttacagctcttatcaagggttagattttgcgaaagatataaagaaaggagtttcctaacacaccgggtcttctcacagcaacaagacaccgaaattaagccttctatggtttgtgtctgtaggactttttagataaaactggcagccccattagataagaaatggctttttagaagctttgggggaagcgcgggggttcttcgtggccttcctgtgactgtctttgggagaccgtaacagatgatgggaacatgtaagaatgattgaagaaggttaccggcgagttgcacctaacagtcttctctctccaagtagtttctcgagagaaaattatatattaacgcctggggacgtgaaataggtctttcactgttctgtaataaatccctccctactcgcgcccttagactaatgcatttttaaaaaatctccacaaagtcatggagacttgtccttataattaccaaaataccacagctagttgcacaagtttgcttaaaaacaaagggcaggagaccagcagtgagaagaattgaacagtatataaaaatcttacaaactttagactactgaaagatcatttcgctctttggcttcgggttagtgagcttcaattctagagttaaactgagaagcagacctcgcgggtctgaaagacaaaaagtcagtccgcggagtcaacttcggtttaccggtgcgttccaacctgattgtcccaacagcaagaagcgcccctttcctcccacccaacgtttttagatatctgaggttgggggagacggagtaatggtgtagcagtcaggaaacagttcctctgggtttaatcatcccattcccgattcttcttcccctagcgcgccgagcgcagccagttctggaggaactagccctccggagcagccaaggcaggccaggccccggggatgtgcaccacggcgtggggaccaaaccaagctgaacggcctgctccaagttccccccttttcctagagcccgggagggacctcgtcaacaggtagacctacccaccagccactcgccaccggcggcagaaagtgagccccgcgcgcaacgcggccagccggactgcggggaccccaggagcgcagggcggaggagcagcgccacaggaggcgagggcgcaggcggcgcggccgggaaggaacgcgggaggggacagaaggaagaggaagaggaggagagggaggccagagccagaacagcccggcagcccgagcttcgggggagaacggcctgagccccgagcaagttgcctcgggagccctaatcctctcccgctggctcgccgagcggtcagtggcgctcagcggcggcgaggctgaaatatgataatcagaacagctgcgccgcgcgccctgcagccaatgggcgcggcgctcgcctgacgtccccgcgcgctgcgtcagaccaatggcgatggagctgagttggagcagagaagtttgagtaagagataaggaagagaggtgcccgagccgcgccgagtctgccgccgccgcagcgcctccgctccgccaactccgccggcttaaattggactcctagatccgcgagggcgcggcgcagccgagcagcggctctttcagcattggcaaccccaggggccaatatttcccacttagccacagctccagcatcctctctgtgggctgttcaccaactgtacaaccaccatttcactgtggacattactccctcttacagatatgggagacatgggagatccaccaaaaagtaagaggctattttaccttgtggggctcggtgtgctgttcttgtgcggggttctctctcaggcacaggctgaggtgccaagggctctttggagttggagtcattgcctggagaaagagaaaaggtggctttttcttgttgccgccacgcctgcatgcttactgtcggttcttatcttcgggaaactgattgtaccttgtgtgtgaattcgcctgtgtgccctccaaagctctagctttctggtgctaagcggtgatttcctcctggggaatcctgagctctccgagaaggttattatgttgcaaaggtctgcctgcacagtcaatgcccagagatgtgaattagcattagacttgcaaaagagaacgagtgacaactgtatttatgcctgctcttgctaacaatatccagtcctgtgtgctatttaagagcgcgcttcacggaaaatatagacatccctgcgttcacttaacgcttctagtcaaaaccttttctttgacttgacttatccataatctttcccaatgattatagcaaagaggaaggggggggggagaaatacaaaatgagcgggtttgattgcgtgctaggcgtacaaatgtagactattccaatctgcattttacatatattccacctccttttaaaaatgagtcaaggttttgatggcacatttcaattaccatcccaaagtgcaatgctctaaaaaaaaaaaaaaagaaagaaagaaagaaagaaaaaaacctcccagagtacgccctataagagaacgacactaaaagtgtgtttatctctgtaggaagtaaacggttagtcaatcatgtatttattttcatttcagaaaaacgtctgatttccctatgtgttggttgcggcaatcagattcacgatcagtatattctgagggtttctccggatttggaatggcatgcggcatgtttgaaatgtgcggagtgtaatcagtatttggacgagagctgtacatgctttgttagggatgggaaaacctactgtaaaagagattatatcaggtatggcatttacacttctttcttaattttgtgggatttccctgaatctccccactctttatgtattatttggtgtggctttgtctttttgtgaagtttgcctcagtgtagtcatacaagccaaagttaccctgtacatgtgttaaaaaaatcaagctatgctgttcatttcattctttagttgagaaaaacaaaaacccttaacagtggtattcataattccggggtattgaggcttgtttaattactcttggagtttatgatgcacaaattattttcctctttcaccctcccccttacaaaacaaaattttaaaaagatggagaagtttggatttttagctttaaaatagggttgatttttgttgtatagtgcagtgttctgtttgttttagtcctttttaaaattagtagcttacaaattctttggtggcatcaatgcaataggtgaaataaaagtttgaccgaagcatgtttagagatgtactttgaaagagcgagtacaggtattgctccttttatttttggggtaagacctccttctgagaaaaatttaaaaccaacctaaatattccttggaaaaaacaccggaaacttaatcttt

SEQ ID NO: 1881985 - DNA, 4001 bp, Homo sapiens
ccctacatgctaaaagtttttaaggattcagggtgggagagtttatcagaggcttgcactgctcctatgtctctttgttgtgcttatctggaagggagaattgtgtgtctgttcccatacatcttgcttcagccgcaggcatacctcccccctcccccgagtctgctttagcttccctatcttagtgcatctgaagggaaaggacagtgattattaaggcccactggtttaccggggcccattgtatgagggtgaagtttggtagttacttgagagactttcccccctccccccacctccctctgtgcccaagctgtcttatcttttactgcctgctctttctggctgctgcttgtagttagaagtgaagtgatttccttgaaatgcatggggctagaaagggagctggaacttaaagtggcagtgtttgtctgagatgacggtgctcctgctctgtcacccctgccttttcatgcccgggaaccctgccctgcaccacctctgtcctctgcactgcagcaactctgcccctgacactcaacaccacaccctgcacctcatcctcagtgcagcagcacccctggccctgacacccagccccaaaacttgcacccgtaagtgttgtccctgacctcccatggccccaaagccacatcttcaggtgccctcccagacagcggcacagaactcccaggctgcaggctgggtctcagcccactgcagcccctccaagggagccaccccagaaaccacaggcttttaggtttttaaagaccaggtggcaaaaacgcaggagagcaaagcaaccttgccaaagagagcctctgcactcctctgccagccaaagtggcagagctggaggaggaatgaggaaggtagagctcaaaaaggaaaccaggaatcgccacactgtcttccacaatggttgaactaatttacactcctaccaacagtgtaaaagcgttcctatttctccacatcctcaaggatctagaaatagaaatgcaatttgacccagcaatcccattactgggtatatacccaaaggattatcaatcattctactataaagacacaagcacacatatgtttattgcggcactgttccacaatagcaaagacttggaaccaacccaaatgtccatcaatgatagactggataaagaaaacgtggcacatatacaccatggaatactatgcagccataaaaaaggatgagttcctgtcctttgcagggacatggatgaagctgggaaacatcattctcagcaaactaacacaggaacagaaaaccaaacaccacatgttctcactcataagtgggagttgaacaatgagaatacatggacacagggaggggaacatcacacactggggcctgttgggggctggggggagggatagcattaggagaaatacctaatgttgatgacaggttgatgggtgcaacaaaccaccatggcccatgtatacctgttaaccaacctgcacattctgcacatgtaccccagaacttaaagcataataaaataaaattttaaaaaaggaaaccaggactgcaccatctccttcaaaaacagcagacccgtgccactcgtggcttcctgggctccctgccccttcgcccacacctgccccgaaagagctgtcctgtttgcttcaggacaccggctttggcgcttgggacaaccacgctgggaactcccactgcgctaggttctgggcaccagccccgctgcccgcgggcgcctgctcctgtcagagacctgcccgccgcccgccaccagtgcgctcccagccgaggccaggtggccagtcacacgcagcccgctgcccagcgcaagcagaaaggtgcttctcaaagcctcggctccgccgcttggcactctgggccacctttgcactggccgatgcgggcgcctgcagccagcaagacttacttttgtgagcagcctcggcgcaccggatgtcgtctttgccatccccagtgggcgctggggccgcgtctggagagacagtggctctggccggcggggtgcggcgctaagcccgaccgccccatgcctgcccgggtgaggccgacgtgggcgtggcacctcggggcagggactccagagcactcagcggctgcgcgccctgctctgtcactgttgggctaggcgggtgccggctgctggcgaggagccggaaggggcagcgcaaggcggcgggtgggagtgggcacgggccgggcttagctaggagcggggcacggataggagcggcgcacgcgtaggagcggggcgcgggcaggtacagaacgcgggcaggagcaggacgcggaggggagcggggcgcgggctggcagaggtcagaacaggacgcggtagcagcggggcgccactaggcagggataggagcgtggggcggtagctgccagacaggcgggtgctggaaaggccaccagtatcctgggtcagcgcacctctgcaagcacagccgctcctttcaaacaggtgcgccctttccactgcacagcgggcaaggaaaccaggtggggatgcaagatctggtactgctggggttgctggggttgcgacccagaagactctgagaacaacgccctctccccaaccccccatccctaccccagcttcaggctcccccgcagcgcacccccagccatttctcagaggcagaggcacagtgtagctgggcctctgcatggccaaaggtgggaggaggggaggagctggttagggagggggaaggacagccttcgtcagcatccagggcagtgcagagggtgggggtcctggaggcctggccaagaagaaatgtaaccagttgtggaaaaacaggagttagagagcagggaggcaaaggcgttggtcaacagacaccaggtagctgaggcactccggagggctgagggaggggtgaggggcaggcctctcactatcaggcccagagctctagctcgtaagtttcagctccctactgttctctgggaggtttcccaagaaaactccattgagacaaatgtaactttctttaaggctgggatgatcaatttctgtttattcaaagcagtagcaaactttttctatgggagaatttggccactttcagcctcatggggggagtgtggagggggtggccttcccccttctacacaggggaagtgggatgtgggactggcagcctaggagagccagcagcagagaggaactggagccccaaagaatccaattttcccccaaataaatgatgcccaggatcacattcacctctaataatgggaagccactggacctgtgctgggggatcctggggtgagcctacgacctggggcttatacccagtgcctaggacccggggctcacacccagagcctaggacttggggcttacacccacagcctaggacccggggcttacacccagagcctaggacttggggcttatacccagagcctaggaaacaaagcttatacccagagcctaggacccggggcttatacccagagcctaggacttggggcttatacacagagccaaggacttggggcttatacacagagccaaggacgtggggcttatacccagagcctaggaaacaaagcttatacccagagcctgggatatggagcttatacccaaagactaaatcacaaggcttatacccagagccgaggacacaaggcttatatccagagtttaggacccgggtcttatacactgagcctaggacactgggcttgtactcagagcctaggacatggagcttatacccagagcctaggaaacacaagtcttatacccagaaaaaacgtggggcttatacccagagcctaggacccggggcttatacactacttatactctacttttagtagagacggagtttcaccatgttggccaggctggtctcaaactcctgacctcaggtgatccacccgcctcagcctcccaaaatgctgggattacaggcatgagccattgtacccagccatacagtac

SEQ ID NO: 1881986 - DNA, 4001 bp, Homo sapiens
gtgtctgtttaatcttttcttggaaatgtctgttgctgaagttttctcaccttctgcttggtcatgtctaagagacccacagagtatctgtcacagttgaggaaagcacggactgtgtacagggctttgtggaactgtcgttcgatgtccgtaagttcttcaaagactttgctcccagaccacagcagtatctgaaaaaacacaaaaacatattcataggttttgaggtgcaaagtagtagctcacttagctggagaataacaacaattctgtaaagttgtctggagtttatttcatttacccttcacaataatccagagaaatagacaggttaactatcccctatttttacttttagatttttttaaagtttttaatttttttttttgctttggttgacagtttattaaatacactacatttgtaccttattctgtagtttttaaaaattgttcacacatgaactgagtaaaaacgtactttatagaaaaccaagtacaaaactaaaatgaaagaatgcacttattgcacacatattaaactgctgaaatgttagaaattaatctgtacaagtacctaatgaagaaggttatgaaatattaggtggttcgagtttctcaaatctggcaacagaccatgactttgaaagtgttaatgttgaagtgttgatggaaaaatgtctattaacaaaactgcttacagtgtttgagaaacacgacaaaataattgtttttctttcacagacatttttctaaatcaattctctacagactctctcccattcagaatcagttgtgtggaccgatgaggcaaaagatgaattccttttaaaaaacaaaactggagcctatttacaaaacatgcaaaaggagaattttaagcaggtgttacctccagagtttctggaagaaatatattttcaggttgtggactataaaatggcgtacaatgaagagacagaaacaaagaagtttgcaaatcttttatatttccagctgttgagataatatttttgagagctgatgttacctctagcggcaaaaccagagccagctattaagcagccagaaagctacagtaattgaatacacgaccatttctcttttagcacgttctttgttctcctcgtccggaagttgtagacgtctatttagtttgattatctgtcgtcttagtgaagctgcatctacaacagtcaggtcatctgatgttccttcaattgttgtatctgtatttgaaatgccataaagagaatcatttctgaccagctgtccattttggcgaacagcagtttcactcgtagaccgctctctttttagtcggccaactgcacggatttcttcattttgaggggttgtaggaggtctttctaaatccagaaaatctagtggtctttcacttagcctaagtacacgaggtgctgtttttagtgcgaggagtttaaagggagttgactgaataaggtcaagatctgctggtcttgaaaatgaaacatcctcattatttcctgctacaacaatcctctctggaacttgcattattatcacgctagcatttggaactcctttttggaatccctgttccaggttggcgtttggcggtgctacttttaacttttctgggaccctcattcgctgactaatgccttcagtatattccatttcgtacgaattcgactaatttctgccatctcagcagcagtgggagaaggaaatgctgccccactcaccaaatgtgtaccaactactgcttgctgtttggcactgtcggcttctgtgcttcatattaaatcctttaacttgcttcaatgtgcatgtgctggattgagagacacttttgtccccctccgcccacaggagggtcccggtgaggaccgccgccctccggctcccagggcgctcaagtgggcgctctcagaggcagttggccgagagcacggaggcgcccaggcacagcaccggcggagtggccagcagagggccagggcagaagcgcaaaagctaaagtgtttgtttttatgtatttattttttagggacagagtcttactctgtcatccaggctggagtacagtagcacgatcatagctcactgtagtctccaactcccgggctcaggcaattctcccatctcagcctccccagcagctgggactacaggtggacgccactgcacacagataatctttaaattttttgtagagatgagtttccacttctggcctcaagcaatcctcctacctcagcctcccaaagtgctgggattatgggcatgagccaccttacccagcccattatcatccatttattttaaaaattttattttaaaaatagagatggggtcttactatgtttcccaggctggtctcgaacttctgggctcaagcaatcttcctgccttggcctcccaaagtgctggaactacaggcgtgagccaccatgcccagtccaattatcttccatttgtagacaaacaaactggggctcagagagatgaagtaactggctgctttacattgggtccagctctttccctttcatttatctcataggtttttaataaaaataataagaaacttcaattgagcactattgccctatatgcattatctcgtttactattgatggcaaccttttgagggtggcaccataatcatccctatttttcaaatggggagactgaagcatagagagattaagtgactcacttagggtcttagagctaggcagtggttgagcagggattcagatcaaagccatctgtcttgaagcttgtgcatataaccactgtggtatacagctttacagacaaccactacctcataacactcgtgatgctggccagagactggcttcctaggcaccttcattcccatctgcctgccagtcctgaccacatcaatgcttcagggaaaggacgagtcaagtccattcccttggcccaagccccttacctggccacgtcgagtttcacagttgtgcaggtaactcaggtggtacaccttcatgattagatttgcaaaattgaggtacttgagaagaatctaaaaatcaaacagcatgaggggaggcaggtgagaagaagaaatccatcctctggctacttttaccatcagcaaatatctgaatattttcaaagcttcatcagagacaatttgggcagatggatcctagaatgcagactcataagatgttgcatgagcataaaactcaccgaatgtagaatgttgatgttgatgggagtgtattcatgaaaaatagctactatttattaataagttccctatgaggttgatactgaaaaattatcaacattttacaaataagaaaaccaaagttcaaagaagttaaataacttgcaaaaggcaaacagctattggcggagccagaacaattatccctctattcctgactccaaagcccaatgtcttaactattattttatcctgcctccctcagagaacatcaggtgaattccctgtcttacagatgggaaaactgaggccaggtcaaacagcaaagttcaggggacttcataggctgggagaatgtgctagcatggctatccttagtctctaaagcattcttacctcttcatctctcttggtgaagtgggatccatccactttattcacagccatgattatggccaccacatccttcccattcattatgggggaagccaagatgttcttggtcttgtactctgtgaggatgtccacaaagtcacagaaatgctcatcctaaaggaaggcagagataagcacggacaggcaaatgaagagcaagaacagtggaacggcccaaagcccctgttgacaagggaataaaggtgcttccatctattcctcttcaacaggggcagggaaatcagagatgacatctgtcatggaagcttccaaaatccagtagaagaagaaagtctgagatgaaatccactgagggctgtggaggagaggtgtgcaaagcagtgtgggttccagggatgggagtgggggactga

SEQ ID NO: 1881987 - DNA, 4001 bp, Homo sapiens
gctactcaggaggctgaggtgggagaatcacttgaacccaggaggcagaggttgcagtgagccgagatcatgccactgcactccaggctgggtgacagagtgagactgtctcaaacaacaacaacaaaaagattcatccatgctactgtgtggataaatagtatttcccattttttcttgctgaatagttttccatcatatgtgccacattttgtttacccattcacttattgaaggacatcttggttgcttctggttttggataattatgaataaatctgttataaacattcacgtacaggtttctgtgtggacgtgttttcaaatcaggtggttttgaaaacctaggagaaagactactaggtcatatggtaagtctatgttgaacattaaaaactgggaaactgtcttccaacatggctgtatcatttttgcattcccattagcaatgaaagacagtaccgatgtttcaaatccttgacagcatttgttattgttagttcatttcttatcttaaatattctgatgtgtatgtagtggcatcttatgttttgtactttgcctttctctaaatgaaaaacgatgttgacagcatcttttctttcttttttttttttttttaaggtgtacacttttattcaactggtctcaagttagtgtacaggtaagtcctggctgcatccacgcacttccagggagaccaaaagccttcatacatcttaagttgggggaaaagaaatggggagccacgaaggctgatcattcaaaataaaacaaagtaaaaaagtattaaggtgaagattttttaaaaattgtattacataatttacacgaaagcaatgctatcacctcccctgtgtggactccggagaggactgggccattctccttagagagaagtgaggtggcttttaggagggcaagggacttcctgtaacaatgcatcccatgatatttggaatgactatcaaaaaaaagaacaacgtacaatcaaagtcctcggccacattgtagaactttgggggatgctcgctccaaccgactgctgtcaccttcaccgttccagtttttaaatcctgagtcaagccaaaagaaaactccagccacaaaaaaaacaaagtcacaccaatctcatcttgtttttagtgcaagttaggttttgtcaagaaagagtgtaatgcaactaagtcacagtccacctagaagcatttgcggtggacgatggaggggctggactcactgtactcctgcttgctgatccacatctgctggaaggtggacagcgaggccaggatggagcctctgatccacacagagtacttgcactcaggaggagcaatgatcttgatcttcattgcgctgggcgccagggcggtaatctccttctgcatcctgttggtgatgctagggtacatggtggtgctgccagacagcactgtgttggcatacaggtctttgtagatgtccacatccgacttcatgatggagttgaaggtagtttcgtggatgccacaggattccatgcccacgaaggaagtttggaagagtgcctcggggcagcagaaccacttgttgctaatggtgatgacctggccattgggcagcttgtagctcttctccagggaggagctggagcccaccatggccatctcctgctcaaagtccagggggatgtagcacagccttttcttgatgtcacacacaatttcctgcatgactgtggtggtgaagctgtagccacactgggtgaggatcttcatgaggtagtcagtcaggttccggccagtcaggtccagacacaggatggtgtgggggaggggtgtacccttcatagatgggcacagtgttggtgaccccatcaccggagtccatcacaatgccagctatggccagaggcgtacagggacagcacggcctggatggccacgtatatggctggggtgtgaaggtctcaaacatgatctaagtcatcttctcgcagttgtccttggggttcagaggggcctcagtcagcaacacagcgtgctcctcaagagccacacccggctcgttgtagaaggtgtggtgtccctctccctctccctctccctctccccacggtctccctctccctctctccccacggtctccctctgatgccgagccgaagctggactgtactgctgccatctcggctcactgcaacctccctgcctgattctcctgcctcagcctgccgagtgcctgcgattgcaggcgcgcgccgccacgcctgactggttttcgtatttttttggtggagacggggtttcgctgtgttggccgggctggtctccagctcctaaccgcgagtgatccgccagcctcggcctcccgaggtgccgggattgcagacggagtctggttcactcagcgctcaatggtgcccaggctggagtgcagtggcgtgatctcggcttgctaccacctccacctcccagccgcctgccttggccccccaaagtgacgagattgcagcctctgcccggtcgccaccccgtctgggaagtgaggagcgtctctgcctagctgcccatcgtctgggatgtgaggagcccctctgcctggctgcccagtctggaaaatgaggagcgtctctgcccggccgccatcccatataggaagtgaggagcgcctcttcccgaccgccatcccatctaggaagtgaggagcgtctctgcccggccgcccatcgtctgagatgtggggagcacctctgccccgccaccccgtctgggatgtgaggagcgcctctacccggccgcgaccccgtctgggaggtgaggagcgtctctgcccggccgccccgtctgagaagtgaggagaccctccgcctggcaaccgccccgtctgagaagtgaggagcccctccacccggcagccgccctgtcagagaagtgaggagcccctctgcccggcagccaccccgtctgggaagtgaggagcgtctccgcccggcagccaccccgtccgggagggaggtcggggggtcagccagccgccccgtccgggagggaggtgggggggtcagccccccgaccggccagccgccctgtccgggagggaggtggggccgggagggaggtggggcgggtcaggcccccgcccggccaaccgccctgtccgggaggtgaggggcgcctctgcccggccgcccctactgggaagtgaggagcccctctgcccggccagccgccccgtccgggagggaggtgggggggtcagccccccgcccggccagtcgccccgtcagggaggtgaggggcgcctctgcccagctgcccctactgggaagtgaggagcccctctgcccggctgccaccccgtctgggaggtgtgcccagcagctcattgagaatgggccatgatgacaatggcggttttgtggaatagaaaggggggaaaggtggggaaaagattgagaggttggatggttgctgtgtttgtgtggaaagaggtagacatgggagacttctcattttgttctgtactaagaaaaattattctgccttgggatcctgttgatctgtgaccttacccccaaccctgtgctctctgaaacatgtgctgtgtccactcagggttaaatggattaagggcggtgcaagatgtgctttcttaaacagatgcttgaaggcagcatgctcgttaaaagtcatcaccactccctaatctcaagtaccccgcgacacaaacactgcggaaggccgcagggtcctctgcctaggaaaaccagagacctttgttcacttgtttatctgctgaccttccctccactattgtcctatgaccctgccgaatccccctctgcgagaaacacccaagaatgatcaataaaaaaaaataaaaaaataaaaataaaaaataaaaaaaaaaaaagaaactatccaatcctcagcctgctcggctgcttactctgtttcacccatgccttctgtgaaaacaacagtaaaggttttgcccaggctttttcctcattctgc

SEQ ID NO: 1881988 - DNA, 4001 bp, Homo sapiens
ttttcgtacttttagtagacacggggtttcaccctgttagccaggatggtctcaatttcctgacctcgtgatccacctgcctcagcctcccaaagtgctgggattacaggggtgagccaccgcgtccggccttttgttttttttttttgagacagagtttcactttgtcacgcaggctggagtgcactggtgtgatctcagctcactgtaaccgccgcctcccaggttcaagtgattctcctgcctcagctttccgagtagctgagattacaggtgtgagccaccatgcctggctaatttttgtatttttagtagagacagggttttgccattttggccaggctggtctcgaactcctgacctcaggtgatccgtccacctgggcctcccaaagtgtggggattacaggcgtgagccactgcacccagccatgtgattgtgttttaagtgttattacaaaagagtcaaaaaaattaaagttatagaaagctaagatttattatagaagaaagaaaaatgtttagtaaatttagtgtagcctaagtatagtgtttataaagtgtacagtaatgtcctaggccttcacattcactcaccacttactccctgactcacccagagcaacttccagtcctacaagcttcattcatggtaagtgccttacaagatgtaccatttatttatttatttagatggagcttcgctcttgttgcccaggctggagtgcaatggcacaatctccacttacaacaacctccgcctcccgggttaaactgactctcctgcctcagccttcccacgtagctgggattacaggcatgcgccaccacgcctggctatttttagtagagatggggtttctccatgttggtcaggctggtcttgaactcctgacctcaggtgatccacctgcctcggcctcccaaagtgctgggattataggcgtgagccaccgccccggccaagatgtaccattttttatcttttatatttactgtaccttttttgtgtttagatatacaaataccactgtattaccgctgcctagagtatttggtatattaacatgctgtctgcatttgtagcgtaaaagcaagaagctataccacatagcctaggctcgtagcaggctatccatctaggtttgtgttaagtacactgtgatgttcactcaaggatgaaattgcctaaagacacacttctcagtattcccatcgttaaacaatgcatgactatatatgtaaaaataacgacttcatcatccttaggcaaaaattacatccccgtccataccaattatctccaatagtcttctctcactagtcattaggtggaattagaattgagctttagggtaagtgtttccaccacagagataccatttcaattatcatatgacacctaccctaggccagacgttcactgaggtttcacatctcccagcaatactgaggacctagcacagcaaatgaaataccacaattcctggattcaaatgaagtcttctagtttaacagaaatgtatgtgggcagggttgattaatgtgaaatgtcctcccttctgtttatgagatccaacaattataggcaaaaggagaggctgagcacagcactgacctctgctcagtaacttcctctcaccctcacctaaacttcaaaaccagaaatagcagaaccacattcctagagtgaaagaacccaacccaacctttcaatcaaacaagtaagtgaaaagaagcattttcaacttagaagggaaatagaaccccaccctcctcatcctggtcttccaagtagccgtaggcctctgtaccaacaaagcaaagattgttgtaataccaagatccagatccagcttttgtgtgcactgctggatattttttttaagcagaaaggcacaaaaacaacaaaaaccaattatatgcaaatactcatttttacactcagtctatcaaactaagagagatgctacttacggcgtggatttataggaagactctggataaaaccgcttgtcattcactttgccattggaagagtatgccatgggactgtcaactctttccacatagtcagatgggggtgaaggcacgtcctgtgtgcctgcagacacatttttaaccttaaaaaaccccaagagatagttattatttatcttgtaatgaaaagggggaagacactgaagaaaattatcttatatacattatctaatatttatgtggcccattaaatactattaacactaataataaaaaggcaatcattacaggttaatagttaaatccacattgtaatagacatataaacagtgctactgctagtttaaacaagtatattaccaagaagaaaaatctgatcacctagttctcatcctaatgtgattaggtttcataattatctatggcaattttccacctccatattaggaagactggtctcattatctcacgcccacattagaaagaccactctcatttaacctaagccaggtctcggttaggagaattttcatttctaacaagctctcaggtaatgctatgttgctgtctgtgcaccacacttggaaaagcactaatctagaacaaagcacactggtagttcttaatccattcacctctcaacgtggaatgttaaaaccacagaagaaattaagaagttcaagctgacttctactcttttaataagagatttgtttattctcccttaatgtacgttctctatggctctattactaataacctacacaatatatcacacaacatcagtgccttcccttttcactttccttatttcattctgatgtgtaagtgaattcatcctacaaaagtaacatgcattagaaattatgccttaataggccaggcgcggtggctcacgcctgtaatcccagcacttggggaggctgaggcgggtggatcatgaggtctgtaaacaatttacagaagactaaagggatggtgaaaattaactttgttagcaattttaatgagaatccaaatataggagacccacattttttcccatattttcccagttttgaatgtttatgtatacctaaaaggcattacatcctttgaaagcagctgtcattatgcatgaatctggaacatacctacctttaaatacggattttggatttcaaatgcatctctactatgttctaccttattatttgtattcttcatgaactcactttgtcaaaatgcaatactttttgttttttaatttatttttattttttgtagaaatagggtctcactgtgttgcccaggctggccttgaacacctggcctcaagtgatcttcctgccttccaaagtgctggggacggtaggcatgagccaccacacctgtccaaactgcaatacttctgaaaactttagggctcatagttttgttgaagtgatagatgatggctatattctttgttacataacagcaaaacatttttgtttttacatttataaataccaattagaatgactttcagtggattggttttcatttttcacatcatctttaccttcctgttactttgtgtacatatctgtctttcatacttgtccacttacaaactttttcaagtaaattctggtgttacaagcataaaagatgaaagaacgttgtcacatggtcacttgtccttttagcaattatgcgatgattcaactgttctaggtacaactagagggagagtatcccaggcaagggagataacaaatagaaaggccctaagacacaagtgtatttaacatgtttggggaacaacaaggagttaatcgtggctggagtggaagtaaggaggagagattaaggagatggagctaagagaggtagtcaagggccaggccatatgtcagcgatagtaaggtcttcagcatttacttttttaagctgggagtccatggaaaggttttgaacccaaggtatagcatgatctgacttatagaaagagacttctgattgctgtgttgaaaatacaccataggtttgaagggagga

SEQ ID NO: 1881989 - DNA, 4001 bp, Homo sapiens
gggaaaggatagtttggtttgcacaggagcagcagtgatgaaaatcggaaatgatgagtgtggttggagatatttgtggcagggtttgtaggtctctttgagggggctcaactcacaaagtgcagatttttattaaaatataaatgcttgtgggaaaggacattttcctactgagcagtggcagtcccatatttcttctcagatttaaaaaaaaaaaggcctcagtctgaaaagtgaggagatggaggatttgagcacttacaagttcacctgcattgcatttcccagaagatagaaatcaatgatgcattttgaagatcatgctgctagagacagagaaccacaacttgagcttttctctgggcttagagaggaggtgtatgtctcgctgtcaattctacatccaacgctggaatctttcagcccattttcctccccggctgtttttgaactactatccccaaatatcgaggatatctgacagagtgaaccatcagaataaggagcgattgccacagagttccatccagtaggggagggacttgatgtgcggggcaagcctgatgcccgggtcaggcgactgtgcctttcattctccacggagatcttgaacctagagtttccaagttccgaagagatgcggttgtcgacagctctcctagaatctctgatggctctgaacggggacaaaggtctagggcagagggatggtgtggaaggacccagccacggccattggaagagcagtttcctgcaatgtaatgctgtttgcgaccagcataagctttagctctctcccaggacgagccacatccgccccattcacggtccttattccagctcctttccctctgcgaatcacactgggtgggtcgctgggggcctcggtaattacggattatggcacagccaagaaaaatacaggttttcttaagcctgaagccactgacttgaggggggagagtaggagtaatgccagcagcagttttgtatttggtttttgtttttatattctagtctctaggccacaagacaatgttgcacccagtgccagtcgatccgtcacggcgccgcaaactttccctgaacggagggtttgtggctgacatctctagtttctcagagcctgggagtgatcactggctgcaccgctgatggcgcccaaaagaacgcgcatttgtctttggcaacagcgctgggtttcgcctcgtgcccgcgcctgaagggtcctagcgccgccagattctcacactcgcgggtccagcgcccagcgctgctcctcccaccagtcatcggtttctcacacgcacttcattggcagcactggcgagtcagttttccggtggcggcggcgctagttggtctgcacgaaacgtttcccttctcgctccgtgtgtcccattctccatcccacgtcctccagtgccggggtcatggtcgcagcacccggcgttcccgttggctcttttgccgctgcgcggagccggcggtttttctgtcacagcacttgtacggagtttctcggcggccgaacgtctctttttttctcagagacgacggtttcttggtgacagtaccgttggttgcgccgtaacgaatgttctccttgacagccccaccagctggcgtcactcgcaggctccagacgccgccatttcgccaagccgaggtctcttggttgcggcactgcttctggctcggtgcctgtattttctcggtgcctacagcgcccaggtcgccgatctgagggcttcggagtaccggccgggcgcggtggctcacgcctgtaatcccagcactttgggaggccgaggcgggcggatcaggaggtcaggagatcgagaccatcctggctaacacggtgaaaccccgtctctactaaaaatacaaaaaaattagccgggcgtggtggcgggtccctgtagtcccagctcctcgggaggctgaggcaggagaatggcgtgaatccgggaggcggagcttgcagtgagccgagatcgcgccactgcactccagcttgggcgacagagcgagactccaactcaaaaaaaaaaaaaaaaaaaaaaagaaaagaaaaagaaatctgggtacccgcgaatgcgattttttttaggtttaccgatgatcagtttagcagtgcctgggagctcttataccaagtttgttttcgcaatattgagtcccaccttagctaagcttgtgtgtattttaaactcccatggaagtcaggaaatgtccgcaaacgcgatttctggttaccaagctccgtttggcaatagcaagtcctgccgaacgcgactttttcctcttgtggaccaagtctgaatagaccagctactgcgatttttaagtcgtagtaaaaaaggtttaaccgtgactgcttttttttgttggtgttgtttgtttttgtttttgttttcgtaggaaatgtagacttaggtgtaacatgtaccggtttagatctgacagagatatcacaattgtaggattgcatcttttagcaaggtttgtaatttcttctttctaggattggttctctgtaatttttgcttatttttaaattctctctttgtcttttgctctgagaacgatgttaccgatgtgtttgctttccatgtttacttgcattttagcctttatttttttaattttgattttatttaaatgttatgtattttttttctactaattttgagcgtctcagcttcctgcttctttacttacattctctcaggatccggggagccgagctcggtctcagtctccctgctgtcaggtgccaggttgtgtctggtggctctccttcgtatgcggagctgatggttttgcatcagcgcttttgccagtagagccgactagcgttttctcagttacggcaccgttcttagcgcccagtgtgacgtttcccattcgccaggtccttatgttctctgtgctgtcactttcttggttctcgcaccgctagtatctgctaaagaacttcctaaaccatgttttactgtgcagaacggtgattgcacggagccgctgtacgcactagtaatttcatagcaccgttagctggcgctttttctgtcacaacacattaaaacgggttaaaatactgcaagcggattaaacacattaagaggattaaaacattaaaatgtctcaacacatttttctgacacaacacatttaaacggagtgggttcattcctccgaagaggatgtttaggcgtggaagcaccgctgtttcccaagagcacggtttctctctggcagcaccacttatggcaccaaaacaggtattttttggcaacaccagcactattcgctaggtgccggcgcttgctgagtcccagcgccgccagtttctctttcggtcgttaagtagctcagagccctagcggacagttttcaggtggcagtaatgctcatttcctggaacagatggttcgtggcccttgaagcgctgcgatctgtaaagctagttctctgcaaggtttgcttagtgtctgttttatttcggtttcttttcttgctatgtttatctgtcggaattacagtttgttttggttctatgtaatctctaaaatgttatcgtttttcttttgactactaatttttgtgcattcattactattgagtttcataatacctggcttgcctccgcccacggcctccggaaagcataaatgtccaggctaatgggagtgctgaaggctctgcctcgttgatcagcacaaacgcttgtgtcctgctctaaggcttaagcgatggagcaacgttttcttggctgtgcgaagggggcttgggattccgcagaggtggcgccaaagccccagcctccacctgctctgggttcagaaggttgtgggcggtggcctctccctttttatccagtactgggagagtactcattggacagctgtaatttgggactgctttccagcccttgttagtggcttcaattaaatactttatcagaaaaatagaaactttaagcccaaatgattttt

SEQ ID NO: 1881990 - DNA, 4001 bp, Homo sapiens
tattccagctcctttccctctgcgaatcacactgggtgggtcgctgggggcctcggtaattacggattatggcacagccaagaaaaatacaggttttcttaagcctgaagccactgacttgaggggggagagtaggagtaatgccagcagcagttttgtatttggtttttgtttttatattctagtctctaggccacaagacaatgttgcacccagtgccagtcgatccgtcacggcgccgcaaactttccctgaacggagggtttgtggctgacatctctagtttctcagagcctgggagtgatcactggctgcaccgctgatggcgcccaaaagaacgcgcatttgtctttggcaacagcgctgggtttcgcctcgtgcccgcgcctgaagggtcctagcgccgccagattctcacactcgcgggtccagcgcccagcgctgctcctcccaccagtcatcggtttctcacacgcacttcattggcagcactggcgagtcagttttccggtggcggcggcgctagttggtctgcacgaaacgtttcccttctcgctccgtgtgtcccattctccatcccacgtcctccagtgccggggtcatggtcgcagcacccggcgttcccgttggctcttttgccgctgcgcggagccggcggtttttctgtcacagcacttgtacggagtttctcggcggccgaacgtctctttttttctcagagacgacggtttcttggtgacagtaccgttggttgcgccgtaacgaatgttctccttgacagccccaccagctggcgtcactcgcaggctccagacgccgccatttcgccaagccgaggtctcttggttgcggcactgcttctggctcggtgcctgtattttctcggtgcctacagcgcccaggtcgccgatctgagggcttcggagtaccggccgggcgcggtggctcacgcctgtaatcccagcactttgggaggccgaggcgggcggatcaggaggtcaggagatcgagaccatcctggctaacacggtgaaaccccgtctctactaaaaatacaaaaaaattagccgggcgtggtggcgggtccctgtagtcccagctcctcgggaggctgaggcaggagaatggcgtgaatccgggaggcggagcttgcagtgagccgagatcgcgccactgcactccagcttgggcgacagagcgagactccaactcaaaaaaaaaaaaaaaaaaaaaaagaaaagaaaaagaaatctgggtacccgcgaatgcgattttttttaggtttaccgatgatcagtttagcagtgcctgggagctcttataccaagtttgttttcgcaatattgagtcccaccttagctaagcttgtgtgtattttaaactcccatggaagtcaggaaatgtccgcaaacgcgatttctggttaccaagctccgtttggcaatagcaagtcctgccgaacgcgactttttcctcttgtggaccaagtctgaatagaccagctactgcgatttttaagtcgtagtaaaaaaggtttaaccgtgactgcttttttttgttggtgttgtttgtttttgtttttgttttcgtaggaaatgtagacttaggtgtaacatgtaccggtttagatctgacagagatatcacaattgtaggattgcatcttttagcaaggtttgtaatttcttctttctaggattggttctctgtaatttttgcttatttttaaattctctctttgtcttttgctctgagaacgatgttaccgatgtgtttgctttccatgtttacttgcattttagcctttatttttttaattttgattttatttaaatgttatgtattttttttctactaattttgagcgtctcagcttcctgcttctttacttacattctctcaggatccggggagccgagctcggtctcagtctccctgctgtcaggtgccaggttgtgtctggtggctctccttcgtatgcggagctgatggttttgcatcagcgcttttgccagtagagccgactagcgttttctcagttacggcaccgttcttagcgcccagtgtgacgtttcccattcgccaggtccttatgttctctgtgctgtcactttcttggttctcgcaccgctagtatctgctaaagaacttcctaaaccatgttttactgtgcagaacggtgattgcacggagccgctgtacgcactagtaatttcatagcaccgttagctggcgctttttctgtcacaacacattaaaacgggttaaaatactgcaagcggattaaacacattaagaggattaaaacattaaaatgtctcaacacatttttctgacacaacacatttaaacggagtgggttcattcctccgaagaggatgtttaggcgtggaagcaccgctgtttcccaagagcacggtttctctctggcagcaccacttatggcaccaaaacaggtattttttggcaacaccagcactattcgctaggtgccggcgcttgctgagtcccagcgccgccagtttctctttcggtcgttaagtagctcagagccctagcggacagttttcaggtggcagtaatgctcatttcctggaacagatggttcgtggcccttgaagcgctgcgatctgtaaagctagttctctgcaaggtttgcttagtgtctgttttatttcggtttcttttcttgctatgtttatctgtcggaattacagtttgttttggttctatgtaatctctaaaatgttatcgtttttcttttgactactaatttttgtgcattcattactattgagtttcataatacctggcttgcctccgcccacggcctccggaaagcataaatgtccaggctaatgggagtgctgaaggctctgcctcgttgatcagcacaaacgcttgtgtcctgctctaaggcttaagcgatggagcaacgttttcttggctgtgcgaagggggcttgggattccgcagaggtggcgccaaagccccagcctccacctgctctgggttcagaaggttgtgggcggtggcctctccctttttatccagtactgggagagtactcattggacagctgtaatttgggactgctttccagcccttgttagtggcttcaattaaatactttatcagaaaaatagaaactttaagcccaaatgatttttcaggttcacttgatttaagtaaatctttgacaaataagctgcatttaaaattatcagtaaaataaaattagaaatgtcttcagaattgtcaatatacattattgtttagatttattggtcagcggtttctgatttatctctgctagatattataaggcgtgaaaatttggcatgaaggttataaatctataaatgcaaccccaaacagaattatctttgttcatgtaattttggtaaataaggcatttaatatcattggtttaaagaaaacagctaaatcttgggttactgacagaagagaaaaatccatttatttaaccttaaggttcttacttaggtaaacacctgatattcacagtctataataatggttgacagggacataactgtaactggcccatatgttcattttgcctgttgcccagatagagttgatttgtcaagacagcgaattgcaataaagagtttaatatgggcagagttggctaaattggagacctgaattttattattactcaaatcagcctcccagaaaattcagaagccaaggtttttcaaggatagtttggcagaagggtgctgctgctcagctgaggaacaatcacaggggtgtggaaaacagtcctcctgcactcagtccatttcttgagtggcggccacagaggagtggctgatgctgttggggccatcaaagtctgaaaagtcatctcaaaaagccaaacctaggttctagtaattagggaagttgcaaatcttgtgacctctggaataaaggctggtaatcctttaactatgcccacatcttagcagaaatcaggcccttctcatcctc

SEQ ID NO: 1881991 - DNA, 4001 bp, Homo sapiens
ttatatttgtcagcactaaacccgtgcctcttgcgcctatccgaagtttcctcggattaagaagaaacagccatggttaaaccggtatttgcgacaccaacaattatctgtagccgacgtaccccaacttctacatgagtgaaaaatcgccagcatagccagggcgagactattgcgaattctaacttggtatgatttaaaaattccagacactgctaaatttttttaaattgcattcttcagtacctagattaatacaggagttataaaccgcacgcatggctataatgggggctcctattacggaacaggaatttgctactactaaaattatgtaggcatggttaaagccagaattgttacaaccagaaatcgcaaactggaataactctcaacttgctacggtaagaaataactaaactctgacttggtcagactaagaaatcaggagtttgagaccagcccaggcaacatggcgaaatcctgtctctaggaaggatacaaaaaattacccgggcgtggtggcgcgtgcctgtggtcccagctaccccggaggctggggtgggaggatcgcttcagcccgggaggcggaggttgcagtgagccgagatcgcggcactgcactccagcctgggcgacagagccggaccccgtatcaagaaagaaagagaaaagaaaaagaaccaaagaaaaagaaaagtcaccatcgcacggttaagtctgccttgctacagctaaacagtgacttcctaggaccaagaaatcgcagccagggctagaccgatgccctaaatcgggacttgcttaggctgagaaatcacattttggctagttatttggacaagaggtagaaatagcgggcaccgcgaaatcgaaacttgctaggaccaagaagccaacgacgggcgaaaccgcaggggcctgcgatagagacgccagcggcgccgccgggggactgggttcaggaggccgagcaggaacccgtgcgtcggcgctcgcggcgctgtgaagagacggcgtccgcgcagctcctctgcctctggctcggaggagcggcgggctcccccgcccagcgccggcgtcgcccgggaaccccagactctgcgcaactggctgcgattccaaatccctcagatcggctaccagagcgctgccgccaccgagaaaatggaggcaccgaggaacaagatgtgccgcgaccaagagaactcggcttggcgaaatggcggtgctgggaccctaagagtgacgccagccggaggagttcccaaggacaacatccattttggcggaaccaacggtgttgtcacgcagaaaatgtcgaccctcggaaaagagaggttctgcgaccgagaaattcggtgcaacaagtgctgtgacagaaaaccccccgctcggcgctgctggcgaaagagccaacaaaacgctgggtgctgccaccgtgacaccgactttaggaccccggcctcggatggagaaaggagggtacggagccaccacataacttcctaatgtcttcaaatagcgaaagtgctagccggaaactgccggctgggtttacctattggtgctcgtgtgggactagcagattcgagaaaccagcgggactggaacctagtacacttcggcagttgagaaatgacttaccaggacaaatactgcttctggctcgatggtgctgcccatgaacatccgccggctctgagaaacgagctgcactgtcagtgagaaaccgtgggcactgagaaacgagcggactgcaactgataactgcccacccagtgccactacgacaaagtgctgctggcactactcccaccctccgtcctcaaatcagtcccctcccgcctaagaagacctttatttttcctagcgaagtcatactgagggccccatcaaccgatcccttgcgatgcgcatgggaaaaggaggcagtatagggaccgagaatcgggcggattgggctggccctggtaacaaaagccatccgggtcgccaaccgtcttccactgcaagaaacaaaccttccagtggctgggctccgcccttctccttggtcagagccctccaggctcctaagggcgaagccgacacctcatccctttggaacttgaagttctcagtccaagacctccgtggagagtgaaagactcaatgcctcctgaccgaggcttcaggcctgccccggcagctaggtacctctccaggggatggaactctgtgggaactgctatttaattctgatggttaactctgtcagatggccttgatatatgggaataatcgttgcaggagggtaggggaaataagaatcgcaagactctagcacaggacgtgtggattgatggtgaggcctttgctccctctccccttgaaatcctcaaagggcagttcccgatttctatcacctttgaaattcatccctgatgtcttctccatctttgggaagtgcaatgcaatttcaagctcttgaatcttccctctcccacatttgtcaaatatactgacgctacaaactcctttcttacaggaaacctgaaactgccattgagcagaaggaaaacatccctttccagaacctttctcgtttttctaaaaatctgcacttttggaagtgatcccccaaagagacctccagactctaccatgagtgtctccagctgaactcatcgtgtctaatcctcaccctagcttatcctgttcaaatcatttccatctttttctggatgaacctgggcggatgtcagaccagagaagagcacagaatgtaccagagaggtaagaagacccattttgggctctcacttctcacccactcccaagatggtcacctccagtcttcccccctataccttaccctttcttcagctagccaaaacctgccctggtacttgaggcttcttcagttgccttcttttgcaggcagtagaataaaggaaagagggcagtgtcaatagaagaaaagttacagccactttatctaattgaagatactgtgcagagcctttgaaaaaacaaaatatctcacccaccattcctctctccgtttccaccctagcttcctattttagcaaaaatggtgggatcagcacctctggagggaaggggtcactcttccaggttaggaatgtggacaggagttatggagcttacttccctaaaggaggaggcattctagttccggcattcagattctgtctgattccaatatggtgtttgtgtggggtggtcagagaaagggcaagtcggcaactgtatattcctcagcaagagactataagacatttgcatttggaaaatcaggagagatgctgatatggtttggctccgtgtccccacccaaatctcaccttgaattgtaataatccccatgtgtcaagggtgagaccaggtggagataattgaatcatggggttggttttccccatgctgttctcgtgttagtgagtgggtctcacgagatctgatagttttataattgcctggcattttcccctgctggcacacattctcctgcggccctctgaagaggtgccttccatcacgattgtaagtttcctgaggcctccccagccatgcagagctttgagtcaattaaaacttctttctttataaattacccagtcttggatatttcttcatagcagtgtgggaacagactaatacagatgtggtagagttgggtgctgggtggcaatgctaagtgtatgcaggttctaggcaccagatcaaatctggaatgcaaactgtgggacacaaaccacaaatgatgcccagcctttaatactttctttcattgtttgtcatatagaagaagaaacaaagaataaagaaaagcattttttttgagacggagtctcgctctgttccccaggctggagtgtagtggtacgatctcggctcactgcaacatccacctcccaggttcaagttattctcctgcctcagctcccaagcagccaggattacaggtgcataccatcacacctggctaatttttg

SEQ ID NO: 1881992 - DNA, 4001 bp, Homo sapiens
acagttatttaccaactttctttcctaatggaacatcttacgatcaatgaaaactcagagtcccatacaataccggcctcaatacttacaacagagcctataaatgtactgcacaactttctcccagatcaccaagaccatccaagtttcaaccattctaactcatcagaattttccaaattctccatgcctttgcacatgctgttccctcctggaaatgtcccattccccacccacagcaccctgaccactcaactcctatggctaccctaaaagtttgctcaaatttggtgaggccttccctggctcccctaggcagacttttgttttcatttctattctgggtatccaccttgcagacctctccattataaaatgaaccatatcttgctatgttatttgtatatatatgtcttctccccgcaggggaggtccttggagctggaaactcttattcagctcaggatgtctcatacacagctgagtgccaggcacagaaaagatattcggaaaatggttgttgaatgaatccaaacagcttatcttcctattgccctctctctgaatagtcacctttagtgttcacagtggcaatgcattttgtagtcctcacatcccagatgcgaatggttttatctccggacgccgtaacaaataggtcaggattacttggatgccaacaaagctggtccacactatccccatgtccccgataattgttttctttgacctgaaagaacagaatccagatgtgacttcacatagatgtaactgcctccgcatgtaactttataagcttattcaaaccaaagtatgctgggaccagtaaagatctgggtaattcagaatccagttcctccaagccctttctcccttctcttctccgcaggccttctgaactgtttttctcagcttccacacctatgcccttacttttgtgccctccctggccttctcctccttcctggttttccacccttactctaccaccaacgtaccaccaacgtaccaccaacgtaccaccaccaccaccaccaccaccaccacagcccctagccacttcttatcagcacaggattcgactccaaacgagtaaggctcccatcgcagccctgtcccatccaccctctcctcaccttcacccgccatcgccaacctccttacttccacactcttcacacgcccccagtcttcctctcctcacccctcacgaccccgtcacccccacactccaccttctccctactccctcctcatctccacactccccctttccccttccctcaaacccactctcctttcacccccgcggctccgttcgcccccattcgctctcccactaccgcacctcacttcaccacggcccctctccctagcctgagccgagccccggcagctcaccaaccggtccttctccagcaagaagacgctggccgtcttgtcgaaggaccccgaggctaggcgacgcccgtcgcaactccaggccaccgagtgcaccttggcgctgtgcgccagaactcgcgcgtcttgctgtggccccggaacagctcctgcatcccaagcacgtagcgcgacgggccgctgctcactgagcaccacggggccatcgagccgggaccgctctggcccaacgccgagggccccatggctgcagcggggaccgccatgccgagctccccagcttccaactcacaacactgcagcagcctccacggcgcagtcagtcctggcgccgctgccgcacgcatgcgcccggaagagggacggcccctctgcgcaggcgcgctgtaccccgccccggaagggactacaaatcccggtatgcagcgcgtgcccgcgtctgcttacttagtaatatttggttcttttaactccaaatatgcttcacacttaacgattccgagtttttttagtgttcttatttctcccttacctattctttggtagatatatgtgtattcctgtttaatcgaataaaagaaccaacactaaccttctaaacagttaactcatcacctttcttctggggttgttccctaatccctagtcccctcccttaagagcagaaagctctggtctttttgctggagaaggaccagctggtgagcttgtcccatgaaaagggctagcgggtgtggagtgagggaagaggtgttaagaaggggtctggaggttttgtttttttttttaaataaaaatggattttttgtttttaaaaggtaatggcagaggcgtgtgaaccagagcaactctatcttaaataggaactgggtgaaatgaggcttaaacctactgggctgcattcccagactgttaaggcattctaatcacaggatgaaataggaggtcagcacaaaatacaggtcataaagaccttgatgataaaacaggttgcagtaaaggaaccggccaaaacccaccaaaaccaaaatggcgatgagagtgacctctggtcatcctcacctctacactcccaccagtgccaggacagtttgtaaatgccatggcaacgtcaggaagttaccctatacggtctaaaaaagggaggcatgaataatccaccacttgtttagcatatcatcaggaaaaaccataaaaatgcgcaaccagcggccctcggggctgctctgtctatggagtggccattcttttattccctttactttcttaataaacttgctttcactttgcactgcggacttgccctgaattctttcctgagtgagatccaagaacccactcctggggtctggattgggacccttttcctgtaacagtattacatgcacatgattgtaaatataaaaataaaagatatagagtgaaaagtaaatgtccacctgcgtatccaccccacctctcatatctcccttaaaccagtggcttcttgctggagaaaaaaggggtggtgagctgccagcgccagtcaaggccctggagaagagctgaggggggaaggttttggtggtgagtagtagtggtaaatgtgtttaaaaacccaatttttaaaaggcaacacgtgcacttggtaacaaatgtaaaatgtataaaagggaatagattgaaaagcttccctccatcctgtgtccccaaacttctcttctgaaaaagttaaatttcttgtgtggccttccagagacagtgtaagtaagcacctgggcaaggtagataggtgtgtgcataacctctcccaacacactgccaaaaaggtagcattccttacacaacttgcttcctatggtaaatatgtataggaaatcatttcttgtcagaaaatgcagacgtctcattcttctcaatggtggcagtctttatatgaatatataatattcaactgatcccttcatgaatttgcttttagaacaatattagaacaatattgcagtgaatatccctatacaaccttcattgtacacatctgcacttttttatttggatatatattgccaaaacacctatgaagaggtttaataatttatacttccaccagcaacataagaaagtgtcagaaggtcctaggtactaaatgagtacacatataaagcatatggctctcagaaggaccgtaggaaataaggtccctctctttccccaatcttttccctaccccattgcaaccagaaattcttggaaactacaaagcttttcagactccaagaataccactgaagtctctaaaatcttggagtaggaaactatttggtgtctagttttcttccttacccctctttttcaggaatcttcatatatatatatatttagatatttttcctacattttccctgtattttgtatttttttttttttttttttttttgctgcatacactgaggatttacaagtccctaccaagatacaaaaactgaagtagaaagaggtaaaatgtcctggtccaggtcacatgactatcatgtgacagagcaaaggttagaactcagatgttactgactctaaaatctacactctgattctcagtatctgaaatcacgtaaatgtgattc

SEQ ID NO: 1881993 - DNA, 4001 bp, Homo sapiens
ccagttcagtctccggcaacatcagatacttcccactaataacgaggagcctttcaacattttcacaacatctcaaaactgaccccttttctagcttaaatggcacggatctggaaaggcaaactatacacagaatctaaagcagtagtcaggtgttcaatgaagtaaaatgtatccaatgatagctcaggggagggggatcaattgagctgaaactggcaagaacgtaactccagggagctcacaacacgcaaggacccggatttcccgctgcctgaacgcccagtattcgcacactgataagaacacctccccataactcccctgccagcgcctccaacacccccaatcctttccccaggaacccagtcccagtttctgcagttcctgtaacagccacgttcccacacaagggctgcctgagctccccaagccctccaacaatcaccccccagtgccctcgaaggtctattcagagaagtcaccaagatgcagtcacccaggaaattcaaggacctccaacttaccaaaaggctttcggctgtacagagctaagcttcctattcccctcctaaacctacaatctagttttcatttctcaagaagcctttccctgtgctcacgcacgcagttgttacctggctcggtgaggcactccaagcagtaacagcggtagccacaaaataaaccagaagcatctccaccatgaagcagtattaacaatttgtcctaatgattcctttgtccttggaaaaacaacttcagaaagttatccactgtgaacagggcaggctcacggcttcttggtccggagacccagttcccactggcccactcaccgttggagagagcttgctgaagctcggtgtctgatatcactccactcctgtctttatcgaccctataacatcaagaagaccaaataagctggcgatcgaaagttcaggaaaagcaaaacaaacgtctcctgtcaaccctgcaccgactctggaaggctccctcctggaacctccgcctctcccgtcccgctgaggagtacagcggaatcaaggaagtgccccaggagccgacgtccagtgtggtcttcccctaagaggacaatcatcttcacctcaatccttcccttccttcctctcctggcctgtctgaattcccatttgcaccagtttccctttttcacagacaagaaaagattccctcagataactaagccattccctggccatcagtcactacagtttcggacattcggtggaaaagcgaccagggacagaaggcgccaccataaaggtcacctggcccgagcagacgccaggtcgctgcttcttccttggctgctgacattttaacagcggcccagacagtctgtttccgctttccccaaacaagcaccctggagaccctccacctggcggctcttgaggcgagaaaaagggcctagcccaggagccggtggccgcgacctcgggtctgcagtggcgcactctgcatcttgggaagggccgacgcacaggacagggaccgggcaggaggcaggggcggccccaggagaccgggcagcggacgggggagaccgcgggggacccgccaggggacgggggcggccgcgtcggctggggcaggggtcgggggaggcggcggcggtcggggcaggggacgggggaggccgctggggacacggcaggtgacgggggaggccgcggggcaaccggcagggaacggggttggccgcgggggtcgggacaggggtccggggcggctgcgcgggaggcgggagatgccggggcggtgccagcccgcacctctggaagacgttccacaggaagctctggtcgggcagcgccgcgcccgcagcaggcccagggccgcccggggctggggcggtaggagtaggcagccaagggccaaggcccgccgctgggctgaagcgcctgcggcgactggcgacccctcagagcgacaccgcttccgcctctgctgggggcagggccgggcgttaccgccacttccgggggcgcaggaaatgcgcgttgtccgggatgcacaggccgcctgcgcgcgggccgggaaggcgcttggagacaatgtcccgtgctgcgacccgggacaggcagtgatggagcagggacttagtttgccttttagttcttgtatgaaaagaagttttgaggtgaatgtgattcacgctaacagtcggaaactctgggcggggcgcggtagctcacacttgtgatccctgcgctttgggaagcggaggcggccggagctcttgagcccagcagtgcggaccagcctgggcagcgtggaccagcctgggcagcgtggaccagcttgggcagcgtggctagaccccatccctacaaaaattacaaaaagtagtccggcgtggtgggctcctgtgggcccatctactccgtgggctgaggcgggaggatggcctgagcccgggaggtcgaggccgcagggagtcgagatcactgccctccagcccggtggatagcgagacaatgaaaaaaaaaaaaaaaaaaaaaaaaaaagcaggccgggtgcggtggctgacgcgtgtaatcccagcactttgggaggccgaggccggtggatcacctgaagtcgggagttcaagaccaacctggccaatatggagaaacccagtatctactaaaaatacaaaattagccgggcgtggtggcgcacgcctgtaatcccagctacttgggaccctgaggcaggagaattgcttgaacccgggagggagaggttgcagtgagccgagatcaggccattgcactccagtcccgggcaacaagagcaaaactccgtctcaaaaaaaaaaaaaaaaaaaaaaaggcaaagcacaattcgcgtgggaagggcagtgtgcagcattctccgttgtctgttccgcccccaaaagcttccctcctttagatttaacctgcggccccgcgctctgcatcagcgcggtccccgacccgtgcagctggaaacactgggcgcctccctgccgcgccccttcccgccccggtggtggtgcagccctgcctccctcaagacagcactgccttcgtgctggacacagttctgtggtggagcctggagtgcctgtagcacaaatcccggagttgggaagtgcccacctttgggccagtgtgatccctgggtctttcccgcacgggtggtctcatgcggccttccactccagtcctgtgtcctgtgccccggttcagaatactacaattattctcgttatttcatggggttattccagcttttcagtttcttcagtgcctcattccatgaatgcttttttcatcctcctagttcctagggttgtctctgaatattcacccagttgcctaccaagatgttgtctgtgtctactgcaggggatggtgcaggtctgaatatcttactcacagcagccactgtgtctactgcaggggacggtgcaggtctgaatatcttactcacagctcacctttttggtgcctttgatccgtgttaggaattatccacatcttctctctgggcagtattctactttctttttatattgacccaattattttacttctttggtgtgtcctttctcctaaaacatatgggttcactttgaaaccttgaaacccacatttacaaaaacattttcaataggaaacatcgttccatgactcattagtggagtactataaacatttacatttccagaccacccactgcccagtggttttcttggtctcagtactcatgaaaatggtctgaaggtttgttttgggttcctaagcagtagacacacacacaacactgcctgtcagttatttcttggaaactaaatcagcccttctgttgccatcctatcatgcttcaggggtgcctgtgctagtttttaattctttgtcctaacacttaaatgtttgttcaaacgcccatattaatacttcctcttagtttacaaaaggatttactttcttactggttgggatgaagctgcctgaggttgc

SEQ ID NO: 1881994 - DNA, 4001 bp, Homo sapiens
tgtagcagaacacattggaattattggctatattaccaaggctttgactggaatgcctattttcagatataaccagaatactttaaagaactaaggctgactttattgatctagtaaagcctcttaggaaaaactggcttggtagtctgcatacatggttcccttacatggttcccctatgtggttgccttacaggtaagtaagtaatgccacttttcgacaggcccaggaaactcagggtatttggggacttcaagaagagaggaattcggccaggcgcacacacctgtaatcctagcactttgggaggccgaggggggcagatcacctgaggtcaggagttcgagaccagcctggcaaacatggtgaaaccccgtctctactaaaaatacaaaaattagccaggcatggtggcgggtgcctgtaatcccagctactggggaggctgaggcaggagaattgcttgaacccgggaggcagaggttgcagtgagccgttgcacttcagcctgggcaacaagagcgacactccctctcaaaaaaaaaaaagagaggaattcacccaaatctataggtattataggcaaagtatgatgagaaatccttggtttggcttcctagacttgagtcaggttttaaaagtccaatttgagattccttatgaaaaattccagcaaagcaaacttaaatgagcctttagggcaatcactattttgctgcacttatgcaaataatcaggttaagtttaatgagattgggcctattttgcaaacaaattcatcttattttgatcatctttggtagaaacagaggtgactgtaggtttaaaaattacatttcagaagaaaactaaagtttatctattattgaattctagtcctgttcatgtttttgaggttttgttttgttttgttttgttgttgttgttgttttaatgaagaagtattttattattttgctgcaaagctgttgcttcactgtataaaaatagcaccaccaaaaaattcagtgtattgtaaaattaagatagtggtgttcctcatctgacactgtacaagcaacaaaaacctcttcacttccagttatttccaatggaaagatcattaagtatttcatcccaaatccaggtatggatacatgcaagttacaatattattaaagcttaagaataacaatgttatctttgaattttgtaatgtttataactagtttttaccatggataatttcatgaattctgaacactagagcctagtctaaaaatcataggatattgtgaaaaagacgcatattctatttatctataatcattagaaagttaaagggcattttctttcattagcagtgttaacagtagttttttcttccccatcggtaatgctaaaagttgctattgtaagtctatccaccactaatttaagacaactctgctgggttgcgttatttcatactagtttatttaggagttccattttcactcctcaatagattttatgtatttctcataagcttcttcactcataagttcatctagttctgaagggttactcagtgtcatcttgatctgccaaccatcttcataacaagatttgtttacaagtcctggattttctgcaagagcttcattaatttcagttacttctcctgataaaggagaacagagttcactagcagctttcacactttccaaagcaccaaactcatcttgtttgttcaattttgtcccaacttcaggcagactatagtaaacaacatctcccaaagcttcctgtgccaaattgctgattcccactgttccaatgccattttctgttgttacgcattcatgtttctctgtgaatttacgcacccagagcagagcgggtccagtgcgcagcgtacggacggcgtccacacccagctgccagggccttggcgggcagggcgcggcgggtgacgggacggcgtgcagggtgcagagcagggcccgcacgctccgcaccactcacagcgccatgttcgctgctgttgttgttttttgagacggagtcttgctctgtcgcccaggctggagtgcagtggcacgatctcagctcactgcaagctccacctcctgggtttacgccattcttctgcctcagcctcccgagtagctgggactacaggtgcccgccaccatgcctggctaattttttgtattttttagtagagacggggtttcaccgtgttagccaggatggtcttgatctcctgacctcgtgatccagccgcctcggcctcccaaagtgctgggattacaggcgtgagctacctcacccggccctgaggttttgttatctacctataatctggactggatcttaaattcttctagtttcctccaatatctggttatcactctccaaacaatttccaatttttctcccaccttatgactgagaatcactaaaaattaaaactgccctttttccaaagccctgcaagctaaagctggacaacttcatatagactttagagaaatcacaacagccatatatgaacaatttttgtacgtgttgctctatgtgctactcagaaagttccccagaacacctcatgcaaactgcaaaccaggaaaatctatcagcttgtcactacttgtcctcattctaccatctcaagatgctttgagctcgaatctagaaatttttttgactggctgtcttccggactcaaaaactgagtttatggattgctctaattgttaatgtttgtttttctattgtttgtctggaaatgcctcttattaaatgcctgattgattacactacatagaggcctaactttggtagaagcctgactgcaataccccctaacaactggaataagatacaactgttaactatttaactggactgagttattcctggaactgagagatggttcaatgggttatgcaataatcttccaactcagtttttgggctgtgaggcctcttgggaaagtttcagacaggagaatgatggggttcaggataccgtactccaaaatatggcaacttggcatttgaaaaaacagcagaggagaaccactctcacctttccctctcccttcttcccggaagcaggccataaaacctgggaaggttggccgggcgcagtggctcatgcctgtaatcccagcgctttgggaggctgaagctggtggatcacctgaggtcgggagttcaagaccagcttggccaacatggtgaaaccccgtctctactaaaaatacaaaaaaaaaaaaagtagccgggcatggtggtgggcacccgtaatcccagctacttgggaggctgaggcaggagaatcacttgaacccaggaggcagaggttgcagtgagccgagatcacgccactgcactccagcctgggcgacagagtgcaactccatctcaaaaaaaagaaaagaaaaaaacctgggaaggttactctctgaccttctccctcctttctttcctgaagtaggtcatgaaatcctcattccagagataccctccctatactgaagaaaagggacttccttgttcttgaaggcagaagaatctgaacaggacttgctaagtcccctaccaccagtttattaccattagatcacaccccttttgtcctatcatacttctgcatgagtgaccacttctactcttcctcaaacctaagcctaaataaatacacaagttttcctgttttgggggggtcttcatttccttatgaaggctcctgtgtcatgtaaaccttatattaaatacatttgcatacttttctcttcttaatctgttttttattattggaatcttggccatgaacctagaagtggatgagaaaataaatcttttctctccaacacaacactgactttttttttctttgtttctccaaggagtcagtcatttcacaactatttgagggcctagttcagtgcaggaaaacagaaactactctaggtattttgaactgaggagaacttagtgtagagaattagtgtttacacaatcattgaaagg

SEQ ID NO: 1881995 - DNA, 4001 bp, Homo sapiens
cgttttgaatatatgtccccaccaaatctcatgctgaattttaatccccagtgttggaggcgggggctggtgggaggtgtttgggtcgtggaggcagatccctcaggcttggtgctgacttcctgatactaagttcctgcaagatctggttgctgtaaattgtggcacctccccaccacttttctctcttcctcctgctggccttccaccatgaataaaagctccctgaggcttcccctggaagtctaacagatgccagcagcatgcttgtacagcctgcagaactgtgagccaattaaacctcttttctttataaactacccagtctcaggtatttctttatagcaatacaagaatggactaatacagacacatcatttttttgtgtgtggtaaattcttccaatttctcaccttgcattcccagtgctgccctaactggacctggggagtttcatcatactttcttcaatacaaagattgtgaatacctatgaactcttttaagacaatttgtattctgccatcaggcttcctaagctaccttgtggatccacatgcaacagaatcagaactttcaaagcagtcaccaaacatgtaactgacaacttaaaaaaaaaaaattcaaaatgaaattaacaagcaccaagggtgttattattctcttatatttcttttagcagcattccatcactatctgcttcttccacttcagaaacctgcaaaactgctgtagaatatcaagcagttgttctagtgaagtcaattattttttagctcactgcaaaacatctgttgacccacgttttagtcttctgttcactctcttccaagtatgtacttgggaaaacaacaggacatcaaccaggcaagctcattaccattttccacagataaatctttacagtcggtgtgaaaaatctcaccctgaactatggtggctgtagtgaaaagaaccatggacagacacaagtatgacttgtgaacatgattcataaagcacccagagccccagtgtggcaacaccagatgaatgaaaaaggttctaccatgttatcaaaatcatgtcattctcactttccctcaacagtacctaaattttaaaaagaatataagcataatgatgaaatactacaaaagtatcaattgagatcacactgcactcaatgaaaattatccatgtttatgaaaataaagatctgtatccaaaaaaatagcaaagtgtccacaataaattataaacaccaggacatcagggacattgatctctatatcccaaagcctagaaaagtgcccagcacctaataacaatactaacttttgaacatttcaccacgtgccaggcacagttctgatatgctccatgtttcaacttaaggcttacaggccaggcttacaggccaccagtgaatctataaagtttcagtttatatatgagaactgaagcacgggattagataatattccgagacaacacaaattagtagcagatgggttaaactcaggccgcgcatgtctagaatatgcacacttacatgcttgttgaaaaaactgtgttgattagtatcaaactagctttagaaaatagaagttaaaaaaggcaatagactttggcaaattatttgagtaaaacgtcaaatgtcagatatgtcgaggcatgggtagccttctaaggggtcacgtctatggaaggaaaaagtttggcttaacaaataggaaagtgagaaaaagaatgaaacagtaaaataacaggatctcgtgatggggaaaaggcggcctgcccagacctaaacgcctcgcggcctcgcaggcgacgcggggatgactcagcaggacagaagggagggaagctccagacgccacggccctcttcgagatgaaagtacctcccatcctaagggactggcgttccaggaacagctgcgctggctgagccggctcagtgaggcggagcggccaagccttcagtccactcccactccccgatgaaaaacccaagaccgggtagcgcagcccctccgcgcacgcgtaacacgaggagacaccgcccacacgccagacgcgctgtgattggccccagctaccctcggaccgagattcctattggtcccaggtgtcgagcatgcgcactttggtcgtgggcgcgtgtgtggaatgggaggaggtcgcgctgtccatgggcgtccttggcctgcgccacccaggtgagcgctccggaggctgcgatccccgggtcccgaccgcccgcctagcactggcctgatggggaagcgtcccgggactggaagggcagccggcttgcgcgcgtggttcccacgcccctcgggctcgggggatcgctccgggtgctggctgcgggctcggcggggaggaccccgggagcgcgtccctgggccccacgtcggcctctgcgcgggcaagcccctgggctctttggctctagacgctttccaggcctggggaaaccgcatgcgtggacgtgggaaacggggcgcgtgacggggaggggcgcgccccgggggcctgtggtcgttccgagcttccacctggcccgacgcaggcatgtgccctgcccgccgcgtcgtccctgggcctgcgggggctggggcctcagctgagagtcctgggaaggtggtgctggattgtggctctgtcgcggggatgaggggttgatctgggaagccctcaggatgtgtgtgtggctcctggaaggtgacgcacattgttagcttcagtaaggttttcaacaccatgtttccgcagaacttggtcataataactatatcgccttctaatagtgcttttggggagttactcattttaacagctactacgtgttgaatgtcctcttgtttgccaggtgcagttctcatccctaggggtggagagttgaagaagatatattcagttattttcttttttaatgcttgagctaacaatgattttatcctttgctttcttaaaggtttaatttgctcttaggtggacagaaaagcataaactgaattttaactacaagttggtcacagttgaaaagcctcatgtgtggtttgagttttagcttagatctctccttacatgtctttcctgacagctcctcagatttagacagtgtgaggatcaaaactgtatgaaggtgctttactcttgataatctgtgaacgtcaactaggaaaattttgagtgtattagaaatgtttttcgaactctttgagagtctaggcaatttcacttgggttctgtgattaatttgcaaagtattaggatgaaatcaagaaacctgcagttttaattgaattgactttggttttgtttctcaaaaagtgggacaacaaaaatacctacttaagactactgtttcaggcactgtctaattgcattcatcagatcttattatattcattccatgaggaatcgaagacctattcagtcaagcagcagcccaaggttacacgtctaataaagggcacattcccagatcaagcccatgtaggctgactctagattctgattttgaactgctctgtttctgaattggagtttaactcctctgttacccctagattaatggtgagtattttctctcacccaagttaattccattaactctaatcagaaccctaatttagcatatttccagtacagtagttgcggatccatcctactctagagtttttgtgctatgtgttaactgtcttttataaatgaagggacggcttcctctgtaacatacgggagcattgtataatctttgaacaggcaaaagcattccagagaaaagatagatgaatttcatatatttttattaaaacaattttattaaaacatagataaatactggattatttaagcaagttgcagtctatgtaggttaaccactaagctatgcttcctctctttgcatgcgtgtgtgtgtatacgtgtgtttttcctaaagatacatcaaggcttagtactttcacaatgagttaagtcctgcgctgtgccttgaaagatgaaggga

SEQ ID NO: 1881996 - DNA, 4001 bp, Homo sapiens
ctttttgacactgagatgatttccttaacctaacattataattatttaacacagatttatattttgaattatctttgcacttaacaaaaaaaaactcaatttagttatagagaaatgttcctttaagacagtatcaaactgactttgctaacatctaggaattttgcacttaagttcacaaatgaacatcaaacatgagtcaggcactggggatacaatggtgagaaacatgcatagccttcatcatcactgagcttacactgagtgactttaaatgttcttttaggatgtgaaagattatggcagcttcaaaaattaagctaagaagctctccatcattttctatgacttgagtttaaagcacaagatttagctcttatgatttttaatcataaatctgagtgggctggaggctttttatttgtgagtacagaactttggcatctttgttccagtcctgtctgtagttattgacttaattcagttttccaccttttttgagttatgttttccttgaaaagtgactatttcattttctattaatatttattggcggtataaaattgtataaaatattttaataatttttaaacctcccttttattaaattaccaaccttactagtggcactattccttttcttgttacacttcctataagtctttgaatttcactggtattgccaaaaaccagctttatactagattatgagtactttatcaattttaccaatttccttttaaaacactgttctcaaactttatctttactaatttcctcttcctaatttcaattatacaatttgttcttcgtttctaacatcttcaaataaatgcttggcctatttttattctttcttatttaaaataatgttctcctataacttggtctgtatcttaaaattttaacatatagtttttttcaatatcattatgttctagtaactacaatttctctttccttttagactcaaaggtgatttataaaggtactttaaaatttaaaatacgaacaaaataaaagttccacttttgttttttaggggtgctatcccttagctaatttttagcttattctatcatactatctttccttgtgcaaatttagcccatccttctaggtctaacgtttatgtcacctcctttaagaagcatatcttgtgttctctcccttctctaaaattttatatacatcccttaaacatataatgtttatatattctccgccttcaactcccatcctcaggctattttattcacgtttatgagatttgctgtttagctcagtattttgtggattttcaaaagattccactcaatttaccgagcacctacgcaccagacattttattaggtacaaggaaaagcgttaaatagatataatcacggcctccaagaaattgaacctagtaagagacacgaataagcagacattcaagtgagctttaggagacttggtttggtagtgaagacagtctcatgtgtgttaacagcttacagcactgaaaaataagagacagaagggaacaaatccgtttcaaacagttcaaaggaggaaagagagggaaaggtggtttagatacagctaaatcataaatagcctgataatctaaccctgtgataatccaagtacagccacagcacctgcctcagaatcacttggaaggcttgtgaggagtaaaaacgcagattcatacctactgaaattagaatggagaaacggacatttaagtctgcattttaaacacattccccaggtactgaggccattccaagttttagaacagagcacagccaattttcgcagaccttgttcctcaagtactccctccttctagccggagggtggcctgcagcatgtcccttcccttcccaccgccgaagctgtccatccagtttctgaatggcggcccacagaccgcacggctttacgagagaggaacacagcgcccacccgccaaacagccacacagggatcggaggccggacccgcaaaggattcggggaaaaacgcatcgagccaatccgaagggcgagagcggccctagattgggggggcgggggggcgttaggaggtgggcggggcacagaaaaaaaatttttttttccttgattgacgtaaaacctacccaatgaaaatagaactggtaaagcttccgccccctaataggcagaaccatagcgacatttcaaccaatccagctcaaaagtgtctatgttgtgggaggtccctgaggccgctgaggtcgttcgtgtctgttgaacggctgtgggcgtcttgctgccttgggtagggggttaaaatcgttcttgagaggaacgtctctgtgcgaagagataatgagtttagctctgaggtcggtaataaggaggcggcagtgctctccacaccccggagcggggcccagggagggtgtgtgtggaagggaggacgtttggggccgaggcgaggcaggggatgtagtttgggacgcgggaaaggagcctagggcagcctgcccggatcactcaccctctgggctctgatgccctgcagggaacgagaccagtgcatttctgctaaggaggttatttctgtcagcgcgtagggctttggactgccagaaggttgggcttagttgcgagcgaggtgggaatgaaatatcgcgaggcttctactcttgtttctcagatcaggtcgcggacatcccttcattcatccgtgtgcctggtcagggccccacctcggctgctccgctgctaatgcaatcacccacctataaattttggaaataacaaaaactctttcctcttctcccagggccctgctttacggtgtaattggagacccattttagtgactttaattggcagtctgtctcttggatttcctaaatttcttgcatttttttacctttcagttctaacctctaaccctctgttgccctctcccactatgtagacgttgtaccgtaaaactatccatacacttacgacactccgaaaatattccatgttctgctaagggataatcatggtacccttggatggggtcaggggtgggtcggttctggacttggcctccaaaagtctcaggaaggaaaagactgaccccaggaatacccaagtttgtgtcaagtcaggtctcatgaaaggaagatcttcctcagctttgttatactgcacctactagtcacttcctagctttttttttttttttttggagctttcagagaccaaaacgactttcaaatgcaactagataggtgttttaagtacagtcaactggtttgacatgttaatgtgttaccggattgtgtttcaaaactcgttattccagtgttgcggctccatttgaaaatttggagcacatttagatgggcagctcttaaggaaaacatttctggctttaaaataatttttgctttttttctttaagcgtttccagagtttatgagaagttaacctccggtttacatgttaaatgagacaagactcatcacatttttatatagaatgaagcacaaacattgtatattggcatctaatatttgtcatatgtttagactcattaatattttcgatggtttgttaatatcaatggaggaaatgacacataaattgccaaactgttaaaaacgtgtaatctaaaaacattttgaaccaacagtgctaaaatactgtataagttaattcactttttttttgtaattttatgaacataattatcagaactatcaacagtaaaccgatatatagtgattgtcagttatgaattttggtttcatttggagattttttttaaattctttaacattcttgtaggataacgtgtttttgtttttttggttggagttggttggagtttcagacataaaagtagtgttgcttattcacagttcttgtttcttccacagtaacattagtgggaataaataaaaagctgggaaaaagaaaagtttggtcctcatttcttttaataatctgtaacactctttagttttgcgaagttcagatttatag

SEQ ID NO: 1881997 - DNA, 4001 bp, Homo sapiens
caatgggccacctggaaaccatccaaaagagacctaccagcccgtgccctaggtgcagctgccacctgcacgtcaggcaccagcagcaatggccagaccatccctgattctccatgccctccccatccccgccccaacagcaaggactccctgacaggacgctgtggtagtggctgtcaggaagtcggctgggcgggtgcataaggataaagatagactctcagccccatcccgatggccacgacgtgctcatcccctggcagctcctcagccctatcctagtggccacagagtggcatgcaggcagcagccttgggaaccccgattgcccctcctcacacgtgcccatcacacgacttgggcgacggggaggtgaagtcaggttgtggccccagcggcgccatgaggaacgagaacctgcgctcagcctcatccctgtggctgcagagtgccaagcgccaggtcctgcactctgggcgcgggtcaggagcagctggcaagggcagcgcagcctgtggggcccttgggcgtggccggccgcagctccgggaagccaggtcagcccatgggcgctagccgccaccagcacatggagcaggggtcgccgaggattgggaatctccgaccaggcgggcgcctccagccgcgcggaccccggggccagcccggccgcggcaagtcaggcagtctgcggcaggagcgccgggcatgggctttggcccggggtgtaggaggcgcgcaccctctggccggatgggcggcgcactcagggcccaggaggccatcccaggggagccccgccagcccccgccggagcccgagctgcagctgccacctgcaagtggtgcgctggctgcagcagtggcaaccccggatcccgtcctcccgcctcacacccatcagcacggaccccgggggcgacgcagtggcgaagtcgggctgtgggcccacgggcggcaccaggcggagaagcaccactcaaccccatccctgggctgcagagggcccagcgcgggggcccggagcatcgggagccggtggaagaggagaagagcgcgcaggccacagtcaaacaggccctggggcagggcgcgccttgcgctccagggagccccgccagccggcggcacctgagcagcaaccgcggcctgcactgggcgccgcgagagagctgctagggcggtttctccgcctagggcctgttgggcggggccggctaaggtgcacgtgctcgctggtcctaaccgttctgttgggcgtttctgctgagaggcgggaggcgctgagagtatgtgcaaaggtccgtggacggaccgcattgcttgttgttgcgcttcggaggcggagatccccgaaggcgagctgaaatacggctggagagttcccaggatacaatttgcagcagacgagtatggaagactaccagccggagtggtggcccaccctcagggagcgcttgtgctccgacggcttctcatttccccaataccacattaaatcatctcatctgaggaggatccacagagctgtcttctgtggtaatctggagaaactgaactaccttctgttcacgttatcatgacgctgcctgagtagttgtcgaccttgttttcacattaactggctgttttgttgtggctgcacttctgtttcattaccttcatcagaatcatagcttggaggcttcatagctccctgattcaattctgtcccatatttcaacttgtggtatttggctcttttctgtttaagagcatactccaacattctgatcatcctcacgagatccttcttcaaattttcttggcccttcctttctccctgtaggaaggcaatctgggccgtaattgttgatgaggtcttggagcctcccttctgctcccagaagcttttgttgctcatgtctccagccacaatatccttgcaggacagagtcttggctgcagactgagcctgtacctcacccgtctcccaccgactcttggtactggccacggccatgctgggcagctctatggaggcctggcgggctagcttgggtgtcctgccagtggtactttcacagctggggagtggagcctgggcctgaggtctcctgtgcgactctccgcacctgcgccggtgccatgcgcctctccgcgccttttctcaccatggggcagcatttcggggcctcttgagggacccctagatgcttctactcaaagcccccaaagccaaggagcctccactcctccgtctgcagccccccctcccggttctcgctacgcagggttcagtggccttggggctgacggaggaggttgcgtctgccaaggcccctaccagcgcctccctggctcatccagcccacctccctcccacgctggctcaagcaaagtgctctggtcaccaggagcccttcctgaccagccccggccccttcttggccttcaccccacctggcctcccctggaggcctagcctgggtgccgggcctgctgggtccagagcccaccccgccctgaacaaccccgagcccatattttcaaatataatcagatcatataccttccttgcttaaaaagggcgaaactccatcttaaaaaaaaaaagcctcaacatctctctattaaatataggatctaaagtcaatcccatggaacaaataatcttgaaaggtttctagactgtcttttcgactcactttgctctgtttcaaaaaggttcaccaagtcccaagaaaacagaacagctttctgctcattgaacccagagaacccagttttacactgaagattttatttattcttctctctgattggaagaaagctactttcttttactcttcaaataacaagatagtttttcatccttcacgttagggcgtctttaaccaactccaaatttctttctgtctttcaaaccttacagctttcataacacttgaaaccattttactaacctgctctttaaaatagagacaatcactgttttctttatttctgggtctttaatatctaaaagagatatagtagatatgataatatggtaggggacaatgtatatgtaatgagtatatgagtgaaagatattgtgctttattatgatataaggaatggatagattttactatattttaagcacaaaaatgggtcagatttggaattgtattcaacactgaggcaacaatgtagaagatggctttttaatacctaatattctgatttaattcactgtccgaatgaaaaatacccttagaaggtttgactaaatacgtaatttcttgaccaagtcttgttttagtctttcatatccaaaaaaatatttcggggatgccacactagtgcaaataccctactagatgcaattatatacagaagaatattttgcattttattgataaaaataattagtttttaaaaacactaacattaatgtattaatgaaaagcccctacatgtattataattagaaatgagtaaaaatcaatattctataggaatattcctatgactttaaaaaatcaaattcctctgtttcttatacagttgtcttcaggaaaatcaactggtttaaataaataaaaacattcattatttttataatggaaaatagtaaatatgataatcttatagaaaatgaaaaaaatagattgatgctgtatgtgcaggagcgatactgcagatatatggatagatatgagtaattttggaagcaacctagatattaagtgaaagagatgtaatgagattttggaatgattaaaagtaaaagaagaaaaagtgtagcgggaggtttcagggtagaacatgacttgattaattattttgagtgacgaaataatttcgtatgactgaaagtgaaaatagaagctaaatgccttaattaatttatagataaatcaaccaaaagtaatatccttctgataaagtatattaagcaaaattaagtagaattttcaataaaaatgaagacaccatctatagagattatttatattttaattctgcctgccttta

SEQ ID NO: 1881998 - DNA, 4001 bp, Homo sapiens
ccctagttcagctgcgggtgaaattatcctgttctgaatgtactgaatgctgctggcaatgctgtaaattgttgtgaggcttaaggaaaaaccctgtagatatcaacaagtcataaaaacaggcgtattttctcttcgtctctttcccactgtgtgttttattcttcaatattaacagttctgggaatgtaaatgtatttaactatattttcctctgatgaactagattttagtatataatttgtggcttccttccataccaatttgttcatattgatagcatgcttcagaacaaagcttcagagctcaggctatacatcctataacactcttggaagaccagtaaccagactggaaccagaaatcttattgccatgttaatatgtcattttccttctgtgaaatattccaataatgtaaagaatgcaagattcaaagtcacatagacccatgtacacgttcaatctacaccaaagtttgtggagctgtgtgaccttcaataagtctcttaacctctctgagccataatttcctcagtctgaaaaatgggatgctaacataaggccaacattacagtgagaactaaataaaacttttacatagtgtctaggacagctcctagctcatatttagtgtttaaaataagcctctgatctttctctttatttacaataccttttcattgggagatgaggacagcatttggacacaactgtacaggcacgctaagtctcatccttccaaagacgtcagtcacattcagcccctttagcagtttcatcaacagcatgtatagcacatgtgatagcaaacagcaagttggattccttaataaagcagtaaagaaggtcagccaggatgtaggctttaaagccaaggccagctcttctgggcaggacagttgtggctgatgtatgacagccaaatgtaatgagagtcctcatttgacatattgaagcgagcacctcaaggatgggcagggaaaagaaccatcagcagtactcaccaccagagcagcagtgagtgcccaggtcaaactggacaagggctggcagacaggtggaaatgtgagtacatcgttagatttgaaaaggcctttggcagggcacagtggctcacgcctgtaatcccagcattttggaaggccaaggcgggtgaatcatgaggtcaggagaacgagaccatcctggctaacacggtgaaaccccgtctctactaaaaatgcaaaaaattacctgggtgtggtggcgggcgcctgtagtcccagctactcaggaggctgaggcaggagaatggcgtgaacccgggaggtggagcttgcagtgaaccgagatcgcgcgccactgcactccagcctgggcgacagagcgaaactctgtctcaaaaaaaaaaaaagaaaagaaaagcccttttaaaatgtccatcctcccataaccctttgaagcctcccacgtccccccagttcctcccaaatggcatataaaaagggtgatggcttttagacaaaggcagtagtactccccaaacagttaaggtccagaacatcatcttgtatatacctgtcttagagctatcacgttgtgtactggagtttcctgattacatgacagactcctctgctagacaaactcctgaagacaaggaggggttcttattcatcctttagccaaaccttacctgtagctcagcatgtagcccatggtagatgctgaaccaattttgttaacgtgagagaaatacaagaaagccaagtcagaaataccattgttgctgttagaaaacttcaaagaggaatttgtggtctctggtgccaaggtcccataagagttccagctgggtgagcttcttgtgaggaaaggagccagaagtcagaacacatagtgtgacaatatgagagaaaagaggatgaaagctgttcttaaattgcacctgtctaaggcaatccgagcttgacacatggtttctggaggtctgggcattgtctgagtggagtgttgattgtatgtctcctggagccttctgtttaaataactgccagagcaggatgactcagcagccggaggatgagatgctcttgatctgccgtcctctttaagtgacaaatcacattgccctgggtgtctgtggcaatctctgatatgacacactccttcctgccagcccatcaaccagggtggcaagtcacagttactaatctggagacggctgaaaattgctgacaggcaagatcccatgctccaagtgtagagaatcatctttaaaatgaactcttgtcaatcttgtcaatagattttcttttttttttttcttttttgagatggagtctcactctgtagccaggctggagtacagtggtgtgatcttggctcaccgcaacctccacctcccgggttcaagtgatgctcctgcctcagcctcccctggtagctgggactacaggcgcatgccaccacacccagctaatttttgcatttttagtagagacggggtttcaccatgttgcccaggctgctccggaactcctgaccttaggtgatccgcccacctcagcctcccaaagtgctgggattacaggcgtgagctaccacgcccagcctagattttgttactgagactgagtctcactctgttgcccaggctggagtgcaatggtgtgatcttggctcagtgcaacctctgcctcctgggttcaagcaattctcttgcttcagcttcctgagtaccggggattacagacgcctgccaccacacctggctatttgtatttttagtagaaacgaagtttcgccatgttggccaggctgatctcaaactgctgacctcaagtgatccgctcgcctcggccttccaaagtgctgggattctaggcatgagccacggcactcagccttgtttctgaaatgtagagactgattttacatttctagtctgtctccatatcaaagactccctattgtcttcaggataaagtcgaaattcaatatcctgaccattagggtcctataggaacttatctatacctaccttcctagcataatagaatcttaacttgttttgcttttttttctacttgatatcggcttacttctgtttgtttctttgtttttgtccctggcagataaatggtgacaggacaaagctttaagaacgtggcctagaggccaggtgtggtggctcactcctataatcccggtactttgggaggccggagcatgcagatcacttgagatcaggagttggagaccagtctgacctaacatggtgaaaccctgtctctacaaaaaatccaaaaaatccagatgtgttggtgcactcctataatcccagctactcggaggctgaggcagtagaatcgcttgaacctgggagatggaggttgcagagagcccagatcaccccactgcactctagcctgggtgatggagcgagactccttctgaaaggagaagaaggggaaggggaagaggaaaaaggggaaggagaagaaggggaaagggaagggggaaaaaaagaaaagagaaaagtggcctaggaggaaatcctacctagtagctatttcctgaaaattgcagaagttaccattattaaaatttagtaggctgggtatggtggctcacacctataatcctagcactttgggaggccgaggtgggaggatctcttgagctcaggagtttaagaccagctcaggcaagagtgacacccctgtccttacaaaaatatcaaaaaattagctggatatggtggcatgcacctgtgttcccagctacatgggaggctgaggctggaagatgacctaagcccaggagatggaggctgtggtgagccatgatcataccactgcactccagcctgggtgacagaaagagaccctgtctcaatataagtaaataaataaataaatataaaatttagtagcacagtactttcatgttggtcattaaagagcagtattctctagatttttttgtttgacaaatgttggtcaactttcaagtagg

SEQ ID NO: 1881999 - DNA, 4001 bp, Homo sapiens; identical to SEQ ID NO: 318162

SEQ ID NO: 1882000 - DNA, 4001 bp, Homo sapiens
taaaataaaccttcccctttcaagtgaagccttgggacagttgcctaaatgttgaggccactcttctgagagaagctactcacatcaaatacctcctacattgaagcaggaggctttttgaaccatactgtcctcatatattaaaatagtcatctggaggcatattgctgaacttaacaggaaatacaactagtcattgggttaaacgtagtgctaaaaggaattttctaaagtgaggaaatctttagttagctagatatttcaatatactattgtctaatctcatatattccatgttctattaattttcccttcttgctttcacaatattttttaaaaaatagtttggtttaaacattttatgtaatctataattctactggcatgcaatcttgtcttttcatgattctatactagttgatgtattttatctttggctttattgggcatggtatatattaacagttggttagggcgggaggtgcccaatctctagtagcctaaatattaaagccttttttttttttttttgtaaggaaaagtgtttatcatgctttaaccttaacataagtatcctcccttatcagtctctatttctgcttcctgtgcagctgaaactcttcaggataagtgaagtcatcagctatcggctagggtagcctaatgcatttgggaagttggtttggtttacatgttaatgacctggatgaagtccagtaaggtgtggaaaagatagagtggggggagggggggaactccgaggaagctgcttcctcggtaaatatttccaaactgattagaaagttcatggccccgcgatgaagtcgagatctcaaatactggtaattattttattatttcgtacattactaacattagagaaacctttcggctcgctttctagcgctccaacctctcagggtgaaaaccgcgacttctgggcgtgcaggaaaagcacgctggaatcgagtgctgcagacatcctggaccgtggtttttacgcgtgagtaacggaggagcgcaccgaccggtggaagagagaagtggctaacgcgtgtccaaaagggggaaaagtcacaagagcaactattagggtcgcgctcctattggtcagaggaaagatcccgactttagaaggactttcctgctggctggctcgcagcgtccccggagagcaagcgagcgcgccgcagcgggagactaggttctctccgagcgtcctccgcagaggcgccgcgagaggagcagggagccgcagctcgccgtgttgtcttcatttcgtgcaataaagaattgtcattaggtttgcgtatggcatgtgctattaccccaccgtaaaactaaaattagcaaaatgtcaggaatggaaagattgattcaccaagatgcaattatcatttaaaagtgcttgattgaggtactgatgttcagtgatttattctgcataccatatacataattaaagtagtgtagtggagtaatttatcaatctagttgagactggaggggtgaggagggagctgctgtatgtttgttttattaaaatgctccgaggtctagtcccgccccccttttgcaagagtgaaactgatgatttctccagctcgcgaggaaagagtcaacggtttgggattgtgggggagagagagacggagagaaaaaggcagcgcgaagcaaaggcaaggacaaaattaaataaagggggaaaaaaggaggcaaaagacatttcatcggacgtgctgcttagaaccccaaccattcgtgctccgtcttccctaccacccccgcctcccctcccagtatccttcaatcccccccgcccccaccacccccagtcttttttacgcgatgtttcaaacgctgtgagctgttctccttttcccattcgtcttctgtcacttccttcctggacgcagttttctggacgagtctggttacttttaatccgaccggccgctgagagccactttctcctcctcctcctcctcctccttctcttcctcctccttcttcctcctcctcctcctcttccgagcggcctcggcgcgcgcgaatgcgcggccccgcgccccccccctcgcgcgcgctcccctcgcgcgcgcgcacacacgcacacatcgtctccagctctctgctcgctctgctcgcagtcacagacacttgagcacacgcgtacacccagacatcttcgggctgctattggattgactttgaaggttctgtgtgggtcgccgtggctgcatgtttgaatcaggtggagaagcacttcaacgctggacgaagtaaagattattgttgttattttttttttctctctctctctctcttaagaaaggaaaatatcccaaggactaatctgatcgggtcttccttcatgtaagtacccctgatatttctcgaggaaatagaaaacccgggtattgtctctaaaatctgcatcaatatattccacggcactgtgtctatctatccctgtgccttttttgaaggctgaagttgaggctcgttgtgcattctttttcgttagattccatgatttccttgtttgttgctaaaagtaactttttagatagtcgtatccgtttgccatcagctattgaaatcactcctgactcgttcctgtcacaccagtgtatttaaagtttcatgaagttagttcacgtcattagcatgtttgatatggtggagcgtgtggagcctggtggattttaatatttcacagcatgttctgtgaccttgaagtagacgccttaagatttagcagttagttcactgtggaaagatgctcccatgagtccccccaaagacactgatttgccctgggttatgcttctgagccactaattcttgggattagtttgacctaaagcatggctgtctgtcagagtatacctttgtgcatttccttccctcaccaaagtgccggcttgacagagggcttcttaattggtgtggacaaaaagtaatatccctgccatagtagtctacacatttcacaattcacgttcgatttcagcatatggattgctgttcaggtcaagtcaaatacatagctgtttaaaagcaagcaaggttaagtcacttaaattgccttctctttggacttggaatgaaagttaccaaactcgatgataaagtttgtcacaaaggaagtatatatagatgtggcacattgtttattttattattaaatattgtggaagtatttaaatttaatgctaatgttaccttccttccctgaacatggctattgctttttaaaggaaattttatatctgaatcacttctgactattctaagtccagtagttatcattctttggggagagcctttttttgtcacattttaggaatgcgtgtcttttgtataaaatactttatatgtaaatgctgacagtagactaagtagaattgggctctctgccagttccttaaccggtcctcagtggagaattgctttgacacaaagtgcgttttactattgtgaatctgaaactaactctaatagtaactgtcttatgaaatgcttggggactgcatataatttctaagtgctataaaggaaactccagccacctcattataccagtccaaaaaaaaaaaaagcgactagcctactttcactggcaccttgcaatggaattgtggttgcagagtaaagatgtttatgtggagtataataactccaatccctagagacttggtaggacatggaaatgtgaccacctgtgaaccccgtttaacctcgtattgcataccaattttagctttaaatagatcaacaatctctaatttgaaactaaaacatcttatttaattttaaaaaatgtcagttttggctagtctttaaaaacattcagcatgtaccaatatggtataagcagtatttttgtttctccatcagtttcaactaaagataatgcagttaaaaagccatattattgtcttccagtgtatgcatgaaattaagttaaaagaagtagttctaaagcaagactcaga

SEQ ID NO: 1882001 - DNA, 4001 bp, Homo sapiens
aaagattatgctttgctaaaaattttcactttaggtgacacctttcctccctgaccttaagaatgctttttagctctttaagaggataatcccatttcctcagaatttttaaagtagaatgaagcacagtgttatcccaattagcctcttagaaaaggcattatatgaatctatgacactaccaataatacatttttagtttgggagatagtattattccccatgctcctcattctttgttaaatggaatttcttcctggaggaatacttagcagtattttttcttgtaaaagggtactcttgcctaaaattttcagtcaagttgactttctgtaagatgaatttgcctagaaagatgtccttgtctggcacaaagtatactggaccctgttaggggaccttatcttctttccaaatttatgacataactttgggggcatcacttaacttctctgggcctgatttctcttgcctataaaaaaattaggtgtctgggtgaagtgttccccaaggtctctttcagcaggaagatactgaaagtctgactttaaagcttctcacactagtgccaagtaacagaaactccaagagtgtcctaaaatgtggctggtatcagtcataaagtaatttctttctttctttctttttttaaccagcattcattttgaactctatagcagtattctccagcagaactttatgcagtgatggaaacgtttgacatgtcgctgtccagtaagggagccactagccacatgtggctattgagcacttgaaatatggccagtggaactgagggacagaatttatttttattttatcttattttaattaatttaaatagctaccatcttggtagccgctaaatgtttcaagaacatgataacataaacgtttttacaccttcgatgtaattgagtattccacaatgccagacaggtcaaagaacagcacagatatctgcatttagtgacagcatttttgtaagacatcccagaaccgttcccctgtgttaacaaataaagggggtacaaggggaaaggaagttttctgttttgtctttaaagtgtgtgttttatcctgaataccctacttcttgctttactttgtggctttttcctagccaaaactcgcacacgcgttagcttaatagagctatgagttggcttttgttttttgaaatataattccttagatgctgagagctcagactataaaatccagtttggggcccgtgttctttcctattggtctgtcaggtgaaaaactccggctggccagagtgggacaggggcggcggctagacctgcagagcccctcttgctctcccaggtttgcaaaatggttggagcgcttcgggcagcctgcgtcaccagacgtggaccgtgtgccagcgctttgtgcactgttaaagggtgggttcattttacttggcccctggtattttcgtgggtcgctctgagcccatcccgagctcttttggatcgcatttctccagcccaggatcccaaaaccagaccagcaggacaactaccccggcactgccaccgcccgtttccacagtccacccacagccgttgcgccctcctccattccccagagcccatcacgcaccctctttaccaacaaaccaccggacgcttttcccccagccgtgacttccacaacccccaactaaatacaagtcggcacacccccttccttccccgcgccaaaccagcgtggccgcccactcgtcgcacccaggtccagcaggtccagcaggtccccaggagggcccagagcctgcctcctgctcgcccgtggcgcacgcacgtggcgcactcaccccctaccagcagcctccgagctctagaaacactccaaggaaggaacccccgccccttcagctccgtcggccgggagaaaaggggggggggaaggggggggaagcagagacgggcagagagaagagtatataggtgatgagagcagtgttggaggggaggatcggcaataattggatggcgttgcagctgttgcgcctctgctgaacgcccagccagagcggattcacttttcacacaaatcaaccggagggattgttgctgcctgcaatcaataactcagcggagtgagttgctcaaactagaggcgtccctcgtctgggtctttgagggccgtccggattgagtcccagcgctctgctttccaaacaaagaagtgggcaccaaaacgcaggacgagatttttaatccccacttccaccacaaccccgggtaaagattttttaaaatgaaaaagcacacacatagtaaggtatctagaagaaacagttaaaaggggaagtgtgaaaatccattccttgaattgaaggtttctgtgatatttcaagaaatgggatagaatcaatgttctgatgaacaacatttaacaattttgtaagtaaaggtaaagtcgcattaaatttattcatgcatgtggttatttttgaatcagccacacacttgcaagcaaattactgatcaagccttatttggacatactgattacaggaaaagaaagaaatgtatcataatttgtagtgtcgtttaaaaaaaaaaaaaaaaccttaccatacctttcagatgttatttcatgaagattgcatttctataaggtgaataggccctgggagatgtgtattatgattctcacttaatagactgtaaaatgaagcacaactggaagaaagagaactcaccaaatcacttggtagtgactacaagaccaagtttggactcactcactgtgggcctaagcctaaaaacctaaactcaactaacacccataaagtaaaactggccaaaatttttcatttctctttgactctgaagcaacttaaaaataaacctcagagatgtcaacccaaatatagaggctttataaatgattcttcactatgcaaagtcctcctgctattacaaatgggaaaagagatattgaccatcctggtctgatgtgtctcaaggctggttctctttctgggactagcctcagtctgaagccaaggaaaggttcatttgtgtgcacaaagtcatggaaagccagactaaaacagaaatcagaacacaggagcatttgtctgtgctcagtatagttaaacactgcttggaaaaataaggtattattggtaatagaatttataaaccgtactgaatacacatcactaatcccaaagtattttaaattggcctttaggcaatgcataaaataagccctttcagtaacctcaactgcattgcaaacatttcccgatttgacaaattgtgttagcttcggatataatggatttgacattcttctgtaattctctatcagatataaaactgaaggtacagaaatacagataaacatagaatccttagatatgtgtaaaccttgtcttgaaataacaaatcctttgtatattgcaaattctcaatcacagacattccacatgctgtatattcttcttgggttaatgctgcacctagtgaatttttgaaatttagatatttggcactatttatgttaaagattattatcacaatgcatgacaatttcagttgtcttatattcaaaacactttggtttaaaatcagaatattgttacttcagattagaagttttagaaataaatctatttgaaagtattttcatatcagcattaacaaaatactatatactgttttgcacttccacatttgaaggtgccaaagaagagttgcaaactgtgaagtaacttctatgaagagatgaagtaaagaacggaaggcaaatgattgtggcagtaaagaagtgtatgtggtgagtgctcacatttgtttttatcatttaccacagagttaccataaaggtaaaactgccaaactccttggccttaggtatttacagaatagacgtgtataacaataataaagagttaaatgaccaccatacactttatattataagcaatgacatatcattttgcttaaagatcatgtcatctttcagggcct

SEQ ID NO: 1882002 - DNA, 4001 bp, Homo sapiens
gttctggaggaacgcctggccgctgcagttcaggcgtttggaagttcttgtgtgctggagatgtggctggggtttgtctcacagtggaggcaaggaattgcaacttttttctattatggtacaccttgaaggcgaggttaattaaatcctgttgtggggtttgagggccggaatttaatttttggagttttatttaatgtcgggagcagattgggtaataaaatgtattttgagaataagacggccttttgaccttttagggtctagggctgtaaagtgtctcagggttgctgccaaacaagtcatgaactgggctggatttttatatttgatgaaaaagagcctaaacgctatctgatttgggataaagaaaaaggagcattaactttgactatgcttttagctccagccacctttttaagagtaaactgctgggcaggagggggagggctagtcacggaacaaaactgtaagccggaccaggtgtgaggaggggaggtgataaaaagattatagggtggaggagcagaggctgaggaagaattgggacctagctcggcctggcgaggagcaagcaggctggggaggaagggagaggtcagatgggtctgtagaaaaggaagattagaaaggctcagcgacgcttggggttggtactgaggggacaggcgggagggaaagaaggaagatttgggacgagttgcactggtcacagagactaggaagggactgatgtgtaaaagaatgcctggacgtcaggcacctcagactgtttgcctattttacgacaagaattatttagattttgcaggatggaaaaattcaaagtgccattttctggctatttggaactactgtcgagtttgtattggggtcaagcggcattgcagaagaaaataaggcatttaggttttaggtcaggtgtgagttggagaggttttaagtttttgagaacacaggccaagggagaagaaggaggaatggaaggtggaaggttgcccatagtgaaggaggcaaaccctgagaaaagagagcatagagacacggaggaggggagtggggttcttgccctccagaaaagcagagagggggttgggacacggaaataagggattggggcacagagataagaggtcagggtgcagaaataagcgattggggggttcttgccccctaggaaagcgggacttgccgctaagggtgaaggaccaaggcaggcgtccctgcgtggtctgacacccttgaaacatggctgaatgatcagagaggcgtccctgcaatgattaaacaccaagggaaggttgccttcccagtccgtgaccggcgccggagttttgggttcacggataaaacatgtctcttttgtctctaccagaaaatgaaaggaattgaaattaagagaagggagagattgaagtgtggcgccaagattgaaaggagaaagaagttgagggatagcgagggaggttggagaagagagtaaaaagaggccgcttaccggatttgaaattggtgagatgtttcttgggctggtcggtctgaggacctgaggccataggtggatgtttctcacggagcaaagagcaggaggacaggggattgatctcccaagggaggtcccccgatccgagtcacggcaccaaatttcatgcgcgtccatgtgaagagaccaccaaacaggctttgtgtgagcaataaagctgtttatttcacctgggtgcaggtgggctgagtccgaaaagagagtcagcccaggtagtcttaatgacaaattcatatccaaaaaccagcactatcagaccacaagttacagatatctttgaatgaatttagttaaccattaattaagtttagcacacactaaacctagtttagattcacctcccctcctccaagtccccacaaagatcaattacacaggagttacctggtttatttccatattaatgcttgatatctaatatggcttgttaacatagcttaccatattttctgggcataagtgtttatgggaaaaacttcagatttatacaaggttttggacatgtgactcatataaactggaataacagcattgttgctaaaacttgccgcttgctttgaagcctcatcatactgttcttgggaaaccattaagcaaaatgccctgaagggtaggagaaattgcattgagcaataaaatgtcaacaaactgcagaatttgaacatcaagcactttcatctaaatatgcccttctctcctttcacttggcaggggtttggtttttgaaaagtaataaactctagcactctagttgacctgggatgtgtttaagaaatcaaatcttagagccagaagcagtataacctttaatgtggactccccacctcggaaaaaccatagaatgagaaatataaacagaaaagtagaacagaaatatatatctcaattgtctagatatttaatttttttaaagagggtacacaccaaaaccctaggccagaagaaacaatcttaaatctgtttaaacaggtgctcagttcttactatcatcaacagcaaatgactataatcatagcacaaaataagaagtatatgaacaaggaaaacctattcataagtctgcataacttttataaacctgggatggacacagctcaatctcagagcaggtttgcagtcaagaaacagctgcccacagccaaaagtaatttcaaaacaactgaaacccttcacttatgtttcttaagaaccataaaggggatctacattcaaagaccataccaatatttattaaaacccctttcgtcttctacccttcccccgcaaacttgctgccaatccaacacattacaattcatgattccccataacttgtctcaacactttattctattttctgtctgtctttaccctctcttttctatatcactttattattcagactgaccttacctctctcctagcagaaaagaatccctacttacaggaagaaaaaggatctagaaattgatctggtaaatagagaattcccttaggcttggtagggtagaggaatagatggaaaacaacccacgtgatgaatatgatcccaacttatatatttaactgtatcatgaattaaaaactcctgaagggtaagagctgtaacttcagtgtaccctaaaactgagacctaaaaaatctgggagacattatatggatacatgctgtttgcatagttctagtgataatgaatgtttgccttgaatgactcatgttgattaaagtacagagaaggacatctctgtttcgtacctcaaaagagtcaagtttccttttggaactataaatctaataggttaccaaatggaggtctagaatttcttggagaaggaaggggcaggagccataacagaatgccagtcatggacaatgggaaatgttcatacctgcatgtagagaacattgtctcatggtttggaatattaaatcagggattgcatatacatgactagcattcatcttctaataagttctatcctgcaaaattggggattgtgaatccaaatgcttagaagagtcaggctgtgtcctaattgagtgacattggcagactgataactatggcaatatgagagaacatatcctatctaagcaggagtaatttttctatttctactaattcttatcatgtaggaatgctggctcagtattgtcagattctcagtgttccaagatagcctgaaaatccaaatgctatatgtgatattcctcaaattttaggtgttggcagtttaatattttttatcactatgacgaccaaatagccacacctgtgggctgatgcagctcacagactacgtcactcctggaaaaaaataataataatcaaccttcaagaagcaatgaatataatatataaatattttgtctctacttgattcaatatgaatattcaatagaaagaattttctgcaaaaaccattcaccaacaaataaaaaggcttagaagaaatcaaacaagtggcaactttgcaaa

SEQ ID NO: 1882003 - DNA, 4001 bp, Homo sapiens
accctgtctcttaaaaaacatgctattaaaattcacaaaaaacattttcctaccatacctcatgttctagaaacaatgcttttagttgaccttttgaccagtaatccagtgcatatgccaaaagtttcattgagagggtattgacacgtaaaaagtttccaacaaagacaactctgtttattttctaaaagaaaagaacaaagaaaaaacttgtaaaaataatagattttacaatataaaaggtttctaaatatttatttaaaatttattttaaaatgcaaaaaaacacaactacgctttattagtataacacctactacattcctggcatatagctgtataatcctgaatatttaaaaattagttctgcacacatcatccaaaatccacaaaatgtgtaacaccaagagagaaccctaaattatggactttgggtgatgatgatgtgtgcacagggttatggactgtaacacatgatcactctactatgggatgctgaggatggaagtgggctgtgtgtgtatggaaggtggtatatgggaactcactgagctttccacttaattttacgtgaacctgaaactgatctaaaaaataaagtctacttttaaaaaaaggttccagaaagactctagcagatgatttcaggtgagatttgtttttgaaaatggccaataaatagcccccttacaaagtcatttggagacacattactgatgtgattaaaaaaaaaaatcaaaacatggtaagtactataaaatgcatttagttgataagtagcaaacttggcccacacattgcaatgcatgttgaacaatgacatgcaactgtggattctacagaattggagagtaatactgactggggtactggcatgtgcattcccctaggattctagcattctttctccgtcccctgcctgattcatcaaatcattctctctctgcaaagattccacactaatttggtttcttagattatctctatgattaggaaatcttacaaaggggaactggtgtttgaatcaccagaaaacttatttcgactctcacactatactgacttttgagtagaaatctttgtacataagttgggatactgtaaaccatggcctaaattattgttaactcaattggtcagtggaaatttagacataaagggctaagaataaaggtctcaaattgttgtcagctcccaacatggtctactagtaactccatcaaccaactaacacttaagtttctaagttattaaaaaactgatgagaccaagttctggatttaaatacagaataattcagaggatttgcatatttgttctctctgctggaagctttctccccaaaatgtctacatgcacagtttccccctcacctccttcaaacctctgcctaagaatcacattttcaataaagctttcctttaaccactcaattacttagcaatttgtcctctaccactctctgccctattcccaatcctctttatcctgtttgatggtctctttttaaaaaaatagcacttatcacctaatacacactacacaatttacttaatatgtcactagaatgaatgcaagctccacaaagccagatctttgttttcttcattaatatgttccaaatacccagaacgatgtctggcatctggtaatcagtaaatatttactcaatgaataaatgaatgaatgaacaaatgaagggttccttcgaaaagcgtacttcccaatccatttaaagtatttgatatttataaaaattaaacgggcaaatatatctattattatataaggaagctagaattaaatatatatattctcttccaaacaaagaatcccaactatatggtcaatctaacagtatatccttttcacacttttcttgtaacaataaacaccactcaaatatcatgaagaacaggtctcaatgccttcatagccctgtacaatgctgcttgatccatatgcaacaaggcagcactgtaaagaagccgagggcagtaagaaaacttccaagaatttcactaatcaaatgcaacattaagcactggtggtatagtggtgagcatagctgccttccaaatgcaaaattaagactaaaaaaaatgctttcacaaagtatctcaaaatgtcttatgcttagaactttcttttacatcctcaagggatttaggttgtgtttttctgaaaaaaaattctgaataaatttctcctatttcaatttgaattatctgctactttctttaaaagtaatatagcaactggatacgtaacatatatacctaatgagtcttggcatttaatgggttacatctcaatcccagaggcctccttagggaaagtgaagaagccctgctaggtgtatataggactccaattcacatttttgataattcaagttttgtgttttttgtttttttacctcattaacagcacacattcgtgccacagaaccaatgttattggtgatagtaactaaagtagctcttgccagatcttctttactaacagattctcgcttctccttataaatcatattcccaaaactgcagaaaaatgaaaaataaagtcaaatctgctgataaaaagcaacattttacgtattaacagatatatctacaacctggatatttttataaaattaggaccaaaaagtagaaacacatagggataagatcaaaacaaactaacaaaaaaaatctatgcaagagtaaagtaatacctttcaaagaattaaggttaaaatgacatctcaaaaaaagcatagttagttattataagaaagcaaagattaccaaaatatcttcacttaaacctgattcaaaacaaattagccaaaattacaaaatgtttccaaaagtatctcagctttaacttcaaattctttttcattcagtcacaagaaacatttatgacataccaagctttgtgctggagacagatagtccctcaaacagtgaattagtctagtgcagcactgtccaatagaaataaaatacgagtaatatataatttcatatatgttctattagccacattaaaaaggtaaaaataaacaagtgaaattaattttaattgtacatttcatttaagccaatatatccaaatatcatcaattcaacatgtggcactcataagccaagtgccttacgtggctagaggctactgtaatggacaatgcaggcctacatacaaaagacagcaagagaagcgctaacagtaacagggaaaaaatccaaacaaaggctaaccccaaacaaaggctaaccttggaaatacaaacaaaaaaatatcttttattacagtggtaagagaaaaaagttaagaaggtatgaggcagggctttcagagcaaaaggaccagaaaaagccagaaaaaatgagaagaaaaatcttaggcagaggcaactaaaggttaaaggcacacagaaatgagaaatgaaaacatctatgaaatcacaagatgtttggtcggagtgaagcgtctatgcaagggagaggcaggagatattactgaagagtgagacaaagtccactatcaaagggcactggattccctgacaaagaacttggggtgcacaagcaacaatggttaggaagcataatgggagacaagactgataaacaacagaacagtaaatttaaaatatttaggaatcaatttaaaaagccatgtatggacatatttggagaggcctttttaaatgtgtgaaaggcacaaaagtagccttaaacaaacagacaagctaagttcttcaacagcaagacttactataaagatatcatttgtccctaagttaatatgtaaacttactgagattccaaaaacatttttgtaatagagaaaatgtttgccaagttcatacagaaaatcaagcaaaggagtgaaactagcccttctagagattaaaacatactttttatgcctctataaagctgaaagtataatgctggtacatcaacagaatgaaaagccagcatatgtaaaaaagccatctcaaatca

SEQ ID NO: 1882004 - DNA, 4001 bp, Homo sapiens
tttatagaggcataaaaagtatgttttaatctctagaagggctagtttcactcctttgcttgattttctgtatgaacttggcaaacattttctctattacaaaaatgtttttggaatctcagtaagtttacatattaacttagggacaaatgatatctttatagtaagtcttgctgttgaagaacttagcttgtctgtttgtttaaggctacttttgtgcctttcacacatttaaaaaggcctctccaaatatgtccatacatggctttttaaattgattcctaaatattttaaatttactgttctgttgtttatcagtcttgtctcccattatgcttcctaaccattgttgcttgtgcaccccaagttctttgtcagggaatccagtgccctttgatagtggactttgtctcactcttcagtaatatctcctgcctctcccttgcatagacgcttcactccgaccaaacatcttgtgatttcatagatgttttcatttctcatttctgtgtgcctttaacctttagttgcctctgcctaagatttttcttctcattttttctggctttttctggtccttttgctctgaaagccctgcctcataccttcttaacttttttctcttaccactgtaataaaagatatttttttgtttgtatttccaaggttagcctttgtttggggttagcctttgtttggattttttccctgttactgttagcgcttctcttgctgtcttttgtatgtaggcctgcattgtccattacagtagcctctagccacgtaaggcacttggcttatgagtgccacatgttgaattgatgatatttggatatattggcttaaatgaaatgtacaattaaaattaatttcacttgtttatttttacctttttaatgtggctaatagaacatatatgaaattatatattactcgtattttatttctattggacagtgctgcactagactaattcactgtttgagggactatctgtctccagcacaaagcttggtatgtcataaatgtttcttgtgactgaatgaaaaagaatttgaagttaaagctgagatacttttggaaacattttgtaattttggctaatttgttttgaatcaggtttaagtgaagatattttggtaatctttgctttcttataataactaactatgctttttttgagatgtcattttaaccttaattctttgaaaggtattactttactcttgcatagattttttttgttagtttgttttgatcttatccctatgtgtttctactttttggtcctaattttataaaaatatccaggttgtagatatatctgttaatacgtaaaatgttgctttttatcagcagatttgactttatttttcatttttctgcagttttgggaatatgatttataaggagaagcgagaatctgttagtaaagaagatctggcaagagctactttagttactatcaccaataacattggttctgtggcacgaatgtgtgctgttaatgaggtaaaaaaacaaaaaacacaaaacttgaattatcaaaaatgtgaattggagtcctatatacacctagcagggcttcttcactttccctaaggaggcctctgggattgagatgtaacccattaaatgccaagactcattaggtatatatgttacgtatccagttgctatattacttttaaagaaagtagcagataattcaaattgaaataggagaaatttattcagaattttttttcagaaaaacacaacctaaatcccttgaggatgtaaaagaaagttctaagcataagacattttgagatactttgtgaaagcattttttttagtcttaattttgcatttggaaggcagctatgctcaccactataccaccagtgcttaatgttgcatttgattagtgaaattcttggaagttttcttactgccctcggcttctttacagtgctgccttgttgcatatggatcaagcagcattgtacagggctatgaaggcattgagacctgttcttcatgatatttgagtggtgtttattgttacaagaaaagtgtgaaaaggatatactgttagattgaccatatagttgggattctttgtttggaagagaatatatatatttaattctagcttccttatataataatagatatatttgcccgtttaatttttataaatatcaaatactttaaatggattgggaagtacgcttttcgaaggaacccttcatttgttcattcattcatttattcattgagtaaatatttactgattaccagatgccagacatcgttctgggtatttggaacatattaatgaagaaaacaaagatctggctttgtggagcttgcattcattctagtgacatattaagtaaattgtgtagtgtgtattaggtgataagtgctatttttttaaaaagagaccatcaaacaggataaagaggattgggaatagggcagagagtggtagaggacaaattgctaagtaattgagtggttaaaggaaagctttattgaaaatgtgattcttaggcagaggtttgaaggaggtgagggggaaactgtgcatgtagacattttggggagaaagcttccagcagagagaacaaatatgcaaatcctctgaattattctgtatttaaatccagaacttggtctcatcagttttttaataacttagaaacttaagtgttagttggttgatggagttactagtagaccatgttgggagctgacaacaatttgagacctttattcttagccctttatgtctaaatttccactgaccaattgagttaacaataatttaggccatggtttacagtatcccaacttatgtacaaagatttctactcaaaagtcagtatagtgtgagagtcgaaataagttttctggtgattcaaacaccagttcccctttgtaagatttcctaatcatagagataatctaagaaaccaaattagtgtggaatctttgcagagagagaatgatttgatgaatcaggcaggggacggagaaagaatgctagaatcctaggggaatgcacatgccagtaccccagtcagtattactctccaattctgtagaatccacagttgcatgtcattgttcaacatgcattgcaatgtgtgggccaagtttgctacttatcaactaaatgcattttatagtacttaccatgttttgatttttttttttaatcacatcagtaatgtgtctccaaatgactttgtaagggggctatttattggccattttcaaaaacaaatctcacctgaaatcatctgctagagtctttctggaacctttttttaaaagtagactttattttttagatcagtttcaggttcacgtaaaattaagtggaaagctcagtgagttcccatataccaccttccatacacacacagcccacttccatcctcagcatcccatagtagagtgatcatgtgttacagtccataaccctgtgcacacatcatcatcacccaaagtccataatttagggttctctcttggtgttacacattttgtggattttggatgatgtgtgcagaactaatttttaaatattcaggattatacagctatatgccaggaatgtagtaggtgttatactaataaagcgtagttgtgtttttttgcattttaaaataaattttaaataaatatttagaaaccttttatattgtaaaatctattatttttacaagttttttctttgttcttttcttttagaaaataaacagagttgtctttgttggaaactttttacgtgtcaataccctctcaatgaaacttttggcatatgcactggattactggtcaaaaggtcaactaaaagcattgtttctagaacatgaggtatggtaggaaaatgttttttgtgaattttaatagcatgttttttaagagacagggtcttgctctgtcactcaggcttgagtttagtggcacaatgatggcttactgcagcctcttcctcctgggct

SEQ ID NO: 1882005 - DNA, 4001 bp, Homo sapiens
cgcgccgcgctcctcggacggctccggacgctgctgccgtgggcctgagaccaaggcccccgggccgacggagccgggaaagaagagccggagcctccagctgccccggggaggggcgctcgcttccgcatcctagtctctatcattaaagttctagtgaccgagacccgggctgcgttctctgggtccgcgggggtggcgcaccgcgggctacggagcctggaggggcccagcccgagtccgggcagcccggggcgggcttcctagtggcggcgtgagagtggctgcgaaggaacgagccctccccctggggcgggactggatccggtcttcacctcctaccccactccctactcagcctcggggtcacaaggccgcccagtcctgccggggttcaccctcctagcgctcagcggtctcctcaccggtccccctcctcaggggccttccctcgactctcagccgccgcagtccctcgtcccctggccttcacagctgacactagatagagcctgtggctctctccccaggtgagggcaggggtttttcttttggtcagcactggatccccctcgttaactgtaggtgttcagggcagccctccgaggtccgcagagctgcgggcaccatgggaacgaagtgagtcagtgacaggcggtctcaaggaaatgtccagaagccttggggatccaggggaggcccacagaaacaaagaagtgacttttagccaagtatgcaggagaaacggagaaaggagagctttccaaggaggggcaacagtgtgtgcaaaggccctgaggtgagcgggagaccctaatgtgccagaggagtgtcggggacccaggatgaggaccaagctgagacacacggaggggaacaaggaggctgggaaatgccttcagcttgaggagctaagggaaggcctcatcgcaggccttggacatgggggagacattcgggggacctgctataggcattgtggtcccagattctgagctggtttcaccagtgacagactttgcggcctgatcctaggaaggggggtacgctggcgccgaggtggcactgcagctgcacagccaggggctggaccccgcgcctgcaggccaggctggctccttgacttagcagggaaaggtcgctgctgatgctggctggggaggcccagtgccaggcttagttggcatgttggggcacagaccaaatgaagccaaccgcaggggcagagggagatgcccagggcgctcacatttgaggcacacacttcattaaccctttattacaagtcacgctcttatagaagtatatgtggacttacgtgaaaaaatcaaatgtatccaagaataaaaaacacagcacataaagtagtatatgcattccagtgttcgcgccagagacggcgggcgcccaagtaaaagctcttctaaaacggcctgactggggcaggccgggtgcgaacggttccgggcctcaggcacagtgtgggggccgcctgcctcctccgcggcccggcgggcgggggcagcaccagctcctagggcctccgggccagcggcggaccccaggccggcccaagcccgacgccaggcagaaccctttgggcggggccgtatctggccctccggggacggcagtgacgacacccccagaaatgtgggcttcagggctggccacagggtaccctcagaagcccgcagcttagtcggcctttttcaggaagatctggaagagccggacccagggtcagcagggcctctgagctccgccagggtctccctggctgctccccgtgcctggcctggccctgcccagcctcacctcgctcagaatcacccacacaggggagtccgtctggatcgagaggcgcagtgcttccagagggccgaaggctgggtccacctctccctctgccactcccttgtagaaggagcctgtgggagggcagtggtgagagggtgtccctgaaccccagcccacgctctcccccaaaccctacccaccgatctggaggtagccgtcggggctccgagggtaccggagggtggcggtgcggccctcctgcagggcctccttgtctgactgagggttctgggggcagaatcaagggctgaggcaggtggtcacaggaggcccggcttcagtgcacaccacacccaccgaacttacgtcgaagggcagcacctccacagacgtgttgaagagcttgtcctccgggtgctcgatgttcccactgcggaagaagaacctgcagccaggcaggcctgtgagctgctgcaggggcagcgttccagcacagcacccagggcccagcagagaaaggccaggcctgcgccaggagggccccccaggcagctgtcaggctgtgcaaagagaccagggccttcctctgggaggatggtgacaggaaacatccctgagctcctaggggctgcctgacttagtcctcacaaggtagctaccattacgaggcccacttcagatgcggaaactgaagaacgtgaggataacttgccggtgaagcctacaccctgggggccacccagccccgcccccatcgcagacccatggtgctggcactgaccgctccagtcttagaggttggaagaagcggaagcggatgaagtcccccgcggcaggggtgaaggcccagaagaagtcctcgcgcaggtaggctttctccagggtgaagtgctggtatgtcttcaggctcgtgctcacctctgctggcgggttcacatgctccttccgcagcgcctgctttccaaagtctttgtcctgcagcggaggagggacagcagtgatggcgtgggccccgaccttgatcccggcctagggagagcgtgcagtgcagcccaccttcagtttctggatcttgccagccagcgaggagtgagtgcccacgtgctggaagagggacggtttgaagcggatccgcaggttggctttctgccggtcacagtgcttctgtggagggtgggcaacaccccagggctcggcttagccctccttcctcaacacggcctctcctggggactaccagggccctcccacagctgacagtgctctatgtgagcagatgcaaggacagggacacagtttggggtggaggctgcctgccccttggccctgcccctgccagtcccgccagctcttgctcaccgcatccttctcggggttgcagactttcacccacagaatatggtccaggagccagtcgatgggcttgtcccggtagaacatgagaatgaactctacaatcaggctcaggtccagcgacttgaacatcttacctggtggggaggggcctgagtgggcagtgctgctctgcctacttcctttctccctgcagcggcccccgagtcccacagcaaacccaggggcaggcttcaggcaggtgtgggcataacggggcagggaggcagacaggtgatgagggcagacatgtctgatgcacaggcaatgagaacaggccaggtggggctgtagcacgcacaccaggcagggcccacctgggcaaaggctcacagtggacacagtgggactgggagagaggatggcagaggcaggtgggactgaaaggcaccgtcaggtaaggggaggggcacaccaatgaagcccagctgggagaactccaggatcatccagtcctctgaaggctgctgcagtgcaaagttcttcatggtgctcaggtagttgggcttggccacgatgtcatcctccagctgcgaggtgagcagagaggggctggggctgaggaagggcacccagatggaccagacccatcgcagggcagggcggcgcagggcagggcagggcaacgcagggcttggggctgacctgcacgtagtagatgcctttggactgcgcgtacatcatgaggaagcagtaatcgaggttctgtttggtcctccacctgtgggccggggcggggcctcagaagttcagacccctccacctccattgtggctccgcagagaagccgctgggtgggcagcttctgt

SEQ ID NO: 1882006 - DNA, 4001 bp, Homo sapiens
gattttctagtttatgtgtgtagaggtgtttagagtattctttgatggtagtttgtatttctgtgggatcattggtgataccccctttatcatcttttactgtgtctatttgattcttctcttttttcttctttattagtctggctagcagtctatctattttgttaatcttttcaaaacaccagctcctggagtcatagatttttttgaagggtttttttgtgtctctatcttcttcagttctgctctgatcttagttgtttcttgtctgttgctagcttttgaatttgtttgctcttgctttagttcttttaattgtgatattagggtgttgattttagatctttcccactttctcctgtgggcatttagtactataaatttccctctaaacgctgcgttagctgtgtcccagatatactggtacgttgtgtctttgttctcattggtttcagagaacttatttatttctgccttaatttcattatttacccagtagtcattcaggagcaggttgttcagtttccgtgtagttgtgaggttttgagtgagtttcttaattctgagttctaatttgattgcactgtggtctgagagactgttatgatttccattcttttgcatttgctgaagagtgttttgcttctaattatgtggtcaattttagaataagtgtgatgtggtgatgagaagaatgtatattctgttgatttggggtggagagttctgtagatgtctattaggtctacttggtccagagctgagttcaagtcctgcatatcctttttaattttctgtctcattgatcggtccagtattgatggtgaggtgttaaagtctctcactgttattgtgtgggagtctaagtctcttacagaaaccccatccaaaggtcaccagcgtcaaagaccaaaggtagataaatccatgaagatgaggaaaaaccagcacaaaaaggctgaaaatcccaaaaaccagaatgcctcttgtcctccaaaggatcacagctcttcaccaccaagggaactaaactggatggagaatgagtttgatgtattgacataagtaggcttcagaaagtgggtaatatcaaattcctccgagctaaaggagcatattctaacccaatgtaaggaagctaagaaccttgaaaaaaggttagacgaattgctaagtagaataaccagtttagagaataacataaattacctgatggagctgaaatacacagcatgagaacttcttgaagcatacacaagtatcagtagccaaatcgatcaagcggaagaaaggatatcagaaattgaagataaactcaatgaaataaagcgtgaagacaagattacagaaaaaagaatgaaaaggaacgaacaaagcctccaagaaatatgggactatgtgaaaagaccaaacctatgtttgattggtgtacgtgaaagtgatggggagaatggaaccaagttggaaaacactcttcaggatattatccaggagaacttccccaacctagcaagacaggccaacattcaaattcaggaaatacagagaacaccacaaagatactccttgagaagagcaaccccaagacacataatcatcagattcaccaaggttgaaatgaaggaaaaaatgttaagggcagccagagagaaaggttgggttacccacaaagggaagcctatcagactaacagcagatctctcagcagaaactctacaagccagaagagagtgggggccaatattcaacattcttaaataaaagaatttttttttttgttagaacaactcagcaaaataaaattcctgtttattgttggacaacattgtttcacacatacatcaaacaggccaaaaaaaataaacagcaacttcatagacaaaaaaggaaaaaaaagaaaccttttatctttggcctttttaaccatctcatacaaaccaactacttatagtacagctaagtacatacacaaaaaagttactggaatgctcggaataagattgtttttctgttgtcatttttgctttttttacaaggttttttttctcctttgagattataatgaacatggtcacaccacaagtaaagtcagaagtaggacagagaacgctccgaaggctggtttggtcatcggagatcattaaaaatggctgactctaacaatatgtacaaaaatataaaatgtaaataaaaaatacaaacaaatttcctttttaaagtacttttaagaaaaaaagcagggccttggaagttttggttcttttttcctcccctgttgcaaattctcatggtttgggttgggtggtggagagcgcgtgtcatctgcgggtggcactgtccacggtgggcgggcgggcctctctactcgaaggtgaccacgtttagattctgagacgggaagtggagggtgaataggtcaaggcggcctttttttttagtttaacttttccttttttgctgtctagtcatcctcgtcggtcttctgcttcttggtatcgacatcgtcatcctcatcatcttcagctgcccgcttgcccgtagctgtctcagcttcctcatcttcatctccatcctcttcctcaccatcaccttcttcctcctcctcttcctccccaccttcttcctcttcttcatctacctcattgtcagcctcctgctccccattttcctcattagcattcccgttagcaggggcgtctcttccattttctgcctcttccacaacttccttcttctcctgtaagtccttggtggtgatttcggagctggtgtctacggctgcgtctgacatggtggggcacgccggtgatccgatgcaggcgattaaaaagaaagcgagagttcagggactctggcgataaagctgccggagtccgcggcggcggaggaggcgcgtggcggaggcggctgcggcgagcaaggaggctgccgcgagcaaggaggctgccgcgagcaaggaggctgccgcgagcaaggaggcggacgaggaacaatgcaaagatggcttttcagagcagccagtgggaataaaagaatttttaacctagaatttcatctccagccaaactaagcttcataagtgaaggagcaataaaatcctttacagataagcaaatgctgagagattttgtcaccaccaggcctgccttacaagagctcctcaaggaagcactaaatacggaaaggaaaaacaagtaccagccactgcaaaaacataccaaattgtgaagaccatcgacgctatgaagaaactgcatcaactaaggggcaaaataaccagctaacatcataatgacaggatcatattcatacgtaacaacgttaaccttcaatgtaaatgggttaaatgccccaattaaaagacacagactggcaaattggataaagagtcaagacccattggtgtgttgtattcagaagacccatctcacgtgcaaagacacacataggctcaaaatggaggaagatttaccaagcaaatggaaagccaaaaaaaaaaaaaaaaaagggggttgcaatcctagtttctgataaaacagactgtaagtttctgataaaacagactgtaaaccaacaaagataaaaaaaagacaaagaagggcattacataatggcaaagggatcaaagcaacaagaagagctaactatcctaaatatatatgcacccaatacaggggcacccagattcaaaagcaaggccttagaatcatgtggtttttgtctttagttttgtttatgcggtgaattacacttatggattcacgtatgttgaaccaaccttggatcccagggatgaagccaacttgatcatgacagataagctttttgatgtgctgctggaatcagtttgccagtattttattgaggatttttgtgttgatgttcatcagggatattggagggcaattttttatgtttttgtatctctaccaggttttggtatcaggatgatgctggcttcataaaatgagtttgggaggagttccttcttttcaactgtt

SEQ ID NO: 1882007 - DNA, 4001 bp, Homo sapiens; identical to SEQ ID NO: 1882006

SEQ ID NO: 1882008 - DNA, 4001 bp, Homo sapiens; identical to SEQ ID NO: 1882006

SEQ ID NO: 1882009 - DNA, 4001 bp, Homo sapiens; identical to SEQ ID NO: 1882006

SEQ ID NO: 1882010 - DNA, 4001 bp, Homo sapiens
cgctgtgtcacccaggctggagtgcagtagtgtgatcacagctcactgcagcctcgacctcctgggttcaagtgatctttctgcctcagcctctaaagtagctggcactataggcaggcaccaccacacccagttaattttttgcattttttttgtagagacggagtttcaccatgttgcccaggctggtctcgaactcctggaatcaaatgatccaccttccttggcctctcaaagtgttggaggtagaggtttgagccaccacgcctggaccaattctattactctcaagatgtacaaccttggaaagattataagactagcctgtcccatctataaaatgggaatagcatcccatactttatagggtcaacagaagcataagaagaaatgttattcaaaaccacacctgggggccagacacagtgactcatgcctataattccagcactttgggaagctgaggcgggcggatcacttgaggtcaggagttcaagaccagcctggccaacatggcaaaactccacctctactaaaaatacaaaaattggctgggtgtggtggcacatacctgtaatcccagctactcggaaggctgaggcacaagaattgcttgaacccgggaggtggaggttgcagtgagccgagatcacaccactgcattccagcctgggcgacagaacaagactctgtctcaaaaaaaaaacaaaaacaaaacaccatgcctggcatataggaggcacttaataattatttttctcatctctccagagtacgagatgatagggaggcaaagaggaaggaagacagaggcagggatcaggacagggcataggtagaagaggtgggggcagcatctcagccaccctctccaggccatgggcccaggcagcgctccttgcccctgcccaagcatctctgagtggatgtcacctggaccgagctgccctctcacagccctcacctgcttgttggccaccacgacgacaggcaggtcagggtccttgtccagcagcttgtgcagctcctgtcgggcccagggcagccgcagtcggtcagccgagtccaccacaaacaccagcacatccacctcgctcacaaactccttccagtagaagcgcaggttctggctgcccccaactgaggagaggccaggggccagctcagagcctcccgggcccccgctcactgcccacagcccccaccccaccccgggcccccgctcactgcccacagcccccaccccaccccgggcccccgctcactgcccacagcccccaccccaccctgcttctagcttagtgagcttccaccagccgggggcaaggaaaagaccgcagtttccgcagctactcagactggatttagctctagctctgataggcgggtctcttggggcaagtccctagctttaagcaccagtctcctcactgaactttcctaacgggttgttgcagtaaaacccacaggtaccacgtgcgatgtacctttcacgggactgacacacaggtgctcagtaaatggaagtcttcagttctctcccctgggttgtctggctttgcctcttgctaattcctagctttctcctacaggttcaaaactgtcagtgatggctgtgacaggagccaggagtcctattgtctagaaaactcaggaccccctgccctgcctatacacagccattctccattcagtttcccccatccccttcttttcccttggaaatgtcatatttcatcctatgaacacatggttgccaacacagtcccccagcctggatcacctttcttttcctctctgctcctctgcacagtcccattggtcaccccgcaccctagtgtttctggctatgtttctgacacttgaggattctaagctgtgagagtcagaggcacttacctctgaatccccacaaagccctcagcacaatgcctggcacatagcaggcactcaacaaatatttactgagtgcttgctaggtgccaagcactgatctgggtgctgcagatacagaggtgagcaaggcaagcaggggccctgcaccaaggagctccctccctaactgggaaggacatggcaatgacatcaacacatttcaaaaaggaaagaaataaaacagaaaaaagggaaagtggctgaggtggaacaggggttggccctggattgggtggtctgggtaggtctcatcaaggaagtggcatgtgagctgagtgggatgatgagaaggagccagccatgggaagaggcagaggaaagcattccagacagaggggagagcatgctggaagtgtctgggaaacagaaagaaggctggggtgctgaggcactgcaagaaggagaaagagatggctgtgaggctggctggggcgggccacatggggccaaagaccacagtgagggggtggggagccccccaagggctttaagcaagagtgacattacctgacatgggttttctctagctgacactagggacagaaggggaagcaggaagaccaaagaggaggctgtggtgctgagaggaaagatgacactagtttgggccagacaggcaatagtggaggagggtgtgccactgcccactgccattccagcctgggcgacagagaccctgtctccaaaaaaaaaaaactagaatggtggggtgcgatggcttacgcctgtaatcccagcactttgggaggtcgaagcgggcagatcacttgaggtcaggagttcaagactagcctgaccaatgtggtgaaacccccgtctctactaaaaatacaaaaattagccgggcgtggtggcgggcgcctgtaatcccagctgctcaggaggctgaagctggagaatcgcttgaacccgggaggaggaggttgcagtgagccgagacagcgccattgcactccagcctgggtgtcacagtgagactccatctcaaaaaaaaaaaaaaaaaaaaaaagactagaaaggtgggtgaccttggattcatgatactactgctggaactcattttcctctggagataacgagggtagtgaccgattctagttttatgtaattgtttaggggagttttcttaagcaatgcccgtcaagtgcttggcatatgaacccttagctgttagtatctctgtgttaggcctatcgactttggtaggggtgatggggcaggcggtgcagctggagaggcccgatcacgaagggccctaaatgtcagagcacagagcgtgggctgaatcctgtgccccggagagcggtgggaaggattcgtagaggggaatgtgctgcttagacatgcattttggaagcccccttccctgcagagaatccaggactggtccagtagaggagacggggagatggggtagggtgtccgctcactttctagcaggtccacctcaaagtccttggtgggcagacgcacggagttgaagccccaggtggggatgtggccttccagcggtggcttccccgacaacacgcgcaggaacgtgctcttgcctgcgccatccagccccagcaccagcacctcgcgctgttccagctcctccagcgccggctcctcgtcctcctcgtcctcgggctgcggggaagcggaggtaaggttgcggctggcggcctcccgaaggacctttcccgagggaagaccgaaggcaccagagggcccaggcccgccttccacccgtcctgggacaggcaggcatggtctggatgagtgggacgaacgccgcctttgcagtcctgaattccaaacccttggcgaattccttaaacgctcgcgcgccccgcttcctccaccggtctcggagtcccgaccgcaggcgggaggggatggggtttctcccgacatccccacccccgggcggggtgcactgcgcaggcgccggaggggcgcgagccgacccggctgggccccgggatgctcccgagccgcgccctccaaactccggcccccgctggaacacccgagcctcatggcgtggagcgacggcgtggcgccaaggcgccgcacgcacc

SEQ ID NO: 1882011 - DNA, 4001 bp, Homo sapiens
tgaataattctgtgttcctactgtgggtgagatgctaggtcctgggacacagcagagaataagggagatatggatcctgccctcaaagcttatgatccagtttctggctgtcaagtgtagccgtgtggtttgtccactgcacgataagccaagtggcggaagaaatccagaagctggctgggtccaaagggagaacagggacataggataaagagcctgcatttgaagttagggtgaggagaagggaagcaggaatgacgtggggggctctagtcttcctgtctaagtgctggggaccccccctgagcaagacccttctctcttggccttggtcttctcttcttccacatatggggagctggaagtggaccagtcttgacttcctctgtagctttcaccttcctcattgccccaacatccctgagagtgtgcctttgatctcaaaagaagtcatctttcccagttaggaatttttaaagcacagagtgtgctagcagaagacagagtgttgtccttcaagcctgaccaaaggaaagtctttgccatgaagggaggacacagggagcaaaggatagccgggagtctggggaggtgagagggggagacctgcctccgtggctctcctgggctgtgctgacccgcaggaccagtggcttgggtctcctgcataatgagcccatgtcacttcatgggggttctgggcagatgaatagcgctgccctgccccctccgcactccctaattggagaatgtcatgaagttggtctccagacagagatcattaggaagagactaacaattctgatccctcataacggagctctcatggccaattagcagcagaggaaactgaactgtaccgtgggttggggaatgatcaatgccggcattgtgcattctggcagggtggatcactgggtggctggggagtggaggcaaaagtagtagaagcggtggcaatgggggctatggaggagcaatctctggctggaggcacaagcctcagtcctgttatttcccagggagacagtcagccagttctgctttaataatgcactgatagaagctccagttcccttctttagtttagcaaacaccactgctactgcaatccagaacccaaaccaggctaaaatgtttcctttttccgaaagtcagcacaagttctgggaggagtaagctgagatttcaggttctaaaacaacctaaatctcagcatgtcttatgttctcagtgttccgtctctcaaatgcccaacggcccagaggaattttggtttatcaaaccttgaaataccccaacattcctcacagtactcttccatcctatgaactagctcacactgccccccaagactaccccagcaatgtcaccactggagaacacacaggctctggagtcaggcagccctgggttacaatctcacttcagctgtgtgaccttggaccagccacataacctctctgggcctcagtttccacacctatagagcatggataacaactactatcttccccaaggacgagagacggctcatgtgcaatgcccagcacagtgtgggccaccagaaggtgctcagtaactggaagggtgccttgttttatcagctcccacagctgagccctgttctcaaggaatgaacccaggggcctgagaggatgtagccccttttggcagtagagatataagagtccacttccgaggcttgcctttctcaatttgcagggctactgccttctccagacctcccaagcccaggaaactgttggtaagtgaaagggtgagtgagtgtgtgttgcgggggtgggagttctacacaacacaggcggctctcctcatgagtgcttccagcaattagtgcacgcaatggcggggggaagggcgggaatggcgggggcgataggggtaaaaatgcagattcctggactccacacccagtgactctgttcagtagttctgaggcagggtctaggaatgtgcctttttaactaggaccgtggctgagttaggttacaaagctgtggtcttagatcacatgttgagaagccctacagggttgcaacttctgccatcaggacagacaaggctttggttccttctcagaggtttcatctggccatgtggctccagagaagtgtgagggtttgggtttctctggggaggtgcacacaggacctttgctgtctatagttgcgccttctggaaacattgggcaggcacaaggggtgagaggtggagctggggaggcagctatttcaagaactcttctggagtccctaatgggagaaaaatcacactctatacccagatatcaacttgtgtgagttgggaggtcacaagtaatgtgtgaataacaatacctcaggtgtgctgagttggaaatgagttgttttatgataatgaatttcaagtggatttaaatttatccctgtaataatatcattgccatacacttacacgatgaaaaactgtgtgtgtataaaagggattgcagccaatgtgtggaactggcaggactcttgatctattttacctgggtatgccagacagatgatgtaatctgtcatacgcatcatggcagaagtagggcctgctgcaccatctgggctgtgatctctgactctctggcttgccctagctgccctaagctggtgccttactaagctcaccttgctgccacctccaactggaccatgggtaggggctgcccagggccttgcttgacatgcttgtggagggtaccctgtccagagccaacaggacacgaacaacagaagggtcaggtccattctgggttccagctatccactgtgaggcatctgctaaggacatcctgggcatgagacctgtgtgaactggcacctgtgctgttctcagcatggcagcagctgcagagaccgaggccctgagcaccaagtggtcacacagcacaagtgactgcccaggtgcagaggtgctgcatataggggctcctgtcctcactctctgcagaagcaacctcgactccagatattgagggctctctcatcctggatgctccttgctctatggccactaaacttaacatgactcttccaaagggtttttctgttaattgtcaatgccagcccagggctggcatgtagtgggcatgcaatgcttcattgttaagagtaaactacgacacacagaggcaccatttccgttatggtgtgaaatgcaaatgtcatcatcctaagcagcttccccaagtctcagctgtagtttccagaaataagtgactgccttcttattcacatgcaggaacttcagttatttcttcctggccctagtagtgggatcctaaggatagcataaatcaggggaagaaacccaacactaaagtttccatagagcattaccctgtgaaagcctcttctccggagggccctaacctgggtcccagatgtggttaaactgatttgcccctcgttggctcacatcagcagaaatctgctcgtaggacgcccacagcccatggaatcatgaatgccgaggagctgcccccttcatctttaattcaaatgagcctgaggatgacgatggcaatggcactgatgtgggctgagctcttaccacatgccaagttctgcttaaagtgccctctggaaatgatcatctccacaacaatctcacaagggaggtagaaataatacaacctatttctattttcttggtgggaacacaggctgaatgaggattctaccccaggactgcctggtaccaggtctatgctcgtgactcccccaccccagggatgaagggaagaaaccacataagctggaacaacagccaagccaagagaagatatcaggaatgggggctgactttaagctcactctccctccagaacctgccttcctcaaaagtaggcctgtcctcttgattgtgaatctccaggctcctaaagacttatcaggtcatttggattccctgtactatgggtttctggactcttggatgcaccgtactatgggttgctg

SEQ ID NO: 1882012 - DNA, 4001 bp, Homo sapiens
aataaagggttcgctgtctctgtggccacttaaacatggctcataaagtctaacctcaagtgagagccttgagccacccccttaggatctatttaacccgtactttagataatacttgaaaaactaataactgggtttcttattccagctgaattgaaatggcaaattagaaagcgtacaagccttctagggacagacacactggaggtgacaagaagtaaacatcatctaagagtttgcagtaagggagaagatttagaaaaagatataactgatattaagacattgaaaagttatcaatttataactcttaaactctagggaagaggtgaagaaagtcatcatagggtcctaggatttaaagcttgacaagatcttagaagtcatccatactttgtagatgcagacactgaagcacaaagaagtgatgtaatttgctcaagatcacaaagctatttatttactggtagggctggaaccaaagcttgtctacttgttctcataccaacacctagaaaagtcactaatggatgttctactccacaatgccactgaattgatgaggtatttatggaggaaaaacaataattccctacccctctacacaaagatattttctcttatcactgatgacaaactctgggaaagaatacctctccatagagaagcaggtgtcaaaaaggaagaataaaacaatagttggcatttatagctttatggtatgaatagcgcgacttggaggtgatgtaatatttgaaagggccttctctaattggggtaattaatatctaagatggtattacaaatggacaatgtgaccaaaggctgtaataaaaatgaaatcccccaaacatatggctgtccatcaaaatgcaaatgacagaagagaaacaaatgactgatgatatacaaatgatttcaacgctctgtacatcacaagccatttattttggggcttgagccgtggaggaagaataatacgattgatctaaggcagctatgaaccaccactgataaataaatgtacatcttctggctctatgcaggaacaggtattcagaacaaggtggttcacacagacagacagctctttaaatgataccttgcaattacattacagccttccagcagataataaaccttcaatgagagccttgagccacccccttaggatctatttaaatttaaaattttccagtgacatgaaggttgaagggaaagaaaatcagactctattttagaggggaaaaaattctcagcaaatcaaacttggggattgatagccaagtagaaaaatgtctggtttttcattccttctccttataggtgaatattttgtctggctcaacctggtccctgattttcaaagtcaaagtgctaagagtgaatggttctatgagaaataaatgaagaaaacataaggcattaaatccttagaagtagactgggtgtggtggtggctcacgcctgtaatcccagcaccttgggaggcagaggcgggaggatcacttgggctcaggaatttgagaccagcctgggcaacacagcgagaccttgtctctactaaaaattaaaaattagctgggtgtggtggtgcatgcctatagtcccagttacttgggaggcgaggtaggatgactgcttgagcccaggagtttgaggctgcagtgggctatggttgcatcattgcacttcaacctgaatgacagagcaagatcctgtctaaaaaaaaaaaaatccttataagttattcctatcaccacataggaggtaacaggaagtagtgcataatagtgtatcactcttgatccaaataaatttgagtttggattctgactctgccatgcgcttgtccagtttacaccttcctaatcctcagtttcacctcactgagtcctgtgaggttggcactgttgtatatcagacaatgccagacaacaatgccaacctcacaggactcggtgagatcataaatgaacagatcttggcacacattaggtgttaataaatggtgacatttattactgttctcatatattattattaatgatggtttaagtttgggatcttcaatgtggaactagaaaggaggatgaaagaaaaagaagggatgaataaacacagaatttcctagcaaggaatatgatggtatcaaggttgatagatgctctgagccagccactgttctaagctctctacacaaaatatctcaattaatctataaaactctgagaaagtagcccagttttactcaatcaggcacagagaggttaagtactagctcaaagtctgctgtctgactaaagcttgtgttctaagaacacaaggattcaaagcccaaacaacttaaggtttaaatcttccatttagcttctttaaaaaaaaaattggcacaactgtgatttacactgttataaaagcagtactacctataggagagttgctggtcataacatttggttcctggtactgccaaggcggctcctgtaattaagttagctacagacacagcacattgaggtatgtccaaaaaacttgtcatgagatgaaatgtctttgttagatgactaaaaatgttcagtcctgctgaaagtatgtactgcatgtgctgtgttagcaattagctaaaatgttaagacagggcagatacttgaatgcactagtcaagaaatgttattagagaatgagctttggctcatattttccatacagccattatggaaaacagtatggaggttcctcaaaacgttaaaaacagaactaccatatgatccagcaatctcatttctggatatatatccaaagagaataaaatcactatccttaagagatatctgtactgccatgttcattgcagtactactcccaatagccaagatatggaaacaacctaagtgtccaccaacagatgaataaagaaaatgtggtgtgtgtgtatctatctcacacacacacacacacacacacgcacacacgaatattattcagccttaaaaaagaaggaaatagccaggcatggtggctcatgcctgtaatcccaggcactttgggtggctaaggtgggtggatcacttgagcccaggagttcaagaccagcctaggcaacatggtgaaaccctggctcttcaaaaaatacaaaaaaaaaaaaaaaaaaaaaaattaggcgggtgtggtggtgcacaactgtagtcccaggcactttgggtggctgaggtgggtggatcacttgagccccagagttcaagactagcctgggcaacatggtgaaaccctggctctacaaaaaatacaaaaaaaaaaaaaattcgccgggtgtagtggtgcaggcctgtagtcccagctactcaggaggctgaggtgggaggattgctggagcccagagaagtcaaggttgcagtgagccatgactggggcactgcactccagcctgggcaacagagtgaaactctttcttaaaaaaaaaaaaaaaaaaaaaaaaggtggaaatttgctgcttgtaacaacctggatgaacttggaggacattatgctaagtgaaataggccagacacacaagataaataccgcatgatctcactcatatgaggaatctaaaaaaagttgaactcatagttacagagcagaatggtgatttccaggggctccgggtgggggaaatagggagatgtgggtcaaagggtacaaactttcagttcaaagatgagtaagttctggagacctaatgtgcagcatggtgaatatagttaataatgctgtattatgtacttgaagtttgctaaaagaatagatcttaaatattctcactacaaaaaaggtagctatgggaggtgatgaacacattaattagcttgattgtggtatgacttcacaatgtatatatatatcagatcatcacattgtacaccttaaatatacacaatttttacttgtcaattatccctcaatcatatgtgggggtggggggaggatgagttttgatgcatctttggctcattatatta

SEQ ID NO: 1882013 - DNA, 4001 bp, Homo sapiens
gctggtcttgaactcctagcctcaaactttcctgccaccttcgccttccaaagctctggcatgagtgcccagcctcccaacttatatataaatacaggccgggcgcagtggctcacgcctgtaatcccagcactttgggaggccgatgcaggcagatcacgagttcaggagattgagatcatcccggctaacacggtgaaaccccgtctccactaaaaatacaaaaaattagccgagtgtggtggtgggtgcctgtagtcccagctactagggaggctgaggcaggagaatggtgtgaacccaggaggcggagcttgcagtgagccgagatcacgccactgcactccggcctaggtgacagagtgagactccgtctcacaaacacacacacacaacacacaaaagtataaatacactgaaaaaaataaacataaggaaatccaccaacatgttaacatgttacatctgggtgggaagattactacagattattatcttcatctttatttttctatgttctccaattttttttcaaatgctgcattatttttataaacagaagcaagctacaatattgtaacagaaatattgaagattatatttgaaaatattcaaggctaaacaaaagcaagttagatatcacctatgtgtccgcaatcagaaacctttgagactaaaatttagccttttggaagcaccgtccatcttcccccagacccacccctgcctcttggcaaaatcacagcaccatgctgtgactgaggggtcggtctaagagagacagagactgatttctctctaggaaaggctcatgcagagctctctgcttccttggtttccagaacttcaccagccttcttggcctgaagttccttcttctgaagtcaggcatggctctgccaagggatacttggacagtgatccatgggactggagaagacccctgcaatccctgcagttaccaggttacttaattagctggcatttaagggtctgtaggatctgaaccaatcttccttacaactcccatgtgtgccaatcaaacagtctgtcggccatctccaaagccagaaagggacagtaatgagtgaagagagctgggtgtgatgcaattgggaaaggtaaggactgtggcaaactggagtaagcccacaccttcaaaacgaacggccacttctcagtgccagtctattgctacctggtgggacctttcgatttttcaagagaattggaaaatctggatctttatgtgaaatctcctgattttaaaataaatattggcaggtaattcacaaaacatatttggccactctgctgatcacaatttgtgacttgtcttaggaacacattgaacttttttccctctgcacctttgcttttgctattcccaatgccaagaacactcccccacccatctaagtctaatgaactccatctgttccgtcagacccagccaaaacaccacctcttccggagcatccccgcagccagaagtgacatctccctcactggggctgcaccacacatttagctctgtgcctgtctcatcctatgcccacagttgtttcagtaagagtcttagctttcctggtacagaatgagctcctgaaatatccagaaaacatttgtggagcacctgctatggtgcaggaaccgtactaagcactagtgatacagcctagaacaagatggatatgtctttgccttgatgcagtacagtctagtgtagggggcagattttaaataaataactccctagatacctaatcccaattgtgatgagttttatggggttaagaaagtttataaaagagacttaatccaggcaaaggaggattaaccgaatcacgaggtagcttggggaagcattagcagtagggctcccacttagggctgtacagtttacatgctgcacaaagcctggcaacagagcaagaccccgtctctaaaatttaaaaaaaaaaaaattgtagagttgaggtctcgctatgttgcccagcctgatctcaaactcccggcctcaagtgtttctcccacttggcctcccaaagtgttggaattacaggtgcgagccactgtgcccgacccctttttctaatctgcacaaaggcatcgtatagactagcagaggcagcgtttagttcacccctatccaaagctgctttaaataaacttagaatctaagtagatacggtgacttccctatgtacatgcagcccaaagagatgttccctgctccccactttctacgctaaacccttagacttctgagatcagggaaggcaccccaaggaagtaacataggagctgagactgaaggataagaaggggccagccagcttggaatatgaggaacagcatgtgcaaggcctctgaggggagaaggtaccatggccaaaggacctaataggtggccgttgtggtggaagcatggacagaggtaggagagcattaaggggtaggctgggcagtgaccaccctgcatggctcagaaggccacattaaggagtgcaattcttttttttttttttctgagatgttgtctcactctgtcacccaggctggagtgcagtggcgcgatctcagctcactgcaacctccaccctccgggttcaagtgattctcctgcctcagcctccttagtagctgggattacaggtgcgcgtcaccatgcccagctaatttctgtattttcagtagagacgaagtttcaccatgttggtcaggctggtgtcgaactgctgaccttgtgatctgcccacctccacctcacaaagtgctgagattacaggcatgagccaccgcgcccagccaaggggtacaattcttatcctgaaataccttccatatcccttccatatcccactccctaaccacgtcatttctgggtttcactgcccatgagagagtgcacaatggtagaaactatctttacagagggcctgccatgaggcacagactgtgctggggtcatacattcattctgccttttttatgctcctaaggaagtattatttgatttcaatggaacagatgaaaaaatggaggcacagagaggatgagcagctggcctaaggttagctgactgttaaggggtaggctgggatccactgtgaagtccactgtgggacttcaaaccccttctcttggccgtcatgcagcaatggtacccatgaatagaccggaagcgcaaggagtgcacacccttgctactcaaaggcaggagggtctaggggcctgcaacactggcatcacctggaagtttgtcagaaatgcaggatcttgggttcgttccatccagccctactgaatcagaatctacaatttttttgtgtgtgtgtgtgaaagggtctcactgtgttgcccaggctagagtataggggcacaaacacagcttactatagtccccacctcctgagttcaagggatcctcctgcctaagcctcccaagtagctggcacaggccaccacgcccaactaatttttaatttttttgtagagatagggatctcaccatgttgcccaggctggtctcaaatttcctgggctcaagcaattatcctgccttggcctcccaaagtgctgggattacaggtgtgagccatcgtgccacgtcagaatctacactttacaggaatcatgtacacattaggagctgagaagcactagactagagaataatccaagcaaagtggcatattgcctttgtagcccttatgcaacagtgtctcataagccaggtttccaatgacccgaaaacaacttcttataaccaaatataccagattggccaactgttccattcatctatccaccctagttttgtcatctatttccactccaagggaaagactgtgagaagctaccatcaactccaaagacgaggtgctgtatgctccaaatcatctcccatttgaggtctactctgatccccagataattttctggaacacacttttcacaaaagaattccctatgttagcctgcataccaaaggagtc

SEQ ID NO: 1882014 - DNA, 4001 bp, Homo sapiens
cagcctcacagggatgttatgaaatagacacgatggaaagaaaagcaacgcaaaggtttggaacatggttcataagccctcttacctccagggacagccttcttcttgaaccctcatcctgtgagccagccgaggccccattggggggcaactgtggggtgggaaggaggcaaatccagctgtgaaaccatgacctcaagaacagtatttccaggaatccccatcttagcatctaagggattcctgggaaaactggaccgtgaggacaaggtgggagcgagtggccttcagcgccaaggccgccgtgtccctaaggaccagctggagttctcttctgcatccagccccatctgtagcagccagggtggggtgccacacgtcgccggatgtggcttattgctctgggggggagtagtgaccggaacttcaattgccctgaaaagtaccggaaaccctctggcgcccccacccccaggactgccctctgctgtctgcacggctcatgtgtattccccagtctcctgccagaggggtggatttaaaccaaccattcagttcctagcctgggtttggcaacttcctctctgataacctccagtaagtcacttaacccctgagccttggccttctttaattataaaatgcatgagtccacgacctactggagaggtgagatgaataagattgggggaagggggtaggaggaaggaagcctgtagtattaatggcaagtgtccgggtctgtctttgctaaaagtgacctgagatgtaaagacaagatgggagcagaatttagaatgttctcctcctgctcctcggtcccaggttccataatcacatgcaatgggtaaaaacatggatttgaaggcagattagggtacaatctcagctcagcacaatcaatatgtgactttaggtgagctgcttaaataagcctcagtttttctcatctgtaaaatggggctataacaccacccacttcccaagcttttggggaggttaaatgagactgtgcttggctccatggctctcctctgctgctcattgtgcttctgaagcctctgggagaagtcagacatttgtgacgtgcctggactggtttcggcaataccccggagccaaggttagaagtacagagtgaagaccctgactcaaaggccagaatttttatcttcagggctgaaagggtttttaggaattgtttgatccacaaatgatgaatgagtttcagctgtgaatcagtactagtggctttccagggctcattgttgaggattctgaagctgcatctgagcacttcaagaatggatgcctggcggggcgtggaggctcatgcctgtaatcccagcactttgggaggccgaggcgggcagatcacctgaagtcaggagtttgagaccagcctggccaacatagtgaaaccccatctctactaaaaatacaaaaattagccaggtgtggtggcgcacacctgtaatctcagctacttgggaggctgaggcacgagaattgcttgaccctgggaggaggaggttgcagtgagctgagattatgccactgcactccagcctgggtgatggagtgagactgtgtctcaaaaaaaaaagaatatatgcctttactgattagctgtgtctgccatgggctcagaaagagaaagcagaggcagggtgctggggaaatgctaacgcctcatgctaagatggacacactggggtacacagaggagtcaggacatgcccagactcgtgaagcagatcgtggcaccaggggaacttgtgtagaggaacttccccagcatcacaagtggctgatagtatggagtctggaaacactctgtccttcctgttatggccccccacaaccccccagcacttaccacttccaggctgatggctgcagaacaacttctctcttcctgagctacagtgcttcatctcagactcccaactgaccagagatgcagcactgcacctcaggctgggagacagggcgctgcgctgctccgctctggtggcctgtggcgggactccaacctggccaggagaaggggtgttagaggggacctgggctccacctctccagctctggccgggaggctgttgtaattcctcacaactgtgtttcctgtctgtggcctgccatttgagcacccaggaccaaaccttgaccttttttctcttcttttctttgtttctttccttttcttgtcaagaacagcttaatttagaaggaggacatttagtgagtacaattaacaggtttttaatatattcacaaagttgtgcaaacaatggcacaatatattttaggttatttcaccatccaaaaaagaagctccttatccttagacaacccctagtcctgggcagaccagtttctatctctatagatctgtctatatattttctggatatttcaatacatggaattatttaatatgttgacctaccttttgatgccatgccccacctttatgcttggcgcattccagcctaacagcatcattcatggtacttaacattttatatcatcgagcaatcaattgtctccaacctatctttcttctgccactcctcctctcttcccagccatcttcccataatgatttttcaagatgcaaatatgctcatatcttactcaagtttaatatcccaaaagggctccccattgccctcaggctgaattctgaagcccttcccaaagcctgcgagggtctgccgcatctagccccagtgacctcttcctcttgggctacagctcatagatgtccttccattctcctagggagccctgtgcccacccacttcgggctcccagggactgtgctgctccccgtcactctccctgcccatctcttcctcctgtgctaggtctctaatcaagtggccactctgggaaaccctccttgacttttttttttttttgagacagagtctccctctgtcgcccaggctggagtgcagtgacacgatctcggctcactgcaaactccaccttccgggttaaagcaattctcatgccccagcctcccaagtagctgggactacaggcgtgcaccaccatgcctggctaatttttgtatttttagtagagacagggtttcaccacgttgcccaggctggtctagaactcctgacctcaggtgatccacccgccttggtctcccaaagtgctgggattataggcatgaaccacagtgcccagcccctcctttacttctttagccatcagcaccccctgcttcatgttctcgcccacccggtgccctctttctaaccctttaccatgctggtaatgtggttttcacttacgaccacctccacttgtggactacatggctcacctgtgaagggaagggaccctgtcaactgtgctcactactgaaatcagggccaggtggtgtagatgccacataagcccaggttgaatggctgaatcataattcccaatctcattatctctagtatcagtgttatttgtgtgtgggtctgacctggctagatctccacttcctgaggacagtgcctgtgtcttgttaatttggggggccctgggtctgacctgtggcttggtacatgatgatggacctaggtaatgccatttggtggctgattggatgaccatgtagataattcattttgttttctgggcccggcttgggtgggaactttcaggtgagcaggcaaagccccttctcactcttcctgccctgccaagatctcagggcaccccagaggaccttcttgcattgcttagtggtcactgtggtggccttgatgttggatgacatatattttcaggaatgtctgaaggggatgggtagcctttcttcagggctgagagagaacagaaaaaatatacctccttaaaaaaacaaaaacagagctgggagcagtgctcatgcctgtaatcctagcactttgggaggctcaggcaggaggatcgcttgagcctagagttcaagatcagcctgggcaacatggggagcccttgtctct

SEQ ID NO: 1882015 - DNA, 4001 bp, Homo sapiens
gtcccccgtcagtgggtgagtgcacagtggttcagatacattgcccacacaatgccctagaaaggcaggaaaggagatcccccccagtccttcaggcatctcaagctgatcactttcctgtgtcccacagcctctgacttttgattcctcctgcctctttccagagcctgttccagagctcttcagcaactctgggcattccctggccgggtttcattcccacttctccctcaacatagctcagggtatcttgcccgcaggaggtgtgggctctgactgcgatgtaacatcagccccattcatcctgctctatgtgcctacatccctcactcctcatgacaaccatgcaagctcagaattgtacccattttacagaggaggaagctgaggctcaaacagcaagcaacttgcccagggtcacttgtccagtaagtaaacaagccagaattggacccaggcagttgaattcagagcctccttctgaaccatgatggccttgggtcttgtgtgacaagaagcgggaaggtggagggtacaagacagaggccggtgctagaggactgttctgttctgggctccggatgtggccagagtgttttcagaggagcccgactccatgctgtctgtacatcttcaagttccaatcctaagcccctgcctctacccagccctgcctcccatcacaagcctcctgcattcctctaagtcccctggccccactgcttcatcccgcgaagccctctgccatcttttccatcccttacctacttccatgtcccacattcctgtgtggttgaatccagagatcagtcctttccccaccagaggctggttgcagccaagttcatctggagggctcggggcacccctctggccaagccttcagtcacagaaccttcagctactctccctcactcaggctcaacctccaaaagctcccacaggacttcatctgcttggactccaagcttgtggtcaaagttcagactcggctcagggacctcctgggggaacttcccaacactggctgtccctcaggcacaaacaactcagaagccacatctgcagagggaccattttgtccaatggccttgctatacagatgggaaaactatggcccagagaagggagggggccagcccaagaccacagagccgggcactgagagcagagctggggccggagcttaagtgcccccgtctcctctcaccagcatcccttcccattgctccatgtgcagtcagcacccagccttcccaggatctctgcctgcctgccagagcctgagcttacattgcctcttccccagctttgtttctcgaaaccattatttgaaaaccattttccttgccaggagccccaggctcttggaattacaaaatcaaagccccacacaatgaggaagaagcactgcctatgtagaagccagggagactgcctgagactcgggtgccgaggtgaagcttgggctgataggatgttaactctgtgcactccctctgcaccttcttcccccaattgactacaacaacaaggaatcctagaagccaacaggaccatagaactagagccgatcagctggatggatgcttagagatcattgactccagcccctgtacagatggggaaactgagacccagagaatctgtgtccagaaagggacagagccagttagcaagacagcaagacccccagatgcagcatccccctagggaaattcccagaggcccccacccacggatcccaggtctgccgttggtgcttacctttcctggggtctggtccaggtgtggctccttggggcctggagacgggagccagcctgtttggggagtggttgggggtgtcactgcttctcaactaattagacccagcctctggtgcccctcgctgccacaggggcatttttaagcagctggcactgagcccccctccccttagtcccttgcctgcggctccctggccacagaggccactctgccttttaccttatatgagctgaagaggcaagccccgtattggggcgaggcgggtgctgagccctcccagggccccccattggcccaggcaccccccacgtgactaccttgccttgacctgcccccggtgctgaatgttgcttttaccccctaaggaaggagtggttgacaattttcatatttcttctaaatttggagatttcagacaatgctgggagccttggctccagccaccagaggcccatgtggaagtcattaagcctgagaaggggggcaggggagagagggaggcagggagaggaggaggaggaggaggaggaggaggaggaggaggaggaggaagggggtggggaacagagttctgagggttgccagttgtcagcctgggaacaagagcaaactccctgggagaaagctgtgtgagaatttccttcctcccccagcccctgtgtcccaggactgcagtgggagttctgagactttctgggaacctccagtaggggagacaccagtcctggctcctggaatctgggtgatgggaattgggggaacaggagaacatggggaaggagagcccagaccgtgggaagctactcccatcatcatgcaaacgaggcctgggcctgacagggaagatcctgacccagccacctggcagggtcaccacagggcaggggtttgaatgtggaatgtccttcagggggctctcttttccctgccaccgcagtcctgagaaatgcccatctcttgccggagtccctctttctccttttgcttggccaccttggcctcctacagattctttagtgtttttcatgcctcagggcttttgcacttgcattgctcgctgccaaaaatgccttcttcccagagctcatgctgctccttcccctgctcctgtctcccactcagaagtctcctctggaagagccattccctggccccctcagtattctgtcacaccctctgcttgcttcccgcttcggactcgccacgcatgtgcctatcttacatgtccacggttctagtttcttgctggctagctctttcatgagagtgtgacttcccctggcaggctctgtgtccccaggcttcctagagtgtctgtgaagaaaggtcagaaaacacaaatcaagggatcacgtgaaccaggcctcggctgccagcctaggagtgtcgtgctgaggcccatggaggtcttctcccaggggccagcggggcctgctcccagggctgccaccgggtcctgccttccactgcgcagagcttcccttctgcagccaggcctgctggaccccagcggtctctgttcacggcctcattcacagttcctcagacccccagcctggatgggcctgccaatccctctctcctccttccaggccagaggctgtggtctgcctgtcaccgaccctgggaccccctccagcagcacacggggccttgtgacatcctgagtggggccagttgagggcccgagggggtggggtgctgaatcagacactgtccctgaccttgagagcctcccagtccaacaggaggattaaaaatgccatgtccttacccctccaccctccctcattccttctgaggaaagaattctgttggtgttgaaaggccggtgggcttcttcctgccttggccacttcctagctgtgaggtctgccgctcccagcctccctttcccccggtgcctccctttccccttgggtaaaatggcgagaatcacacctgccttcagcattgccatgagggctgggcgaggtggcccgtgcagtcctggaggaaggtgtgagcaggactcgagtgagactgggctcagccctgcccctctgctcccaatggtggggctggggaaagccctctgggaactaacttctgtgaagatcactgtctcctctgtagcacagagtcaatggttgtgaaggtttagccccgagcctgcttcagagtgagtgcttgatcgatgtaagctatgactcagagttgcggtgcgagagctctacacggaggtttcgcca

SEQ ID NO: 1882016 - DNA, 4001 bp, Homo sapiens
ttcacgacttcttagctgtgtgaccttaggtaagtctgttaacctctctcagccttggctttgtggagtggagtgaagagcagggcctgcttcactggggtgttatcaggatggagggggacaaggcctatgaaagtgtttagcacagcgcctggcagatcgtgaccagtcacggagtggaagctatcatgatcaaatctgatttctccacggtcaggccagccctgtcactacggatgaggaagagggggtctcatttcataaatgccttcaatgcggcctgtgagaaagacagcttgggacacctgtgtgagctgcctagtctctggcaatgtgggagtcggacccaaacatgagggttctggggccttggcacttactaccatttctacatctccatgaaaagccctagcaagagtacggggaaagttctaatttttttttttttgagacagagtttcgcttttgtcccccacgctggagtgcagtggcgcgatctcagctcactgcaacctctgcctcccgggtccaagcaattctcctgcctcagcctcctgagtagctgagattataggtggccaccaccatgcccagctaattttttgtatttttagtagagacggggttttgccatgttgggcaggccggtcttgaactcctgacctcgtgatccacccgcctgggcctcccaaagtgttgggattacaggtgtgagccaccgcgcccggccggaaagttctgattttgcacctggattacattaggtcttctgtcattcagttagttagcattctctataggcagtcagagaggctgacttttaaaattatttaggtattttttagagacagggtctccctatcttgctcaggctggagtgcattggctattcacaggcacaatcatagctctctgcagccaggaactcccaagctcaagtggtcctcccccgtcggcctcctcagtagctgggactgtaggcactcaccactgtgcctgactttttatttttgtagattttgcttttggctaagaaattgccataggccattggacttgaaatcagcgctggccctgccttttgctgtctgggcgaccttgggctggccactttacctctctgagcctcactgatcccacagatctacgtaaggagggctttgaggatgaaccagcctgtggaagtaaatgagaggaagtgatgggggcattgctggtggtgcaacaatggagagggtttcagtagtcactggctcaaaagtgagggggcaaaaggaacctcagtgtgtgtgtgtgtgtgtgtgtgtgtgtgtgtgtgtccaacgtcttgtagcaaggttagcaatcaccatgtgtaggggaagagccatagtgttcctagggtgggtagagatgccacaagagggcgttctgagttttcatcttctctaccttgaaaaattttccatttgttctctggctgcattccaaatcgaacgaagacttaaggtttttagtttacctaactgattgaatacacttttaaaatgaattcatgtgtgtttactagtttatcagtcatgtggatgcaataccgcagcccctgtcgcaaggcgcgttgggaagtgggttgagggtgtggtggagacaagaaacgcatgcctgatggtgtcctggttcaaccgctgctcagccgggtggccttggacaaatttcccaagagtacggcagtgctgaagttcccacatccagcctcacagggatgttatgaaatagacacgatggaaagaaaagcaacgcaaaggtttggaacatggttcataagccctcttacctccagggacagccttcttcttgaaccctcatcctgtgagccagccgaggccccattggggggcaactgtggggtgggaaggaggcaaatccagctgtgaaaccatgacctcaagaacagtatttccaggaatccccatcttagcatctaagggattcctgggaaaactggaccgtgaggacaaggtgggagcgagtggccttcagcgccaaggccgccgtgtccctaaggaccagctggagttctcttctgcatccagccccatctgtagcagccagggtggggtgccacacgtcgccggatgtggcttattgctctgggggggagtagtgaccggaacttcaattgccctgaaaagtaccggaaaccctctggcgcccccacccccaggactgccctctgctgtctgcacggctcatgtgtattccccagtctcctgccagaggggtggatttaaaccaaccattcagttcctagcctgggtttggcaacttcctctctgataacctccagtaagtcacttaacccctgagccttggccttctttaattataaaatgcatgagtccacgacctactggagaggtgagatgaataagattgggggaagggggtaggaggaaggaagcctgtagtattaatggcaagtgtccgggtctgtctttgctaaaagtgacctgagatgtaaagacaagatgggagcagaatttagaatgttctcctcctgctcctcggtcccaggttccataatcacatgcaatgggtaaaaacatggatttgaaggcagattagggtacaatctcagctcagcacaatcaatatgtgactttaggtgagctgcttaaataagcctcagtttttctcatctgtaaaatggggctataacaccacccacttcccaagcttttggggaggttaaatgagactgtgcttggctccatggctctcctctgctgctcattgtgcttctgaagcctctgggagaagtcagacatttgtgacgtgcctggactggtttcggcaataccccggagccaaggttagaagtacagagtgaagaccctgactcaaaggccagaatttttatcttcagggctgaaagggtttttaggaattgtttgatccacaaatgatgaatgagtttcagctgtgaatcagtactagtggctttccagggctcattgttgaggattctgaagctgcatctgagcacttcaagaatggatgcctggcggggcgtggaggctcatgcctgtaatcccagcactttgggaggccgaggcgggcagatcacctgaagtcaggagtttgagaccagcctggccaacatagtgaaaccccatctctactaaaaatacaaaaattagccaggtgtggtggcgcacacctgtaatctcagctacttgggaggctgaggcacgagaattgcttgaccctgggaggaggaggttgcagtgagctgagattatgccactgcactccagcctgggtgatggagtgagactgtgtctcaaaaaaaaaagaatatatgcctttactgattagctgtgtctgccatgggctcagaaagagaaagcagaggcagggtgctggggaaatgctaacgcctcatgctaagatggacacactggggtacacagaggagtcaggacatgcccagactcgtgaagcagatcgtggcaccaggggaacttgtgtagaggaacttccccagcatcacaagtggctgatagtatggagtctggaaacactctgtccttcctgttatggccccccacaaccccccagcacttaccacttccaggctgatggctgcagaacaacttctctcttcctgagctacagtgcttcatctcagactcccaactgaccagagatgcagcactgcacctcaggctgggagacagggcgctgcgctgctccgctctggtggcctgtggcgggactccaacctggccaggagaaggggtgttagaggggacctgggctccacctctccagctctggccgggaggctgttgtaattcctcacaactgtgtttcctgtctgtggcctgccatttgagcacccaggaccaaaccttgaccttttttctcttcttttctttgtttctttccttttcttgtcaagaacagcttaatttagaaggaggacatttagtgagtacaattaacaggtttttaatata

SEQ ID NO: 1882017 - DNA, 4001 bp, Homo sapiens
aaaagaaaaacacatctcaaatcccaccacgtcagagataaccattgttagcaaattgatgtacatctttcaacacacgtattcctacatacatttattattttacataaactgaatcatagacaccaagttattttgcaacatgctttttccacttacataaaccaagttttggtaaagcaaatacaacctcaaaaatctttgagaaatgtactatctaatggaatcttaacacaaattctctatgaaatgaagcattcttttatacagtgaatttctgcctactcctcacagatacactaggttaattttttaatgtgtgtgtgtatctgtgaattccatatttcatttattaggtttgctttaggaagagtgcccctgaaataaaaatgagccttttgtactaaatcggagttctgagccaaagtcagtgtccacagcacagaggagctgaaacccagagcatttggagcttctagtatatattctggattttctccatcagtctaggactgaagacaccgatctctggtgtcggttgagatttcaccaaggttctggttctggaatgagtcactggctaagggtctgataagcaaagggcggaagtgggcagagtgtgagaagggtgggggaggtccttgatctgatcagtacaacccagagaacacacccatgtcccacacgcttgcgagggggccttcataataaccaagcacccctttccatctgtagaacatggttacgtgtttttcaatttgccatcctgttgttaatttgtccccgttttccagatgaggcttggtgagattcactgagatcatgcatacaaagaaagccctgagcacagtgcttggcacatagtgggcactcagtaaacctcggtgtcactgagaagacagaatgagaatgagcatgctgtggagtctttcacctgcctctcctctgggacaggttactctttcattctgtagactgtaatgacatggaaattccaagataccaagagacaatgatgaatcaaagatgagttcccaaaagacaaatcacatcccttattccccatcaaatctaaagcctaataaagtccatatagcactcatgaggcctctaaccttctgcctaaaagtgatcatcatcacagcaaacctgagcctcagaaaggacctagcttacttggtgacagaggagggcaacagaaggacttggcccatggcacccagctgaccatgtcagcaaatagagaggccttcaaagcctttgcattcctgttccctggagaaactgaggattgcagtaaagtgtaattacaacctctttttgccttgtttgaaatacaaagggacaatgtagccctaatatatttatagaaggaagtagagatcaaataaaggaagagggggaccaaaagaagggcatatccatgtttctcatcttctttcactgcagatcttaaaaaggaaccagaagcctcagcagtccctgctaaagaatcattgtcacattctattagttccctctgatcccgtgaagaggggggaaaaatcattgcatggcaatgccatgtgtctcaagcttcattaaagtgatttctcccaagagtctcgtataacagcatgtaaagcacttacaacagtacctgaatcatcgtaagtaatcaataaatgtaaacgagtagcagcagcagcaagagagacttgctgagatcattcatttagctacttggaaccctgcttagcatagaattcaagtcttttcacaatcaaatgagtgtttctcacaggaactcacactccttataccttcagagcctgagactctgccttctgtctccagtcttccaagctcttcagcagactgaaaaagttcttcaggatctactctctccaggtcctcaagcccacgatgacagagatatcccagctgaagaactgaatttcagaggtctgacactgacacaacccatggaattcagttctcaaagctgaggatacacatcggcttttcagagatggtgcaaagacccctccttgcagtccaggcctgtcccagccctgtaaaatacaagagtgaaaagcctggtaaatccaatgcagctgcttcctagtaccaggtctagtcctggcactcatgagttataaacatctggaggagaccaggccagcagtctggaaggctgatgtgggtggatctcttgagcccaggagttcaggactagcctgggcaacatggagaatttgtctctactaaaaataaaaaatgagccatgcatgatggcctgtggtgggaggatcgcttgagcctgggaattggaggttgcagtgagctatgattgcaccactgcactccagtctgggccacagagagagaccctgtcaaaacaaaaactaatctgtaggggatgtgtatggtagacacacacatcattaagcatcattaaacatggtagctggcctttcctgcctcatgacccttccatatgccatccctctggcctggaaaactcgttcctctctttaacatcaacttatcctgatgttcttgctttcaatgtcacttcctcagagaggccatctatggcagagattgctgattgtttgcccaatatatattctctcctccttctatactaatagaacccttaagtggtatctgaacacatggacatctgactttgtttcctcacctggtgtgacaaagtgctggatatgagcaggagtggagagttttttactgtttccctccctcttctcaggcttggactgtagacatggtagagagccactgtggaccatgcaaatgagtgcagccccccagggaacagcagagcagcatgccagaagagccccaaaagtgtgaggcttccttatacaccctagactgcttacacctgcactgatagatcagcaagaatggaacatttaccttatttaagccactgttacttggggatctctgtaagagcacttgaatgtttacctaccactccctcaccatcagcctccagctagtctctttcataatatgggattctttccttcaccgtaatttgtaattgttagataattttgtataattatttgattaaaattatctctccaacaagactgttttccataagcatagagaccatgctagtgttttttaaatatgtatataggcgagatgtggtgactcacacctgtaatctcggaactttgggaggctgaggcaggcagatcacctgaggtcaggagttcaagtttcacttggctaacatggtgaaaccccgtctctaacaaaaatacaaaaattcgccaggcatggtggcgcacacctgtagtcccagctacttgggaggctgaggcagaagaatcacttgaacccaggaggcagaggttgcagtgagctaagattgcacaactgcactccaggctgggtgacaaagcgagactctgtctctaaaaaataataataaaataaaataagtatataatagccttattgagctatagctatatagctcacacaccagaaaatttacctatttaaagtaaaaaatgcattggtttttagtattttgcagagttgtacaaccatcataatcaattccagaacattttcatcatccccaaaatagatcccataaccattaacagtcaatctccattcccctccctcacccctggggaatcactgatctacgttctgtctatatatatgctggacatcttatataaatgaaatcatataatcagcggccttttgtgactggcttctttcacttagctttcaggatatatccatgttttaatgcgtatcagtacatccttcctatggatgaataatattccatcgttaggatctaccacatttcatttatccattcatcagctgatgggcatttgggttgttgctaccttttgcctatttgatgcttctatgaatgaatacccatgtacaagttttgtatggacatatgtttgcatttctcatggatgtgtgaacccaaaagtatctga

SEQ ID NO: 1882018 - DNA, 4001 bp, Homo sapiens
aatatccctaagatgagtggaataaaagaaaggaggaaagaagcagaaagaggaattggggggagcgtaagtcctgtcaggcctcatcagcttgaaaagacagtgatgtgaataagcaaagggtcataagtgatgaatgactaaggagaacactgccaggcacacagacatccactcatgggcaaggctgggggaccagctgccagtggctggaagatgccaactgttttactaggagtttggtcaccagttgggcagggagccgtcctagtaagctatcccctttggagtctattatgagtgcagccatctgcctgaaaacagagggaaatacccatggtctgaggctggcactgcctcatcacagcctgtggctgcggggccagtaaagcactgatggaagggcaccattatggacccactcccagaggcctggtccctgccatgttaggggcagtgccgagggcctcagaatgcccctctctgtaaggtgggaaagggaacttctccaggctcgaggatttgctctgtgttaaatgggatctttgtatgtccatgctggagaggaacagccatttgaataatgctttctctcttactcaagttctttctactaacagatgaaagtctgaaagggagagtttaagcaaatttcaagtccctatcaaatcacagtttttaaatgttctaattcaaggcaatggggttgtccacagctgggaaggtgggtattacagcagtacagtgcagccattctggaatcagatgaccctgggtaagttagctaacctctctgagcctcaatatcctcatctgtaaagtgggactttagattttgtgaacattaaacaaggtaatgatgtgaaaacagttcactgcctggcctatagcaagcactcaatgtatgttaaaaaactactaagcaatggttgggctcctggttctgaggggtaacctcagatagacgaggtaataagagtcacacctcatgatgggggcccagggctcagcttctagttctgagctaggctaaagttcccaccttagctctctcttgcagaataggacaaagactccaggacaggaatgaacaacacagtcttctggttacactgggtctaggatttatcaaggaacaagcaaaataagaggtaccaagatccctctctttattatcagagatagcaggtttccacgtccacacacactcccctcccctgaaacagaattagcaccaggtgaggagcccagcacctccacgttaactgtgctttgcaggtcaaggaaacagactggactttaggtttcatggggttcagggactgtgttttcataaagtatgggaatgaggttcagaaggaaccttgggttaaacccaaagtctcagactcacatgagtttcacccattctcatgctgacgttcatttcaaataaagtgaataccaataaaggtggtggtgggaggggtcgggggtcacaagcagtaggaattcccctttgggttagctgccacttggaaaaatgaccttgggttgggactctcccatgaaaccatggggcgtatgccttgggtatacttgttcccttccagtggaagaagagacacagtagtttctgagcttgaacctagttattactccttgtctgacatccagactagatttgggggagggtgactccattttgggaaagagatgtggatacagatctctttccccagggtgcttctccagacccatttccctctgtatctgcatcctttgagactcctaccctcctgcctttggtgagttgagactgggagaggtgggtctggcaggtggtgggctgcggtgctccagagcagaggagaggtgtccagcggtggtggcggcggtggcgggccatgctgcaggagagcacggtgctttccgcggtgcttgacagaaccatgttccgtttccatcgttccaccacatggttagatcaagcacaaaggaaagccccgcagcgactggtcagagtcaaggtcaggaagcagcgtcagagagaggacaggagcgctcagaggaagcagcgtggagaagcggaagccggagcaggcccccactgagcgtgattagtatcaggagtggggttccactggaacacttccgaagattgcagccctgctgcccttgtgccccaccccagggagacacagtaggaagggagaagaacgggagggaaatcactggatgcccatactcgggagcttcaggacagcatggttccttcccaaggaaagaaagaacactcagacatctgtgatcctatcacatgcctgaattgagcctctaaactccattcagtcacaccagttggtctgacaagacattaaacttagaaaagcatcttctgcatgctttgcaacataggcccaatccccccaacagctgagtggttccatcacagtcattcctctagccccttaagtcaagagacaatccacagttcccagtggtctagcaaaccttcaatgctgttctttaggaaaaagccccctttgacattccacaattcaggagtctcctttatatcctttgaggtcagcaggaatgctctggctgatagacactcatcccagatcatttgaggtttaatagaggagcagtggggtgtcaaaagaaaatatatctctctagccagagagaaagacaggaaaacaaatggggccgtagggtttggactgaggaacctgcaatcatagttgttgtttgagaacactgactttcacagagatggtggccagtgcgcctcctgatgaagggcctctttgagactaagagaaggaaggaaagggaagccaagtgatgagtctgaggggaagacactgaattctggggtccttcttgatttcttgttctcttccttagctggaaattatgggagcgaacaggatgaaccaataaccactgtcaggatgccaaaggcccaggtgagggtacccagtttttatattcctctctgtgatagatcagggtcagtttccatgaacctgctgacttgggacttcctcccacttggcattaggctggagatgtgcatcttgaagaaactggagctaaggctaagtgactgagaccctccctgcctgacctctgacatgagaaccagtatcaacattcttccactatgtgtttttgggactgggcatatcctctagatggtctcagcatctcaacggtgcataggttgtctgccatgttggaccagttaggaagagccagcccacagctctgggtctgtctggcctctcctccttcctaaggtctctcatcacacgcactagagtcagccactagaatctggactccactctgctttgacacctatgcagggctctgtgaacactgtggttctgggacttcaaatgtgagtttgattaggaccctggtacaagagcaggggaaatccatcctgttcgtgcaaaccgccaccctcaccaagccttaaaatctaattttctttctctttggtttcttcctacaaaaagaaatggagggatttgtaggtaaattatcaagagtcttcacagtatgtcagaagtcctgggtttcagatcttgccctaaaaataatactcaataccttagataagatttttctgctgtgtggacctcaatttatccatctctagaataaactggatgacctctaaggtttctaaaagttctgtaattccttgagagctatcttgctgttcgccgtctttggacactttgcgtcaccaccctctgtacttttcagcaagagagtttcttctcacacaaagcggggaggcatgaaggaagacagacagcaccctgcaactgccaagtgctcccagggatgggcttggggtcccaggcagccagacggagccttttcaggaggacttaatctgatggtcagattaccccagccggcagcatccaaccctaaactgatcttgctgcccaaggcggcggatgcagctgatagagagaggcagacacaggcag

SEQ ID NO: 1882019 - DNA, 4001 bp, Homo sapiens
agttttaaagtattagaggcaattaaatagtgatttattctagctataagtaaaggtttaaaaagaggagagatgatttcagagaaggaatagcagtgatttggtttataaacagcatatttattgtgctctaattcaggtgcagaagcttcgccaatttagcattgcacaagtgttggttttttataaatgctataaaattgtttcctgtcaacattttcttatactgaaaacacaacacaatttataataccttgaaaaatatattcaattcacatcaattcttgaatctctcactggaaggaatgtttgtccctcaactaagattccggaacactgctgaagataccattattttacacagttcaccactacttctaaaatagtaatgattggataaaaagggtcaatatcacagacaaatgtgcttgatgttgttggggtttactcattttaagccatctggtagctgaataaaatgccattttgatttttcctcctatatagttgattttgcttaagtaacacgaaaatatatgcatacctgagcactgaaaaaacatctttaatttgtcatcattaagactatagaaccaatgaatgtacttgtatgtcaaacacagcaatgagatattaacagctttaaaacttgttgaaatcggttcataatataaaaacatttaagcacgaagtggttgattttaagttacttttctgaggcattagacagttcgaagtcattttgggtacattttatcatgtcctcaaataaggcaggcatattaattgttgcacacactttaaaaaaggatgaaaactattaaatttatgttctcatctattagaaacaatctttactaggtaattaaacttttcaagtaattaaaatataatgtgaaattttaagattttaatctaaaagtcagcaaaaccttaacatctcctgtatttcacagtgttggccacatcttagctggattaaaataattgttcaaactgtagggctaaaccctacagaggaagcggagtgctaaaaattataccattggactgagagaagaaattctttcacaccaagtccttctcttcttgttaaagcagaaaactaaaaggataattttagccccacttagcctttcagaagaaaaaggctgcagagcacaaaggtttcgtttcctgatgacaataaaaaaattctctccctagaagggcctaactccaggaaagctcagaatagatcattctggaaaggattaacaacaacctttctccacagagagatttaaaaagcaaaacttaagtgtgttatatctaaattacaatgccacacagtacacattatgtgtttaaaaagtaaagtcaatcccagtgataacagttggaaattccattgaaaatgggaccttcacacctacacttaaaagagctgcccatcattgttttggttttaacagtctcttctgaaatcagagacttgtgtaaactctcacaattagctggcaaaaggattttcagcagtaatgcggattcagtactttatagatttttatgcagagttgtttttttttctggtcccgaaatgaaaacagggagagaacaatttgcattccccaaactacatggtacatcatggcattcaggttctgaatttgaaatcggctttggagtgtgtgtggaacttccttaaaaaaaaaaaaaaagaggtgggtaataagatgccctcagggaaaaacctagtgaaaatggaaatctgaagtctggaatagaagtttgctccagttgagagcggggaaagatggacatgattaaggagggggaagcagcagcggctccgctacggcgggcgctaggaccgcgccgacgccgccggacccgcagcgcccgcgcggtctccttcagggcaattagagcttcgccggccgagccaggcagggcgctgtcagccttaatgtgagcgctgactggcagcgctcagcccgcgctcagcccgcaggaagcacgaccagtgaacccatattgctttgacagttgcactcatctagaaataatgcaaaacgctatttagatgtatatatcacgaccctgggctctgggaagaaaacaatctaatgaggggctgggagtccgctcgacacaagcagtgaggaggcgtgcgggtgggtgcgccagggcggcctcccccgtcgcgctcgctcctcttacagctcttcgtgcttgatgcggtgggagcggcgcgtcacagccggcttcagggagctggtcttggcctctgaggcttcggtaaagaatttgaaaatagacggaaagctcttccaggaagttagctcgtgacggtcggtgcctgcaaagaacaacacattcggttaccaggtggccacgcggggccaggcgcggtgagggcggcgagggccaggccgagccccggctcccgaccacccggtcccgcccctccccgcccctcccgcctgcgccccgcctcagccgcccgcgccccgcccctcagccaggacccccgccccctcgcgggcgcgggccagccgactcccagggcacaactagggctgcggggtcacttgccccctggctcagaggaactcagacttcgctatccgcggcgtctaggcgtctccggcctcagtccccatccctctcccaacgcggggacgcggcccggatctgtcccggggtcgtccgaggcgcggctggccgcccgaggcctccgcctctccgggccaatggaagcgctgggcgggaagggccactccctctccctccgggaaaccacccactcccgagactcggcgcgcgcggggattggtttcccctgcgtgcgggatcgcacagcgcctgtttccttgcttcccaagggggtggtgtggaggggaagggggaatgatttttcttgcgtctcccggaagctgtgctgttagacacaattacctcagctaggtcactgagaccaaatcatacgggacgcttaatgaaggaccgcattcaaaagggattacgccttgaagtgtcctggcgggcgacatttttacagattttaaggggcaaatttagaacagctaaaaaaaaggtttcaaagccgtgactactaaaagagcatctaggcctcccattttatcaggaggaattcaacttagaaaatgcaggttagttgtcaatttatggggttactttattttactacggcttctctctgtggtttcgatgtaatactaatgtacagcatgttttcaaatcaaatcgaccttcagtttaacacaggcagcggataacacggatgcaagcataagaacagatgaggaaatacatttagctatttttgactccctgtgatggcttatgtagcattttaccagtggcttcataaatgagcactttttaaaattaaaaattaaaataattacagacttccacagaaataatgagtgaatagcttttaaacagttgaaatctcttcctagatcactcaattatgcagagagataccgcttggaagtctccggattcagggcctcagtctgatactttaacattgttaatgataattctttagtctgtaatagtaggtcattgctatggttactctacaatggtgcaacactttgctttccccttcagctattcgctgagacctggtaaccacatttgttgcctagcaacagttttgtgacagtatcacaatctaggagttacaacaataaggatgctatggctgctgtcggccagagagcagaaagctacagtctgtgcctgacttagctgtgggagctggccctactagagaacccctctctctttatcagtgccctcccaaggattctctctatcctcctttcctctgcagactggcctcatgaacttgaatttgaaactaagacccagtattaaagtcatatcccccaactcagactaaaaatgaggtcattttatttgcttactcattttgggcaaaattcattgttactcaataggaaggagggatgagtgtaggt

SEQ ID NO: 1882020 - DNA, 4001 bp, Homo sapiens
agtcctttgtccctactctttttttttttttttttttgagacaaggtcttgatctgttgcccaggctggagtgcagtggctagatcatagtttattgtaacctcaaactcctgggctcaagcagttctcccacctcagccttctcagttgctaggactattggcgcatgtcacaacaactgcctgtttttttcaattttttttttttcttaagagatggagtctctgcagggtgtggtggctcatgcctgtaatcccagcactttgggaggccaaggtgggcagatcacttgaggtcaggagttggaggccagcctgaccaatgtagtgaaaccccatctctactaaaaatataaaaattggctggtctgtggtggcacaagcctgtaattccagctactcacaaggctgaggtgggagaatcacttgaacctgggaggcagaggttgcaatgagccaagattgtgccactgcattctagcctgggcgacagagggagaccctgtctcaaaaaaaaaaaaaaaaaagagagagttggaatctcactatgttgctcaggttggtctcaaactcctggcctcaagtgatcctcctacctcagcctcccatagtgctaggattccaggcatgagccaccacaccaagcaccccattttttaattgggttgtttggttgtttgttgttgaattgcaggtgttctttgtatattctggatgttactcccttatcagatatatgatttgcaaatattttcttctatcctgtaagttttactctcttgatggtgagagaaaaccttcaatgcacaaaagtttttaattttgtggtaaagtccagtttgtttctggcatgtgtggcctgtgcttttggtgtcctatttaagaaattaaggccaggcatggtggctcacgcctgtaatcccagcactttgggaggctgaggtgggcggatcacctgaggttgggagttcaagaccaggctgaccaacatggagaaaccccgtctctactaaaaatacaaaaattagctgggcatggtggcccacacctgtgatcccagctattcgggaggctgaggcaggagaatcacttgaacccgggaggcggaggttgcagtgagccgagatcttgccattgcactccagcctgggcaacaagagcaaaactctgcctcaaaaagaaaaaaaaaaaagaaatcaacaccaaatccaaggtcatgaagattttcccgcatattttcttctaagagtggtatagttttagttattaagtttaggtctttgatctatttttagttaatttttgtatatagtgtaaggtaagggtccagcttcattcttttgcatgtggatatcctgttttcccagtaccatttgttgaaaagactgttcttttcccattgaatggtcttggcacctttagacatgagagaactaaggctcagagaatcacaggaaatatctgagccagaatttgaaataagggcagcattccaggcctgtccctccaccaaggccaacttacagtccctttggcttccccacatgctcacagtatgtcagctgatcgatgaacacctggccctggggggtctggagcccagagagggaaagggagccatccaacagcagcagtacagctgagggagcagagtggggcctggcatccgggcagcatgacccctgcccatgaggatgctccggctagcggtcaggaggagcagggtcattccatgcacacctcctgtggtgaaaggccctgctggcagcccataaatctggctgggccctgctgatcctgtttaccagattagtggactgggtgtctccgtataaatcacccagggtgatttacagggaggccctggaaatttcgaagtcccgactgactcaggcccccagggaggggcagataagtgccgcctgagcccactcagcatctcccgtcccagtgaaggctgatggtggggaccctcctcctccacccgccctcaccgggtgagtccctctacatccctgtttaaagttgatcctcctcttgtgggtcctgacatactttaaaagttcccaaggcaggccaggtgcagtggctcacacctgtaatcccagcactttgggaggctgaggcgggcagatcgcttgaggctgggagttcgagaccagcctggacaacatggtgaaaccccatctctgctaaaaatacaaaaattagccaggtgtggtggtgtatgcctgtaatcctagttacttgggaggctgaggcagaagaataacttgaacgcaggaggtggaggttgcagtgagatcacaccactgcactccagattgggcagcagagcaagactctgtctcaaaaaaaaaaaaaaagttctggcaattttaggaacagcctgtatcaaataatgtacagcaagaatgaaaagccagcctctgtggctcacagctataatcctagcactttgggagaccaaggcaggaagttcacttgaggccaggagttcgagaccagcctgggcaatatagcaagaccctgcctctaaaaaaaataagaaaagaaaaagaatgtaaaataggataggcaaattgtgaaaaaacaatgaaggtaaactgtgagatagataaggttgcaatcttttttttttttttttcgagacggagtctcactctgtcacccagactggaatgcagtggcacgatcttggctcactgcaacctccgcctcctgagttcaagcaattctcttgcctcagcctcctgagtagctgggattacaggtgtgtgccaccatgcccggctaattttttttgtatttttagtattttagacggggtttcaccatgttggccaggctggtctcaaattcctgacctcgtgatctgcctgccttggcctcccaaagtgctgggattgcaagcatgagccaccacgccctgccaaagttgcaatctttatgcaataaaatgaatagctaacttttacgggttgcttaccatgtgccatccatcaacctaccttttttgacatgaatcattgtttaacttcacaataaacctatgagataggtactatgattatccccattttatacacaaaaccaccaaaacatagagaggttaattgacttgaccagggacaaggtcaccaaacttgagtcccagtagtgaaggtgagattcaaaccaaacagtctgcctgtcagagccatgaacttacccacttcggtgtgcagcattcttcctgcttatcactcacttgttgacacaggattatgaaggtagaagatggctaaggcagtaagtggtacagtgtttaagagatggcatttgcagttggaaagcctaggatgtaagtcccagctctgccacttactagcttgtgatgtgggcaaatcactttattatctgtgcctcagtttcctcatctgtaaaatggggataattaataatagtacctccctagtaggaaagctggtctcctgctgtgtattttaagtaataaataagattatgtatttaaaatgtgttcagcacaataccaagcatgtagttatgaacaccaaatatgtggtagcctattattatttattttaactctgaccttaagaaactcctaaaccagtggtggagactcaaatttacacaaggaactccaaacaagatggagtacaatactgcagaatggaggttcaagctagaaggggcagtgaactctaagtggaaggaccataaaagtaccatggagcagtggctgggacctgagctatgaaacctgagtgagatttcctaaaaccacgaaaatggggaaacactgagagcactttcttatcaaaaatacgtggcaagtgatggactacacactatcaactgccaggccatacactgtttgcacctgtcaacatctcccctttggctgtgatattcctatcagtggagatagtacctaattcttcacaatatttcttccatgcctccccatgactgaatcataacagatccccagtacat

SEQ ID NO: 1882021 - DNA, 4001 bp, Homo sapiens
tgcatggaaagctggacatcagggtggtgacgatctgaatagtaagccattggtccccttgctgcccccagcccccacctgtccctggtcacccagaccctcaaacctccagttcttcggaatctatatctccagtgaggcactagtttgttcctgtgccgccaaagcagccaggccaaaataaacttaaactgcacagtcggagccattccccagccagaatggggaacagaacagagcaacacagcaaagtaattgcctcctatttaccaggacgtactttgcactatgagccattttgtcaacttcatgagatttgcagtcagaaaacacggaaacaaaagagcaatatgaaggtcttttaaccactgaccatttacatttgtcagcatgactgctccatccattattatcatttccccagcgcacagcccaggaaaactgtagttgcattagatcaataaaaaactgaattctcttttaagacagagtcctattgtgtaactatgttgggcaaatgtataacttgtcctatgaaaagaaatcccatacctcatttggtcatagtgcattgtgacagagaaactatttgcttccatttttaagaatccaccccctttccttttatgtatttttcccaccatatgagagaaatttataaaggaacccaaaagttgttataaatatactttgccagctctcaccccaaaaaatactactgtggcactttgctcttgctatacagagttagaataaaggaatgggttttcaatatgcgtggcttttaagagagacttacctagtataactttataaattcgatatcctttcaaagctaaattaatcctggtctttcagttcattctcaaaaggtgtaaaggagatacatccaaattcctttatatgctagctataaaaaaaaattaggtagtacctaacgtagcactttattttttaaaaaaattttcaaatagtctgcataattatctcatttagatctccgcaccgccttaggaggaaagctggagctagcatggaaacatttttgggccaacaaatgtttaccaagaagaagctgtaaggtgatcctccagtactgaactttgctagccctttctgtaaaaaaaattccccttataaccatgaggtgacttcctgcaaggtgaaaagaaacgttactaaacacaaacagccaaacaaataattgcaacccatacaccttgtcctgggcacctctaggctctggggcccagtcagctgggaatcagacgcctggcataaaacatgcttaaagtcgcagaaactgatggctagattcactaagcagaaacaggcaatacatttctctctggtcttccagcctatacatttaactgttttctatttggggatggggagaatattctaagtttcacccctgtttctatggtcttgactttctgtctctatatgtatgggctctgcctatatctggggtccattccctttgtagttactcaggtaccagtctctgggcacaagtccctccataaaggtcaccacctcccaaagagcttctccagttccctccccacgtccacagccttagatgcttacctctgtggaaacaattctctccttccaatctccagggaataaactcttcggaagcccaaaatgtcttatttgacctgaatgtgtgccctatccttacaatgcctggctcatggaaagctcgcaaatgaataataacagttatctttgtagttaagatgtattaaatgcttattaggagtgaggctaaatgaattctttcactaaaaattcctaacaaaactgtgaggtaggtactatgatcaacatcattttataaatgaaaaaaattaggctcagaaaggttcagcagcctttctgaaggttcagaaaggcctttctgaagattcagcagcctttctgaaggttcagaaaggcctttctgaagattcagcagcctttctgaaggttcagaaaggcctttctgaagattcagcagcctttctgaaggttcagaaaggccacacagctggcaagttaagaaactaggttttcaacttaatcatgctgcctccagaacccaggcttccaaccactctgctgtattgactaagtgcattaagtgagcatcaccaaggccatcaaaccaatgagcctgactacagtccccaatgctcagtccaaggcacttccttctcttcatcaaaccaagtcctggtttcactagaagaaggaattgagcctttaggacaaaggcagagacaacccacacctgccatcctcaaccagctcttaacgcatagcaataatcatccccgggagaaaggctctcaggcaaggttaataacaaacgtaatggttttacaatatctgctgctacaaaaagcaaaataaaaaaaaatttctgggtgactaagtaacatgaattgctagaagacgagtcttcattcatccccctttgaattgcaagatgatggtgtgttttaacggtaaatgaacacggcattcccaaagccatcaagttaatgagtcaagtaaatcctcagtcttctccttatccagatttttatcttccccactgtcattaccatcttgctcagaaaatcatttctgggcctttctcctgctccaaagagctggattgtcaattaaaggcctgttaactaacgaattgctgttctgcagctgcaaataaaattcacacacagctcagatgactttatcatgggagttgattaattagcagttacagggccctgaaaatagagttccatttcattaacatagacttgtaatgttttggtgcatattgttgtgatttaaacattttgctccacggcggagaagatatggaggtgtaggaaaaacgggaagtctatgggataatcaggagtgagaccaaatgtaaaggattttttttaataatgtaatggttaacattgagctcaggtctttcctaccagagtctgttctgagcatttcctgtgattaattagctcatttggcctttgtgaccatgccaggagataggcaatattatcgttagcattttacacaggaggaaattgtaaaccaaaaacaaaatttgaagcaccccccaccccaaccatctgaatggacttcctcctcagctaaggctcttttaaaatgtaacctgagagattatttcgggccatgatgggaagtggggttcgaacatgcctcattatacctctccggcattaacatcaacactgactataagtctgataagaaatatcttatgggccagacaccatggctcatgcctgtaatcccagcacttttggaggctgaggtgggcagatcatctaaggtcaggatttcgagaccagcctggccaacatggtgaaactctgtctctactaaaaatacaataatgagccatgcatggtggtgcccgccagctactcggtggtgtcccagctactcgggaggctgaggcaggagaattgcttaaacctgggaggtggaggttgcagtgagccgaggttgtgccactgcattccagcctgggcagcagagcgagactctgtcttaaagagaggagagggagagggagagggagggcgagggggaggggaagagggagagggagagggagaggagaaaagagaaaattttacaacctattctctgtaaagcctagtacttaaaggcttcctctgcaaataagaacttgggttccacaatccttcatcttaacccagccattactttctgttgatcgcaggtctttagacaaactcaaccgtcaaccagaaaatgtttacatttacctatagcctggaagcccctgctctgagttatcccacctttctggaccaaactaatgtattttttaaatgtatttgattgatgtctcatgcctctctaaaatgtatgaaatcaatatgcacctgggccaccttgggcccatgttctcaggacctcctgagggctgtgtcatgggccatggtcactcaaatttg

SEQ ID NO: 1882022 - DNA, 4001 bp, Homo sapiens
ctataatgtctggtaatggaaagggtatgcaaactccacttctcaactgaaatgtagatgcagctgggtatgctggcaccaagtaggaacatgtaatttgttgtgtggtacttaagacttaaacagacataaggcatagaacgactgcagtgttaagaaccatattaacttgtctgacaactacatttttaaaaaaagattattaaaccagccaaatgtgacaacagacagcaacataacattatacagcaagagaagtgtatcaacatcatggtagatttacactgtaaaaccttttctattttaaaatgatcttcagaaagtcttaattccttaagaaatggagtaaagtgctgtttttatagcataaattggtacttcttgcactaatctaggaacattcatggagtacccactgtctgtagaactagtgccaggaacaaaaacaagtacaggataccaagctttctaatctcactgagacaggggacacacagctggtaacagagctacaaagtgccaaatggtgccaccttttattagtgacatctgaaactaacttgggtcttatgtccagacttgagtggagttgaggctccttgctagtttaccccagaactcttctggaaatcaaacgttccagagacaggtccaggcttcaacattctggaccagtttggcatcgaaatacctccagcctctaacagttgtccagaggtctgcccacaagcacaggctatgcaagttaattacgaggacagtcttaagttgccttatagttacctagacctttcccctacataatttccagaagtagtaacagtgaaggaattgaatacctcttcctatggacagcaggaaactgctatccctttcctcctccacaaaggaaataacttcccactgtcttttaaggaaacagagaaacttctatcaatctatcagcgattgtcctttcataagctgaagctgccggtggcaacatgtagcttctacatttgccttctccagagagcccctgagagagactaggggtcattagaagggaaataaatattttattttgggaaagagaaaattataaccacttatttgaatttgaataaggtttgtacatatcaatgtaaaccaacaaaacaatcaagcagaagtccccaaaacttgtccttttcaatccttcttcaatgaataacacattgaaatatttggttttacatgtttcatttaccatatttagctaaaagaaccatctttgtgttacatgcagtcacagaagactacacgcaactgaaaagaaattcaacagggctgggcgtggtggctcatgcctataatcccagcactttgggaagccagggcaggtggattgcttgagctcaggagtccaagaccagcctgggcaacatggtgaaaccctgtctctcacaaaaacaggaacattagctaggcatggtggcacatgtctgtggtcccagatactcaggaggctgaggtgggaggatcactggagtccaggaagttgaggctgcagtgagctgagatcacgccactgcacgccagcctgggtgacagagcaagaccctcaaaaaaaagaagagaaatacaacagtaaaaggagttttatggaaaatgtaacccaatggaacatatacctttttactaccttactcaaaattgttacagccactttattagaacagcagtttaccagaataccgattaaaaatctacaaaaaactataaaattaaagcaagcaataaacatctaattaatatctaattacctttctgaaataagagttgtgatcagtaaattagagacaatcacaaaataatgctaaaccgctttaaatttccctttagaaatctcttaaaatgttgttcaacgggccatgatctgtggtataagataccaggtatggctataaagtaactgagacggatcccacaaacgacatatgacaatcagtctcattgctttataatcacaccaggtacaaacggttttagaaatcagttgaggctccctcttgaagactcaagctggaaaaggagtagggaaaggagtagggaaaggagtagggaaaggagtaggaaaggagtagggaaaggagtaggaaaggagtagggaaaggagtaggaaaggagtaggggaaggagtagggaaggagtagggaaaggagtagggaaaggagtagggaaaggagtagggaaaggagtagggaaaggagtagggaaaggagtagggaaaggagtaggaaaggagtaggaaaggagtagggaaaggagtaggaaaggagtagggaaaggagtagggaaaggagtaggaaaggagtaggaaaaggagtaggaaaggagtagggaaaggagtagggaaaggaaagctgaacaggtagccaaggaaaccaatccatgtgattctattcaaagaacactaaataagaacaccaactaatttcaacgggaaagctgtttgggaaaagaagtgtgtaattatttcaaccatccattcaacaatatttattgagcacatactatgatcaggctcctttcacctcttaaagagagtagaaaattacctgctcttgatgcaaaaatccacacgccctcaggagcaaagggggaaccttttggactaggaagagaagccgctcgcggtggcgtcattacaccagcacagagaagagccgggcagaggagcccgaccctgccgatcgggcaggaggacagcagaacgaaagcccgccaccaacttgcaaaggactggagttttaggtcttaaatcttttacagaatctggcgaaagttatataggagtcccctcctaggagaaagggccttctccccatactccacccctaaagcctgatagggctcaaagaccctgacctaaagctgcctcagacacttgacttttaaggatctgaggagctctggcccagtttcacgccaaaggaaatgtaggcttcacaataaagggccggtcagaggaggcagtgactgaaaagagtgaagaataattagactgtaacgctgtaaatatcaaagcacatttgggacatgccccaccactcccatgtcccaggccctgggcaaacactgctagtaagtcacggatgcggccacgctcccacgcacttccacgtctggccgccagtactaactgtcagagatggcaatccagtgaaagcccatctgtgatccctgcttccaactattttcttgagaaacttcccccactgttattctttaacaggaacttctgtttccacactgcttgagtctggctactttaataaacaattctattctttccactttcatcctgagaattttcaaacccatagagcagttccaatactgtgagaacactcatggaccttttatttagatttgtcaacattttgtcctttctatatgtatttatttttgctgaaccaattaagagtaaactgcaaacacatgacattttattcttaaatacttccacggtccctcctaagaacaaggctagctacgtggccacaattcatttacttatcctcaagaaatttaaccctgtgttctttaatagatggtccattttcaggtatctgtggtgatgactttaatagctgtttaacttgtttagttttgtgtccaggattcaatcggggctgtcggcatcatgcttagctgtcatgtctcattagtctcctttgatctagaatagttcctcagtcacttccggtccattcatcacaacactgacctttttaaagagtccaatccagatgttctgaccatgcccctcaatctggatttgactgtttcctaatgattagatctccaaattaaatatttctagtaagaataccacaaggtgatggcgtgtccctcctcagctcgtcacttcaggaagtgcaggccgggttgtacctttatttttggtggcaaattttatgacttggttattttggtatctgccaggtttcctcactgtaaataaatgttttcctctt

SEQ ID NO: 1882023 - DNA, 4001 bp, Homo sapiens
ttttctagctagacctagctacccataactgttactattgattcctaatatatatttgaacatcctctccaaaaaattcatattcatttaggacttgtgagaagtttttatataacttactggatctcaaaaacaatccagtgaggtaagccttaccataatttccaggaaaaccaaaatcatctaacgaaccttaaactcttactcttgcttctactttgagacggagtatcgctccatcacccaggctggagtgcgatggcatgttcgcagcccaatgcaacctccgcctcccaggttcaagtgattctcctgcctcagcctcctgagtagctggtactacaggcacatgccaccattcccagctagtttttttgtatttttagtagagacggggtttcaccatgttggccaggatggtcttgatctcttgacctcgtgatccgtgcgccttggcctcccaaagtgctgggattacaggcatgagccatcatgcctggccgcttcaactttttccaaagataaaaaacctttatgttccatacaaggaactctctcaatacaggatacctgatttatcactgaataatcaaaaaacaatgacatacaagtacaggggatatatgagcaaagtcatataaattaaggttgcaccataattaagcagttgtcaggtgactgttgaagagcctaaagtgaggcagtagtcgagaaacaaaaatatcaaaatgttaagtttttagcaaatcagtagttgtacagaagggccatataagaaatctaatgatatagtggggagtggcctacacagctattttcttcaatgaagagatatagaaccactcagaacaatttttcaaaaatccagaaatacacttttatggaaatactgttttttaaatgttgatttaaaaagagcatcaccctttcaccaaagtctagaggccaaacagactaccagtttggagtgttttacagcattttaacatcactggtattccaacagtgagcagaggaaaatactcagtagctagttactgtcccacatcttacacaaagtcctaaaatgtaatgacctcattacattttaaatggcaagcagcatttcactacttacaaaataaattcgattcacatatacaattactaatcagaactaccttttatcccatttctgctaggctatatgatagtcaaagcaccagaataaattgggagtacttcctatactacaaatttcatggtattatattcaatttcaaatattcttttattcattctaaataagaccaatactggtcaccaaaacacttactgaggcaaacacttctgttttaggttacagacctagaggaaaaaaaacaaaaatgaagctcctaaatatctgattaaccacaacttcaatttgaataaattaagttttcttgatgattaatcaatcatgggaaaaaaaatttactatgtcaaagggcaagagcaaaagtattttttccaagttaacgataaaaaaaaaaatcatagaaataaacctaagatcgatttgtatttcccttttattatataaattaccaacaaaatcctgacctgggaatcaaaaatttaatataacctcagtttaacaccattaaataagctaaatcacagagagtaatactggaatgttacccaaataataaagtaggcaaatggccaattattacattccctatttcaaaaaagaggcattaagcattcacgtcataagtttattgacaaacatatctagtatggcatatgagttctagtttgatccacttccagaggctgcacctcttaaaatgctcttcatatctgcaaaataaaaacagaaattaatggcattttaaaaatcccattcatttaacagaaatcatgtagtttcatgaaaatattttctatcagtttgagtagtacatcagaaagcgtttacagtatcatgaattcattcatactgatttgcttcatcacatgcaccgcaacctttccgcattagtagcttggataagttattccccctctaaactatgacactctttccaatcatcctagtgttctatagtattactctgagaaactctgatgacaattaagctaaatattttatccacacacagcaaatctgctaaccttccaatatgaacgactcctttgagcatatattaacatatccccttgacacaaggcttctcaacctcagcaccactggtaattttgcccccaagttggaacgatcaaaaatgtctcacattgccaaatgccccattgtgttgtaaaatcatcctcatttaagaaccactgccttaatgaggaaagtatatttaaaagtttgagtttcccaacatggctgagttggtgaggcacagatttacaattgcataattatctgggacttatgtatcaaggagcactagaagggttttatcttcagggatttttcacaacttaaacaagtattgtaagccaatttaaaaactaggagcacagtgaccactttctaaaagaaatggaaatgtttatagtgttttaaaagacacattctcagctactgttctagtaacagtgttcaagatagagtaacattaatcagtttatcagttttacctggttaaaagtgtgagttctgcaacaagaaactgcctgggcaagagtcctggtccaccattatactagttatgagatgttgaacaacttaacatctctgtgtctcagatggggttactatcatccgcctcacaagcttgctagagaacatgagatatcgatgtaaagtgtacctgataagcagtagtattcaataaacactggccattattgaaatatttttatataggtttacaactagtctccaccaatgccacatctacacataacctcaggaatcagccctacacaacaatgtatttgtgtgtgtgttctgggtgatggggaagaggctacttaataaaaaggcctgctttaacatgattagaaatccactaactacctgttaaatggaggaactgaaacatccttatgttttaagcagttggtgtcttactacaaggaagggtgtagcaaatgcagatccaaagtacaaacacatcttagctagtaacgaccacttgttttccactgaaaatggcaaattctgttggaaaaaaagagaaaaagtaatcgaaattgaatctcaaatcatctgcttaataatcaaaatacaagtatacaggaaatgctagttatattttacatcatcaggttaacatatgccataaatcataacatcgttttaaacatttatctttcaaatcctatgaccttcatcacaaaacactacatggcaagaaataatctggctttactaagcactaggcaatgaatggtcttgaggactcaaacgtcaaatagtgagaagtttcttactttagaaaatcgaaaaaactactgtcctaagtagtcaccttagaagatacatggcaatgttaagtgcaatacagctctttttttttctttttttttttttttgagacggagtcccgctctgtccaggctggagtgcagtggcccgatctcggctcactgcaacctccacctcccgggttcaagcgattctcctgcctcagcctcccgagtagctgggattagaggcacacaccaccacgtccggctaatttttttgtactttttagtagagacagggtttcgccatgttggccaggctggtctggaactcctgacctcaggtgatccgaacgccttagcctcccgattacaggcgtgcgccaccgcacctggcccacagttttttttgtttgtttgtttttcattaccaagcaccttctctggcctttatgactaggcctcgtgtgaccctccgagattgttactgctatgtggtttaagttatttacacctgaggccaaacccagccttaactgaggtgaagggttagtacttctaacttaggcagctagtttaaaaagcctgttccataaccagaggccctg

SEQ ID NO: 1882024 - DNA, 4001 bp, Homo sapiens
aaaagaaatgcaaagaaccgatttccatataaatgccactcaataacaatacaggttataacaatatttgactgcattaaacattcaaaaaggaacacaaagatacccaactgcaaataaaagacctcatatatttttggtagcggaatgtggggggtggggggcaaaaatcacattaattcagattaatcatgtaaattcagaacacgtgatgtgcagttttgtgtcgctcagaactcctgaatccagctttgtgcttttacacaacataacagaaatggcatctttcacaaagcctaactttgacctccaacactttaactttgggtttaaccagtacaccaccttcggaagttagcacataaaaatacaggtaagtcaaatgcactacggatacagaaaggacgaggaacaggtttaaaggggagttgaagcagaggggcacgaaatcacctggcaggtcacctctccgaaggaaaaacatttcaagctccctcccatcccccaggtaacctctggcctcagaactcactgccctgcgtggggcagaagttctgggcgctggagtccgcgtcccccaggacacgagggtgacccaagggcgcgcggagagcggcgggacccggagcggcgctctccggggtcactcccctaggacgctccgcagagctgggagcgctgccccaccccgcccgggccgcccctggggaccccgctcggggctccgcggctcccctgctccgcgccgcgcccacccgcccccaggactcacggtacgctcccgcgccgctatcttgccatcccctgccgccggctctgtagcctcggccgccgccccggggctgcccagatcccacagccgcccgggggcaggagccgccaaggagggggccgggcacaatgcgccgccgcctccgcagccgccgtctcgcctcccctgtgtcggcgcgaggctgcttgaggcggccacgggcgaagggcggcccgctgcgctccgcgaaccccgcgggccgccgccgccgccagagcctcccagaggcaacggtaacggccaccgccacggccgagtcgctccagccgggactgcggcgcgcgggggcggcgcctgcacgccgctcggctgggggcgcagcgggcccggccccgcccctgacccgcccctgcccccggccccggccccgccccaacccgcgcgcccccgccgatccccggccgcgcgcccgcgcgcgcgggtgctccaaggagtcggaggaacgcggccgcgcgacgggccccggacgccgagggtggtgcttcctccgagcctccggtggtgaggccgctctcagaaggtcatggaagcgcaggggagagcgaggcggccgagcccaggcaaatcctcgagaaaggccgagtgcgcgacggctctgcggggaggaccgcgcctccccgaatgcggccgctgctgccgctgcaaacagtgccttgaggagaggaaagcggggaaccgtgttttcgccgcctctgtaaccactgcacacaagaaaaccagcttctgggagagggggatgattgttgggactttgcgaattacctaaacagcccagggccgaggcgccgccgctcgcgtcctggtcctcctgccgggtgtggggctcccctgcccgagatggccagcgggcgcgccgagagtatcctggagccatctagtcttgcctcggaggcggggtgggcttatttgtgcggagaagaaacggatctcttaatggggtgagatttttcctccgtacattgttcccatttccgcagtttcacttggcctcggttttctagcagagtaatcaccaaatgaaattagctggagagcgtttgatggcgcagaatcacggtctgaagatgtttacgctgtatgccggacgcgtttgatggtgttctcttcggcacaattaattttgcaaagttcagaaatgtgccagacagagcccctggcacgcagtcaggactctacagacacaccttgagtaggaaacaggcttgtttgtttcatctgtgatttatgtgatgcaccagcaccaaggccaacgtgttttttaaagacctttcgatgaaactccaaagcaatttataaattggcaaaatgaagcttgttttgtaaaataactcttccttgttgatcatgtaattaaatgggcaacaaaacacctgaaaggacatttactgaaaagtagactcccaaaacaaaaatatgtatttcacagctagatacggtcgctattagcgtcctaatggccaactccatccatgtgcgtattttgaacactaaaaacgcctcctgttacccctaagaccttgtttggataacatttttctattataagtactcgaaaccaaccccatttaagatgtttacccttattcttgagtccttgatggtttgggaaatttatcattattcatattgcacaatcctgtcactgtcttttccattaggcacagtgcctaaggtccacaatatttttagaggcccacaaaaaatattttaatttcttttcaaatcagaaggaaaaaaaatttaggtttaagaaagtattttaatatatattaatatatttgtttttgtgctaatacaatcttaaaatgtatgtatatatgtgtgtgtgtatatgtatatatattttaatggagtaaggggctcaacgaaggcaaaaaggcctagagcccaagaaaaacatgatgtggccctgttgcctggggttgaaaaatcccattccatgagaagaatttagttttaagaatattacataaaatgctcatttctgtggccttgctataatagaaagatggagattcagagtagtgataatggctaacatccacctgatacacaccatgtgtccattacctcttaatcctcacagcacacctgtgaaataggtactattctcacacttagggggtaatgcaggttttgtggggcctgcaatttatgcaatttgggtggtcctcttaaagaaaaagcaaatactgtgtattagtccgttctcacactgctataaagaactgcgcgagactgggtaatttataaaggaaagaggtttaattgactcacagttccacatggctggggagacctcaggaaacttaacaatcgtggtggaaggagaagcaagtaccttcttcacaaggaagcggaaagaattgtgagcggaggaacttgccaaacacaaaaccgtcagatcgcgtgagaattcagttactatcacgagaacaacacgggaaaactgtccccataatcaagtcatttctctccctaacaagtgaggattacaattcaagatgaggtttgggtaggaacacaaagcctgaccctatcccacagcatgtccaggctgccctagcaccacccaatagaagggaaaatggcagagggaaagtcctagtggaaagagacctcagtctcagctaattgtggtgacaatatattgcttttgcaaattgtacataaacatatgaccaggtgaatgtatcgccaaggctcctgccaaggcctgggatggaggcctagagaagatgcccgaaagtttatgctgtgtgagcttcacagaagacctgccttccatgtatacccattttacaggtaagaaatttagggatttgccacagcttctaaggaacaccacattccttacaccatactgaggtacaatttgaagagttgcggtatacgcactgtttcgtgaggaaaaacggagtttctgtaacaaagcaagagctttaaaaatatgttagcaatatttgaccaggccataacccagcttggggcacctgactgctgtctgtgctgtcaagaataaatttttcttatctgttgtataaaaatctgaattaatccatatggactcctgaaggaatttcagctcaatttcaagtctcatggattgagactatttttacttactttgtcatagaccagtctgtgttgtaaattctaatttatataatatttactttttgcaatttca

SEQ ID NO: 1882025 - DNA, 4001 bp, Homo sapiens
aaagagtaggagggccaggcgcagtggctcacgcctgtaatcccagcactttgggccgccgagacgggcagatcatttgaggtcaggagttcaagaccagcctggccaacatagcgaaaccctgtctctactaatacaaaaattagccaagcatggtggggcatgcctgtaatcccagctactggggaaactgaggcagaagaattgcttgagcccaggaggcaaaggttgctgtgagcagaaataatgccattgaactccagcctgggcaacgggaggaaaagatatgccaaaaaaggtaactgtggttacttctaagaaaaggactgaggctgggcacggtggctcacgcctgtaatgccagcactttaggaggctgaggcgggtggatcacttcaggccaggagttcaagaccagcctgacgaacacagtgaaaccctgtctctactaaaaatacaaaaaaaaaaatcagtcgtgcatggtggcacatgcctgtagtcccagctacttgggaggctgaggcaggagaaccgcttgaactcaggaggcagaggttgcagtgagccaagattgcatcactgcactccagcctgggtaacagtgagactccgtctcaaaaaaaaaaaaaaagaaagaaaagaaaagaaaagaaaaaaaaaaagaaatggactggaattggggatgttatcaaagatgattttatcgggggccaggcacggtggctcacgcctgtactcccaccactttgggaggcagaggcgggtggatcacctgaagtcgggatttcaagaccagcctgatcaacatggagaaaccccatctctactaaaaatacaaaattagccgggcgtagtggaacatgcctgtaatcccagctactcggaaggctgaggcaggagaattgcttgaacccgggaggcggaggttgtggtgagccgagatcgcaccactgcattccagcctgagcaacaagagcgaaactcagtctcaaaaaaaataaaaagatgattttacccttatttcctatgttttaatttgctattggaagaagtaattcctatataatgtgtaattacacaacacgtataaaaaaaaaaaaaaacttaacacctttcctgcaggaatttcccttctaatacccttatgcacttggcctgatccagttaaggctcacagagataaagggccagcgggtataattttttaccatccttgatgacaagacattcagaattctttcaccatcaccaccacttttctattcattgcccaactcatttccatggtcctagcacaaaatactcactggtggaaggagtgaggatcatccacatcgtggccatcgggggccaaagggttggagaacggctcacctgacaaaaaaaattgacgttaatttaatcagtctcttacgtgtcagatcctatgcaaaaatttgagatatagtagtgaacaatacagaacaaaagttagaacagcgacagtgtcaacacaatgtaataagtgctgaaataggaaactacaagaagctgtgggagcacaaagcagaggaccctaatcctgcgctggaggatcagagaagacttccggaagatcacgtctaaaatactacgtaaaagataaatacgcgcaacccaggattaagtatggggacaggactgggggaaagcgatccacgcacaaaagccgcccatcatcacttggagtaggagtgaggactggggacggagtttggagctgtcggcctcacttaggaccctgtggcttctccgggctcaagcgtcacacatacatacatacacacacacacacacacacacacacacacacacacacccggcttaagctcagaagctacaataatgcgccaagtgccccaagtgccatggggaagaaataacggatggcctgagccttactatctcgctccggcattttgttatcgttctttcgctgtcaccaacaatcgagtctccaacagcaacaccgcagcgacaagctctttcccacagtgcacctcagaatcaacccacactgctttgcgttcgcagcctttccgcttcctgtttttccctccgaccaaccccgagcgcaaagaaattgacctcgcagcggtcctacaatacttttatatcattggccaagctttaccccgcccctgcctcatgcagcctatgggctaggctttagggtccgcggttggtcagaccggagcacttggcctgaagacctggaattggcgacttcgatattaacaaggatggcggcggccgcagcaagtcgaggagtcggggcaaagctgggcctgcgtgagattcgcatccacttatgtcagcgctcgcccggcagccagggcgtcaggtgaggcgcggcgtggtgaggcgggcgggcttcgggacgccagggtcacgacctcgacctccctgaagttgagggaagcccccgcccacagcacgcgcggcgctctctccggccccgcagggacttcattgagaaacgctacgtggagctgaagaaggcgaatcccgacctacccatcctaatccgcgaatgctccgatgtgcagcccaagctctgggcccgctacggtgagtgcgggacgccaggggtctggggctccggtaggggaacaagggtttgagaagagaagggaccgcccaaggtcgtgcagaaacccgtggagaaactagaactcggactttagccttgctgttgatcttgtttccatgaagaaatttatattcgcagggttatatgatgcgttgtattccgggcaacataagtatgcaggctgaccgaatcctgcgtagggaccaggagctgacgtttttgtagttaagaatgggcttcagacaggagagaagttagtcaatatagtttctccaaataacgtgtagccagtgtcagtccaggtagtgtgtgagaatctcagtaattttgcacatagagctgggccctgtgctgagtgcttccctgcctaactcatttaatcttcattagttaggaggaagcgtgttcttcttttctcactgtagagattagaaaacggaatcaaaactttgttttgcactattgttaaactctagctgcaactttagatgcagctagagtttaacaggattgagcctttacatttattccccttcctagaatgcacttacccctctaagactggcatggcaatgtattgcaaaatgaaattttcctatcatgttgcctaacacattgtaggtatgcaataaatgtttatacatactgaataacaggattttaatcacagcttttaactatatggtgccctgggaatgacgggaggaggtggaggagagtgaccaccttaagcagattggttctcagagtagatatctgtgagacacagtagacattagacatgcactaataattggagaaggaaaaaagcttctccttccaaaagccagtagactacaggaggagatagacacgagtaactttagtgtattgtgctgggtattatgttagatagcctatgggagcctagagaatgggtacccagctgggtgcggtggttcacgcctgtaatcccagcactttgggaggctgaagcaggtggatcacctgaggtcaggagttcaagaccagcctggccaacatggtaaaaccccgtctctactaaacatacaaaaattagccgggtgtggtggcgggcacctgtaatcccagctactcaggaggctgaggcaggagaattgcttgaacccaggaggtggaggttgcagtgagtggagatcgtgccaccacactccagcctgggtgacagagcgagactccgtctcaaaaaaaaaaaaaaaaaaagagagagaatgggctcccagctgaggctggacccatgcaatacattgctcaccgtagttaataataaatgcctacagtgcccccgaaagcttccctgaaacaacccattgcggccatccagaatcagccaaaattctatttggacttgggcttcctagatgtgttt

SEQ ID NO: 1882026 - DNA, 4001 bp, Homo sapiens
gaggtgaaaggaaacccaaagaatctcttcttttttcaagagaaattgtctaaaatatgaagagactgggagaccattaattgtcaagttttcatcccaccacccctccctgcacagtattcagtgacatagaggtcatgagaaagattagattagttacttacagactatacccttcatttgcaatttataaattgtgaccgtaccctatacctagaatctggaaattctatctcatatatcatttatctaagatctgtgccatacattaaaatgatttttcccagtttgtgtgagtagttatataaccaataaaatctactttaaaaagtaaagacatttactatcagcttgactttataataaaaccaagtttaattgtttgaaagtttgataaggcatctgccccatagaaatgtcttattaggcaaaatctgtagatgttggtcatttgctaaagagccccattttctcctctcaccccaatttactgaatgggtctgctaaaagcataagctttttagtcccataagtaattttaaaatgattattctaactgaactgctcctaagatttactacctatattcaagtgtaaacaaaacactagatctcagattcagtaaggaacttttccatttcctttctctccatttaagctcaaggcagatattatgattttgaaagtaatatttatttggataatatcagaaaaccaacctaaacaaattttttcttctcatgctattattctgaaacttccatggttatttttgtatacatttttctttccctcttccttacaatccttataactttatcctcactggagttattctgtgttggagcagataaacaaaatgaattcttacactgtattagccgaagggcagcagacatgagaagaaaagagaagtggtgttcacagtcgaaggacgtgcttttcagtagtgattcagacaattcagaaaagcttactcatctctttcctatctgctagtgtgaccactgtattcttctttttcagattgccttcagggttatctgctgtttgagtgtcattacaaaagtcaggtctgctcaggatcatgtcaaataatttatccccatgtcctcattttaactccccattgcttcttctcagccctgtgctctgggtcctcaccacacatcaggtcatagaagctgggtgccccctcacattgctttctttcttattatgcataccagtgttatgcaaaccctacaggagtatcttaggttatgcagttttcccatgacatttaaaggaaccctaagcctcttgtgggaagtaagataaggcatccttagaaagtgttatctctacagtttactacattgggattactattcactcaactaaatatgatttcaaaaagttaattgtattttctagatatcttaaaaagaaaccatacatttttaaaaacatgctgctttaactttgtctagaatcttactccctgcccccaaatttaacagcttagcttttccattgcttaagtaagtgccttgtatttgaataatacagcttaatcagatttttgaaagcttttattacatcgttttaaagtggcataaataatgtaaagtaagcctaatttcacattagacaccttctatggcggcttatgaagctcaagtttttttagtttttttttttttttttttttttaattaaggcgattccagcagtcatttctgactctgtggcatctttctgcaaatcctgtccactttactgctataccgaggttcatttgtgtcattcaaatctttgctctttaaatatccacttataaatttattatggcaatacattcatatctttacatttaatctgaaacttcggtaacaagcaggagatggaataaatgagtagcagacacacttgacaaagtcaaaatgctctcctgtcagtgcccatatgaactattacaatgacagaagagcattttaattttgtccagttcttctttctccttttcactctgcatttctccttctccagctggctacggaaactttgataaaagatccagactttaaatgcccaatatcctcaaaaaaatgtcagagaatgttttaaaatcatagattttgaatgacacagatgaacttcacttgcagcactgctgcagtggggaatttatcattttgttaattaagaagggttttccaatagtcactccagaaattgcctctggaatatcattaattaacaatcttacttccaccatgggagggaggaatgaggccgagcagcaaaactcacaaaaggactaacttaaaatacacacacacacacacacacacacgcatttgaaaagcaccagacaaatctggaaaagaggaggggaatgaattacttaacacaaatattataggatcaacagagctaacaaaaaatccaattcatagcatttaaagctatcttagttcacaggccttatgctagtcccgaaataaagtcaacaatttagaaactctatctgaactaaataatttaccatgttgtttggaatttaagggctttccccccaacaatgactgcttcctttctagggaagaagaaaacaagtcttttttccccccagttttcttatttgttgagtatccaggtaacaaactacttaaaatcaaccaaacaaaacttgataattggccctatccccatgtgagccacagaaggatgtaaccatggcaacctgtcatttagaacagaccatctcacgtacctttcagaatttaagcatatgagaacttatccattcccaagtagaattatcatgccgggaacattttgttctttattgcagaggaagtataaagccagactcttaaattgttctcaacaaggtgttcaggagaaaaggaggttcagtagccacgaaaagatggagatacatacactaatctaaagttctttctgttgaggagtaaacaagaatagacttgaggaaagggcaatcattaaagccgtggtgactgtagcagaatagcttggtgaaacctaagttttcaaagtaagaatcttttccaatgaggaaaacagcagctgactgacacaaacacagaccctccttgattttaaaggagtttgatcttcatagtcacttttagcacaccagaaagtattatttccctcacatttttgctggttgttttttttttttttttttttttttttttttggcaatcaagacctacaataagactttacctctctggatttcataatacaggaaacttttttttttgttactttttttttgttgttgttagtatttagtgacagggctcaaactggctgggaatgttctgatagactcttaatcttcaggtgtctcaaactgaacataaaagagtttgaaaagtatttcttattgagatgaccaagtcgcttttctttaaccatcaaaatggtaatcatgattaaaatctgtgatcaattttaattgtagcaatgaaatgacaaccaacttctccatttccactagaaaaattttagagagtaagaacataaaaagagaacctagtgtcggaacatctcaaattgtaaggctagccagaatgaagtaagttttgttagagccaggtgtattctctttgtagtctctacatcaaggggctataatgggtgtctgaagaaaaatcacgggttgattttatcctttatatttaacatgctgtcaaatttatatttccacattactgcaatatggggatcactgggaactgtgactaacacttttgtctatgtacaatagtgtggcatctataataattctctaactcctattcacatcaacaaatgtgtattgagaacatactctgtgaaagatacgctgaaaagagtggtggggcatgccaagaagcagtaggtgatttacctagaagctaatgtaaatttagggctcttcccctaaatgactcccttgcaagaacctagcagggatgctagcagtttttaaattcata

SEQ ID NO: 1882027 - DNA, 4001 bp, Homo sapiens
cttggtcttaactcttacccttctattgtttggggatgttaactgcaaaacagggacagaatttgggctaaagggtctttttcccagtctggtaaattaagtatgtgataagacttctagaagagtagatttaaggtactttcttttgtgcacactaatgggaggtgtgaagggaaagcagaattgcaatttccagcctagggaggccaagccagtcggccttgccaaacacgttgtcttggataaaggaggattttcagtcctgctattggctgatggggcctccagtgccttcttcagcctgttggtggggatgatgccctcagagccgcagagtgagcagtctcctcccaagcatcgctgagcacttgggtgtggaagggttgcctgatactgagggtggggttcctggaagacaggcgatcaggttcagctcttgccttgccctttatggttaaatgttctttggaaagcttctatatctttcaaatcctgggggcattatgatctctcttctgcctatcccaaaccatcttcagccagtactgttgggagaatacaagctccagggcatggtccctggtccgtctggatgacccctccggatctggcatatagctggcgctctatggaaccagatatttatgtaaaagcagggacaatggaatgtgaaaacgtttcgcaaactccaaagcgattcataaccagacagaggtccaatcctagggtatacgagctctctcttttaagcacgtatcacagctgcttctcacgccaccgagacgcggtcaggacaggtgcatccatcttctctgggcttcccctcttgaaagtaggccagggcgcgcaggggttgagggtctctcattcccagagagaattaaacttggaggaaagcaaccaccggcgaggagcggggcgcgtggaagcgagccgcggtccgaggcccaaagaaaagcccaagcctcgcccccgccatcgcgcccgacgagacacctaggtccggggacgggtgtgtgccgcggaagtcaggtgcactgcgcagcactcccccggtaggtacacgctcctccacctacgagtgacctaattacaaggtgccagccgcgcccagaggtgggggtggttaatccaagcggccactcgctgcccgttcctgcccccaaagatgacggaaacccacacgattacagagccgcagcaccccagatgagccacggggtcgcaattctcgtttccgtgatcggactgccaggccccaggtgaggagctgagttcatcaccagagcggccttcccaggggaaccagttacaggctgccagtggccccggcttccatccggtctgcgcctgcgcgcggcccaagccctcgcctctcctggaatagtgctcagggattagtccggttcgccgctgtgcgcactgcgcatgctccagctccatccttcccttcccccaccaccccgccctccgggagccacgcccaaaaagtcaaggcgcttcagttaccagccggctacgtcgcgcctgcgctttgacccccagtttgcgccccaactccggtcgtgcggccgcccggggagggctctgcagttgcgcagcttgctccccggcccttttcccctccgctccccgccgcctcctgacgccgggcgtgacgtcaccacgcccggcggccgccattacagagagccgagctctggagcctcagcgagcggaggaggaggcgcagcggccgacggccgagtactgcggtgagagccagcgggccagcgccagcctcaacagccgccagaagtacacgaggaaccggcggcggcgtgtgcgtgtaggcccgtgtgcgggcggcggcgcgggagcagcgcggagcggcagccggctggggcgggtggcatcatggacgagaaggtgttcaccaaggagctggaccagtggatcgagcagctgaacgagtgcaagcagctgtccgagtcccaggtcaagagcctctgcgagaaggtgagctgtagtacggctgcggacagccgccgcggggccgagcccgccgaggaaaaggcggccgtgaggagggtgcaacatggcggaggccgccggtccgggccccccgagtctccgagaccggcgcccatcctggccggcggcggcttcctaacgacccggcgccccctgcctcccgcgcagggattggttgccgccgccgcctaaaatggcgccgttcactcgactcctgggcttttgagtcagccggccttggcgccagacgaggtggcagggggagcggagaccctgtgggtcatcgtcagggacggttttgagggtgagctggcttggattctgcggcttgggaatggagcctgggcctctccggtgggctgagtaagagtcttgccgctggtacccaggcctagttaggtccagagctgcccagaggatcccccaaaggcagtcttgttaggccgtatcccagaacatacctaaaggtcacacagctttagtaccccttggtggtttgtattaaactcaccaagcgatcttctccagaaatcaaggtaaggggtgtctttaagaatttttaaattattctcttaacctaatttttacgaaggtcatggtggtagctataagggaggagtgtaacttatttttcatagttggaagaaatcgggaatttggtgagtcatactacataaggagcttttggattggaaatcaagtgtcggttgaatatgatttatatgctgactcaaagccttctctaagcttaacacacttggcattttgccgtttatttttaaaatgaacaacataaaatggaagagcggtaaattttgtatctttgttgcaaaaattacttgatagtattttgtggctgcaagtagtagtagtgataataactgtcgactgagattgtattccagacattgtgcttagtgtttaaataatgtctcacatacactgaaaatagaatgttgtagtccacttagtaacactaaactttatattagctaattcccttttgttttcccctgggggttggggaaacaggtagttaatttagctattagctttgtgttgtatttttaaattcttgtaactcagttttctaaagtacacaaaatgctgatctctgctgtgaacattttaacttcccttttcaaaattaactttgcagcacgtcactttagtacagaatagtggagtatcatattagcattttgtatccgtgaaaagaattaatggagaactattatcctgatttgtttctggtttgatgtgaaaattaggttcatgagtttgacgtatatgtttccaagacaggcttttttagaaaccatgttgtgaacaattggaatttaagtaagtcagatttagatttgtttctcccaagcctgaacaaaactactactagtggatgaggtggcacatcatctgttggagatgccttttaatggtagcgatgtattgaatctcctgtttctttaccctctcacgtcaaatgaggttggtatttattttaaaggtttaaaattggcctttaaaaatgaatgtatattgccaggtcttaatttctaggtactgtacatgatgatcttaccgatttttggaattcagtgcattatatgaaagacttttaagtcagtagttggccagttgactagtcttttgaagaaaacgtggaaaggagggaggtaatgacgtaactggaagactggactgcgagttagatttggacatgagtccttctgctcttacttgagtaattgtgacagactttgggacagccacttcacttgtccttgttttcctgtctataaactaaaatgtgttctgagattatacagtcaattccgttttaaattagtagtgtgtttaatattgaacatctattgaatatctaagattgcatactcttttgagggaaatgaaaagcaatgaagaataagtatgcttattgtcgaggagctatgaatctagtttgaaagaaaagcatggtatgaaaa

SEQ ID NO: 1882028 - DNA, 4001 bp, Homo sapiens
gcacattaaaacaataagggtaacagaatttattgacgaacagactggtaaaaatgaaaaacaatgaaaatatcaacagttatctgggtataggaaaccaggtgttcccagaccatgccagtgcacaaataagtacaatctttctagaagagaatccaggaatgagtttgatggagtaatttcacttctaggaacttaaaggaagaaacaaagacatacataaaaagatattcgttttagcattgcttacaatagcaaaataaaaaaattaaacaacgtaaatgagtaacgataaaggattaattaaatacatctcggttcaatcttcaacaaaacattatataatcattaagatactaagtagaatatttactgatgtggaaagatgttcacagcatattgtttggaagaggaaaaaaaaaaacaagttacagaacagtgcaattccaagttacaaatcagtatattcaggataactccttttttttttttttttttttttttgagaatgagtttcgctcttttgtccaggctagagtgaagtggcgcgatctcggctcactgcaacctccgcctcccgggttcaagcgattctcctgcctcagcctcccaagtagctgggattacaggtgtgtgtcaccacgcccagctaatttttgtatttttagtagagacaggatttcaccatgttggccaggctggtccggaactcctgacctcaggtgattcacccgcctcggcctcccaaagtgctaggattacaggggtgagccaccgtgcccggcgactccattttttaaaaataagatgtgatctatatgaacaggaaataaacagtctggaatatacatgacaattaagtggttatctttgggtcatgttacatatttctcatttttttctttatgcttggcagtattttctaacaattctataattaaatatttttaaataagttgttagaactgatgatttctaacattcccgctgccaactctgacattttgtgcatctatgactgatgccctaagcaacttcaaatagcccatatttagtgtggacttgctgtgtggcctttggggtctaaaattttgcccacagctgcagccctctgcattcctctctcccacactcgctgcccagctgtctcccctgctagcctgggagcttctgcttggcaggacccagctgcacccctgtctgtaatccatgtgcctagccaagagctaagcaaaggaacacagctcagcatactgacaggtgccttgcaggcacaatgataaaaggtacaaccctagtgctagaatcttactggacaccagactcacacaaagtgcttggttgtatcacacagatgcagaaaaccaaaggagagaaagcagggcaagctgggctgggagagcctagtagaggagaaggccatgcaggacgggtgagtgagggtactctgggccaggggcatagcctgaacaaaggtgaagccacccacagtcctttgggatccatgcctcaaagctttccaagaaactttcgcaatccttgttctgctaaatttccgtactttggccccaatgggtaaaagttaagtctcctaaacagaagtcctccctctaatctaaccctggattagccaccaaagacaacaacaatcttttgggacaaagacaatgaattaccatttaatccactttccccaaagctcccaaagggagatgaaggaggggagggtcagggaaagtttgggggaggagagggggttgcaggaacaaccagaacatctcacatgcaaacactgctcacccccaccaccaggccattggattctcttgcggcaccaccagccccatttgacagatggaggaaatgaggctcggagagttcaaatggcttgctccggggtcacccagccagagagtggggaaggtgactccactcaggccttctgactccaagtccagtgctatttctaggtaacacacaggacctggagtcaggagccctgggtggctctgtcaccctctggctgcatggtcccatacaagccgctcactcctcgcagcctctttctccagctgtaaaataaggaggagcacactgggcccgcccaggtcctcttccggctgggctctccgagccttctaggggcggctcaaagctcatcctatcaattacatttcccaagttgggccggcaaagatcaccagaagatcctcggcctgtcatgtggttaaataaaaaaagcaaatgtcccagattaactttcactgcactgctcctgcaaacacctgagtattcaattttctagtttccttagttgaaatatttctgctagctaggctcgctgggcggctaaagggcaaaataattaattattgctgagccaaacactgaagatcgagttaaaatccggggtacagtccaaagcggacagttcttgacatgggtccctgaacgagtctccggctatttcaggcctctctcatccgcttttcagccaagagattcggagacgccccagggcaatttcgagatctggggacagaatcttcccaggagtgactctgcccctcctcccgcactcagtgcccgctagccccaagctgtcggctctgggggtactgaggctgggacctgccttcggcgcagacaccggcgcggggcgtgtgacggagcccggcgacgacggcgggagctccaccgcagtttcgtcagaggtaaaggtacgcgcccggcgcgcgcggcgtgtgcacacacacacacacacacacacacacacacacccgcgcgcgcaacccgctcatcacacattcccctcgatctcgagaagcgcaatcacacgccactagcccctccggcctctgccgcgaacccacccgagcgcgcccgccaccgaccacgcggccccgcggctcccctacgcagcggcgtctgcagcgggccaggggcggcctgcctcccgcgtggcgggcttcctctcggcgacaccctgccacgccacgccgtcccagccgccagcccgaagtcgctgcccggagctgaacgtctcggctgcggcgtcccttccaagtcgcgtttcaccgcaaggagtcagcttgcaagcctctccccgcccacccggtcccatgacagctgctgccgcccaaagacaggcagattataacaagaagcaaagtttccctctctctcctcccacctccctcccccaatctccgccttccccctcccttccactgttatgcaaaacgggccggcaccggcgctcccactccaggtaccaaaccagcccccgcgagccgcgcccggttccgcccggccgcccctctccgtgcccaggcgtgtgccagcacccggggctcctccgaggttccgccgcatcctcagcttcccaatgacccgcagccgggcgcccagagaaaaagccctaactctggagccaaactttatgcttgcaacaggcattgggtggggaaaatgggggaaggggtgggggccgcgcacgcctcgtgctgacatttttggtggctgcttgtcccagcagcacccctctcccagtctccaagccaccagcttcctcgctcccccgcgccccggcacaccagagcaccctctcctgtcacgcgcgtgtcgccagtggggctcccgggctcagccagtgcctgggactccgcctcgccttcccttccccctgcatcgtggagcgcgcaccggggccgcgcaccgcagggggacccaggcgcccccagacagtccttccgcccccatccagcctggcttttccccccagggggctccgcccgatagcgaaaccaggaagacgctgtctccgcccgcatgtccacgtgccccgcagacccttatgcctttagccggcaactggcaggaaactccgcgctgcgggcgcgggtagaaagccgcggggggccagcaacagcactctggggactacagcctggaggactaggggactccggagacccgggcatgcacccgtgccggggcca

SEQ ID NO: 1882029 - DNA, 4001 bp, Homo sapiens
actactaataattaatattgctagactcccaacaaaaactctaagggctcgataatattttatccccaattttcagataagaaaactgagactcagagaggtgaaaggatggagcaggcacaggggccccatggatgttctgatggggacctggctccctgtgtcgggcttgatttgttttgtgcaaaaatcattcacacctctgtttcaggagaaaaataatgagctgtctttaatttctttgacctctaaggactccttttataaataatcactcaggaaggatttgaaaaccctgctgatcatctgaagaccgccgcagagccccatccgcttataaaaatggaaattgccagcactgtacattgcttcacttctggtcaatattttgattttcttgtttagaactttaagataaacactgactcagccagaatattgtttattccccccagatacatcagtctccatatccacctgaggggcagacagtgggtttctccttctggccaaatggcatttgcattctaagtgtttagtgagggccatgcatggtgacaggaaggggacaggggccagctgagatggcactgcctggggcgccatcctgtcctctgggctctgcctgcttgggcagggtcgagaggctcattgtagggggtcagagcaaggccttcagtttgcctttcttattgaatttaaaacattcaaaaaggattgaagaaagaatccaaaccagagtgatctcagagaattatagaaatcagagaatatgcacttagcgagaagtggggatgtctgggtcatgttcctaagccttaggagaaggcctcgcgggagaagggggcaattaccaagctgtcaaagacagaaactgggagcaagtcctggagatggaagaatatttatgaagcatttacctgctgtgtgccagatgctttataattattcagttctcacaataaccacaggagcttattattcccatttcagaaatggggatactgaggccagactcatgtgatttgtgtgaagtcttgcagctgctaagtggtagagccaggatcaaaacccaatgtctttctccaaagatatacaagcgacccataagcacatggaaagatgcacagccctgtgagtgtactgaaaatcaatgaattctacacatcgcggaaatgcaattcaaaaccacaatgagatatcattttacacccgctggggtggctgtaatcaataagacagatattaacaagtgttaacaagaatgtagagaaattggaacccttatacattgctggtagaaatatatatggagctgccactttggaaaatagtctggttattcctcaaaaggtcaaatataggtgccgtatgatccagcaattcaatttctaggtatataccccagagaactgtaaacgttatgtccacacaaaaacttgtacctgcatgctcacagaagaatcaatacgaatagtaaaaaagtagaaacagcctaaatatacattaactgagagatgaataaacaaaatggggtacatccatatggtaccaaatattttaattaccaaatattatttggcaattaaaaggcattaagtactgaaacatgctacaacatggatgaaccttgaaaacattataggcaagacaaaatgcagagtaatggtggcctagggctaggggagatgggggagtgtttgggtgtgtgtgcgcacgcgtgtgtgtgtgtgtgtgtgtgtgtgtgttggcagagcagtggctaaggggtgcaggtttgctttttaggagtaatgaaaatgttgtaaaattgattgtggtgatggttacatagctctgtgaacatactaagagtcaatgattgtacactttgggtaaattgtatggcatgtaaattacatctcgataaagctgttaaaatgatgtcctgactccaagtccagtggtcttgggcactgttctctgtccactgtctgcccctggcctggacactggagtcaggcagagccaggttcaggatgcagcttgtccaccccactagctcgtcctagtttccttgaacaatgtgcttacttccctcagcctcagggcccacctctgtgaaatgggcatcaaagggagtaagtgtgattaaaggagggattacacagcacattgcacaatagcatgctaagttattaagtgtgctcagtaaacgtagggcatgaccaacatctgtcaaaaatttaaatagaaggaaaaatagcaatcacattccacagttaagaagtaatgaaagtagacattttggtaaattatttccctcttcccaacacagcaaagattcttttcacctggcccattctatcagttccaaagaaatggccactccagagagaaatgtgaggtttcttccaaaaatggagttttgccaatacccatgagcctctagatccatctccaggggaggacagagccactcggagccccctggagttctgagccctcccgcctcacctgaccttcacaggctgttcctacacacagggcactgaacttacattgactccaggagctgcatgtactgctcgtcgcctcggcccccttctacctcgtggtccagcttcaggatgatttcgttttcaaactgaagatgtaggagacaaaaatcaacaataacatcagaaggctgagggctgaaattagtcaattcattatttcaaccaaagctttagggagcactctttatctcccaggttgagtgctgggatctgggaatgcaaaatggaacagaatactatgtctgcctttttggagtgcccagagagtgaaggggagccatgggtgataactgctagagagagagagagagagcacgtgcgagagagcgcgagtgcaggagagggagagagggaggagagtcagggaagacttttcacaactcatgttatttgagcttgttttcaaaggttaaatagaaatttcgcagaaacagaaaaagggaaaggacattccaagaagacagcaccacatgtgcacaggcatggagatatgtgacagaacacagaatcttcagggaatgccatgtttcctggtcagctattgtttctgcccacttggcattccttcattcctttctccatattttggtgatcacaccagtcctaaccacagtccttggggctctggtgggctgagcatccctccctagttccagatgtggaaacctgacacaagcctagctcctaatccgaatatttcattgcccaggtcccagaattaataaaggtctggactgagacagtgagaccctaaatctgaggctttattggacctcttagcaaaatgagtctttttgctcaagctgaagatggaaggttgtgagcctcaggctgctgctgaccacaatgaacgagtctgtctgagaattacaccaatacagggcaagcagagaggggaagatacagagagacagagacctgatgccatttgtgagcccctgcattcagccacacctgacactttcccattcatatgagctcatctgtgtatatatcagccagtttgaattggagttttgttccctgcaaccaaagaaatgatgaaaaatactcataaaacatggagcaaatgtcaggtctcagagagtcaagactggtgacaatggtaatgatcagagatcagattaggtaagtgatcagaaagcaagtatccatttacagttccaccaaatcttgttgcattgaagccacagaatgctttgtctccctactttccatgttaagaagcatttcacccactggagtgcatggcttattcaacgcattgttttgaagtcacccaacgtctttttaacatgattttgttgcaaaatggtttttactattttagtattataccctgaagagtccatccaaatcatgcagtccacccttccctcattttaccattaaaaaataaactggcacctggagagggaaaggggagcttcgcaaaggtcaccaagaccaaaagaggacttg

SEQ ID NO: 1882030 - DNA, 4001 bp, Homo sapiens
aaacaaacaaacaacaaaaaaaaaacaacgatgagttttccacttatactgactagatgacacctgaagttctgctgctcagttagtaggatgacagggattaagtttcctgactgactcctagcccagggctcactgtgacccataccatacagagtacttcctttgcttctccttccttggcaattcataaagggttcagtgggcgcagactcccaaatgtcaacctgaattcatttctattttagagggtattatatatcttaacatactttcatatgtatttatatgaaaaccaccaaccaccttgaaggttgtccctattttatggctaagaaaatggagacactccttaaatggcctgtccaagttcctacccaagactacaggtaaccccttggtcccaagccctaagacctccctggcaaagaaatgtctaggatgaagcctcagtcaccacaaaaaagtatgttctgttagtctatgtgctgtgagaacccaaagtcgccctgactgtttctgtttcccaatctcaggtgccatccaagtgccttgtctcttcttctggagcttcaatgggcttctattggtggttgacacaacaggaaaacctaacttcatctctcgctaccgaattcaggtcggcaagaatgaacctgtaagtgttgttgcaacttctggtcaaagcacagaaagcaagagccaaagccacactctcagaattctcaccactggcccaggagagacctggccagtgtgagccaagttattagcaacaaggctcccccagtttagaaggttaaagagaggaaataatttgcccacaacctcagagtcactcagctagtggccagtcaagaccagtgttctggtctcttgattcctggcccaggctctggacctgcctgtggtgccccatggcactgtggtcagcctggcactgagaaggcaggcaactccactttacccataggaatggagacagcaatgggtggatgctagaatatgggtaacagctgttgttatgagagagggagacagctgcgaaaacaatggataactccactgtaatagacggatagtatggattctgaatgtgtgggcggtggctgtcttttaaacaagttctccttccgaaatactcaattcgaccaatagtgaaaggcaccagggcaaatccatgataagtgaggcccagaccctgcttacaaggaactctgacttgcacagcgccgggaagtgggtcccactgttccctgagtctggctcgccttttcctacacaacaaggaagaagttgattctgaaacccaggttctttacccagctccacccaaaccacatcctggcttctttcccagacaagacaatcatcttttagtcatctgcccaggtgtctgggtgaaccacctcagctctcaggtccttttgccccagcccagcactccagaaaggcaaacagtgctcttgacccactcctttgaagtgggccccttcctgaactggactgctggcctggcttactgtccccctcacttgggacaacagctgccagccaggcttgggggcttcctccaggcccagcttggcaggacatgaatcagagcctaaagtgtcaaaccctgtgcttggtccttgagaacacttcatctgtcaaccacggctgttgtagcaccactgactaaatgctcacatcttcaactgaggccaagaaccttcactgttcagatgaggaaacagaggtgttacacgggtaaactatgattcaaatgcaggctttgtgacttcagggctcacattcttaattggctctccagaatattacctgccgtctgtacaaccttgtggtctacacaatgactacagagctacattggaagatgtcattgcattctgcagaagctgaggttcagaaatgtccagtgactagctcaagatcagattgctgctaggaaacagagccagggctcatcccatctgacaccaagtccagtgttcctgtaccacatgcaccctcaagtgggcacacaagcaggaaagaacctcacgaggccatttaatctttggctgtttcaaggaaggactggcccctgaactaacacatcagaaacagatcctcaagtggggagctgaatgctacctggtgttcctatgatccattcctgctctgtttactctcccactgcctgaatggctagttcacacctcctcccctaactgctggcagagggaggggccttgcttcccatttcactaagaaaatttaagcctgggcgtggtggttcatgcctgtaatcccagcactttgggaggccgagatgggcaaatcacttgagctccggagttcaagaccagcctgggcaacatggcaaaaccctgcctctactaaaaatacaaaaattagctgggcatggtggcgcatgcctggaggagaattgcttgaacctgggaggcagaggttacagtgagccgagattgcaccactgcactccagcctgggcgacagagcaagactctgcctcaaaaaaaaaaaaaaagaaaaaaagaaaatttacgcaggctggggcacagtggctcaggcttgtaatctcagcactttgggaggcagagacaggaggatcgcttgatgctaggagttcaagaccagcctgggcaacatagtgagatccctgtctctacaaaaaaaattattttaattagccgggcacagtggcgtgtgtctgtagtctcagctagtcaggaggtcaaggcaggaggatcacttgaacctaggagttcaaggctgaagcgagccatggttgtgctattgcactccagcctgggagacagagtgagacactgtctctagggggaaaaaaaaaacaaaaaactaaagcaagcagaagagttttatagatgcacaccacattgggcagtgaccagtacctgcacccacatgctctgcctgcccacctgacaccacaggtgaactctccttgctcctgtctgtgggtgattcctcccctatccatgtactacatccaggaaatggctgctgcaattctctctttgctttcttgtatcttcttttccttctctttctctcattattcctctctagattattacaaacgtggtaaattttttccatctaaaaaacaaaacaaaacaaaacaaaacaaaaaaaaccccaccaagtgtggttgctcactactgtaatcccaaactttgggaggctgagccagaagaatcgcttgagcccaggagtttgagatcagcctgggtgacagagtgagatcctgactcaaaaagaaaaataaataaataaaacaggccaggtgtggtggctcacgcctgtaatcccagactttggcagtctgaggcaggaggatcacttgagcccaggagttcgagaccagcccaagcgacagaacgagatcccatctctacaaaaaattttttaactaggcaagtgaggtggcgtttgcctgtagtcccagctacttgggaagctgagacgggaggattgcttgagcccaggaggtcgaggttacagtgagctatgatcataccactacactctagcctgagtgacagagtgagacactgactcaaaaagaaggaaaaaaaacaggccaggtggagtagttcacacctgtaatcctaccactttgtaaggccaaggcaggaggaatgcctaagctcaggagtttgagaccagtctgggcaacatgacaaaacaccccacccaacactgtctctacaaaaaatacaaaaattagctgggtgtgatggtgcatgcctgtagtcctagctacttgggaggctgaggtgggaggactgcttgagcccaggaggttgaggctgcagtaagctacggttaggtgtaatggcctcacctaacatgtcctctcacaacaggctggcgaaacctggcctcgcgatgggatggaagtaaacaaagagtgcactccagcctgggtgacagagtgagatcctctctcacaaaaaaacagacataca

SEQ ID NO: 1882031 - DNA, 4001 bp, Homo sapiens
ggtaattcatactattagaaataaatatatctattttgagatggagtctcactctgtcacccaggctggagtgcactggctcaatctcagctcactgcaacctccatttcctgggttcaagtgattttcctgcctcagctttccaagtagggagagacagctttagtaaatatctttgtacctatataattattaatgtctgaaagtagttttgtagagtattctaagaaatggatttgcacagtaagtagagcaggcacttacaaatatatatacagtacatataaatgcttcttttcttttttcttttttttggttggttggttggtttttttagagacaggctctcactctgtcacccaggctagagagtagtggtgtgaacatgactcacagcagccttgactttccaggcttaagatcttcccacctacctcagcctcctgagtaggtggaactacaggcatgtgctaccacacccggctaattttttctgtttgtttgtagaaacagggtctcactatgttgcccaggctggtcttcaactccaacccctcctgcttcagcctcccaaagtgctgggattacaggcatgagccattgcacctggcattcactgtttacgtaagcagggtcgtattatatatatattgttctccaactttgcttttttacttcatgtggcatagctatctttccaggatataatatataggggaccactgtattctttttagaagttgcacagtattccacaggataaactgatataccattttttaaatacaagttttattttaatcttcattttttaacacattttatcatggaaattttcaaacaagaacaaaaatagaaggaatcctatgatgaacaaccatatacccatcacccagttttaacaattatcatcatgtagtcaatcttatttcatatataccttcccactctcctttctcctccccttttgctggattgtttttttttaaagtctcagataaggccgggcgccatggctcacgcatgtaagtccagcactttgagaggctgaggcgggtggatcacttcaggtcaggagttcgagtccagcctggccaacatggtgaaaccccatctctactaaaaatacaaaaattagctaggcgtggtggggggcgcctgtaatcccagctacttgggaggctgaggcaggacaatcacttgaacccaggaggcaaaggtcacagtgagccaagatcataacactgcactccagcctgtatgacagagcgggacttcggtttcaaaaaaaaaaaaaattaaaataaaaaataaaacagtggccgggtgtggtgactcacgcctgtaatcccagcactttgggaggccaacatggcgaaaccctgtttctactaaatatacaacaattagctggacgcggtggcaggcacctgtaatcccagctacttgggaggctgaggcacgagaattgctggaactcaagaggcagaactcgtgagtcagagatcttgccactgcactgcagcctgggcaagagagcgagaccccgtttaaaaaaaaaaaaaatgctggctgggtgcggtggctcacgcctgaaatcccagcactttggaaggcagagacaggcggatcacccgaggtcaggagtttgagcccagcctggagaacacagcgaaaccccatccctcctaaaatacaaaaattagtcgggcgtggtggcatgcacctgtagtcctcgctactcgggagcccgggaggcggaggttgcatccagcggagatcacgccactgcactccagcctggacaacacagcgagactctgtctccacacacacacaaaaaaaggcataacaaatttaagtgactcaaagctttatgtgacacaggagctctcagaaaggaacagttaaattataacatgtccatattatgcgttagtatgtgtccacaactaacccataatatggacatgttataatttaactgttcattcctctcttgatagacactgaaatcgtctctataattttcctgtaagaaataatgccttggggtgggggtgtcttcctttctgaggctatcatttgtattcctcacttcttaaatttgtttgatatgttgaggcttaaaaaaaaaagattacgggtcttcagaacgccccaatgcccgcggggtgctggggtgcctcggagtttgtcaaggtgtagcttaaaacgttaattcccatgctcgctcccaaatattcgaattaaggcttctgtagttcttacaagtcacccgctttctttcaggaggaatgttaaagattaagagcggcaagaagtcagagtcggcccaccctccgagctctcttagggcgatgtccttgctaatttggagactgattcagtccccttttggcccccaagttacgtaaagataaggactttggagatgttttctcaggaaggacagagctgaaaaacaaagttccgtaagtctggccggtaactacatctttccttcctaacaaagaataagccgcaattcactctctctggcacctgaactttggggtaacgattaactgcgatccgaagccttcaggcaagtaaaaaattcctgaagtgattacgcctgtttggaggcttgcagggcactaggggatggggaaaggtgaatcgaggtgctctctggctcattcgcagccggctaacccgccatatcttacacagctaagggctgccgacgccattttgcagggtgggctgcgcagactcttggcgggaggccggcgcgcttgagcgggagaggacgtggaagggttggaggtggggagtgcgcgttacgactggaaagcacgcgtgcgcacaggcgacagcagcggaggggtggggccagtgtacgagtgcgcgtgctcggtgggagcccgcggagtacctggaaggaggtgggggcgaggtagaaaggagtggggttgaaaagcgcttgcgcaggacggctacggtacgggggtgggagggcttcggagcacgcgcgcggaggcgggacttgggaagcgctcgcgagatcttcagggtctatatataagcgcggggagcctgcgtcctttccctggtgtgattccgtcctgcgcggttgttctctggagcagcgttcttttatctccgtccgccttctctcctacctaagtgcgtgccgccacccgatggaagattcgatggacatggacatgagccccctgaggccccagaactatcttttcggtaactgctggggggagctggagcgaggccgagcggggcctggtggcggtgagggtgggggtgaggggcgggaatccggctgcaaccgggtctggtggagaccgccagaccgacgggaggcctgagcgggtgggaagagctgcctgagccctggacctggagggattggagccgcggggggagccggtggcgtgaagggggaggagacgagcggcctgaagcgtctggggcgtgagcggtccgaggcccggggcctgaggtaaagtggaaccggccgcctggaagttcggcctttgccggggatacgtggcggagctccaggcgtggtttattttctaacggcggtggttcataggcttctgatgccaggccccgggttggtggtcctggaggctgggttcaccgggaagcatgggcctgcttgttggagcgggtagatgcacagcctggcgttattctggcctcagagcctggagctgccggacgtagacttacctcgcgtgcttcggccagttactgggggtggggaggcgcggcgcggcgtgaggaggccgcaaccgctgggagcacgtggttgccacgtggttgggggagggaggggggtgtgggcgctacatccgggactcaccggcgtgttgccactcgtgagccagggatgctgtggctctgttgaagtgggaaatgttaagaggctggtagcactagggttctggaggtctttgttcagtgcttacagcatgtactgtgatggcagc

SEQ ID NO: 1882032 - DNA, 4001 bp, Homo sapiens
cctcacagtctttgtacttgctgctcttctgcttagtacacctgcttcccagatcttcacatgacagattccttctcgtcctttgcctctcagctcagatatcactttctcagaaacatgttcacttaccattcatctaaagcagctacccaatgactgtcattctataccattactctcttttctttcaccttggcaattaccactacttgaagtttgtatttatttgtacaagtttattgtcagcctctccatcctccaagtaaaatacgagctccatgaaaacagatagcttgtttctttcctcagttcccagaactcggaacagtgtttggcacacatcagtctattcatatgtttgccaaatgaacgaagaagtaaaaaccactagtgacccaattttcctgccatgtcatatatatacataaaagtcttttgggaaaactcatatttctatattggccctcactaatgtcttttccatctattctagaatgcaataaccagtctttaaaatgcaagcagaatatttcacatttcatttttgcaggtatctctgaggggaatgaatttacatttctactaccacaaataggatggtcaagtttgttgcaatgcaaaattttttctgtggaattcaaaaactgtcctgtacctcttgaagccgaattgtggggtttcacattggaaattacactcatctaaagaaacagtctggacatttaagtccttaaacagttgttcaaagtattttattacatactttttctagtcttcagaatgtttcaaggtccattgtcttcatggctagttacctgtctgtccaggccaaacaaactggagttaaaatgcagaatcacataacagcagaaatgtgatttctcattctattgtgcaatccaacagaattgtgccaagtcttgctaggctgacgctgctctactctgcccaaatgccaatatgcattggggtgatgacatcccacttgggatattgtctgatgacacagacagacttctctgtttctccactcttgggtcatataattcaatgttctggggctgaggcaaataatgtcttacagtgattttggcaagaaaaaaacagctatttcagattttgttcaagttcccctagtcatgtcagaccccattgacttcagtagggatggcaccatgttcaagaggctgaagaagagacctagaaccagaaactgagacataaggtttattgaggggacttacaatacagggcagtccagtggcagtgggctgggcaggagaaccaaaactccttgtaaaaagcatgcaattggccaggcgtggtggctcatacctgtaatcccagcgctttgggaggctgaggcaggtggatcacctgaagtcaggagtttgagaccaggctgaccaacatggggaaaccctgactctactaaatacaaaaaattagccgggcctggtggtgggcacctgtaatcccagctacttgggaggctgagacagcagaatcacttgaacccaggaggcggaggttgcagtgagccgagattgcaccattgcactccagcctgggcaacaagagcaaaaactctgtctcaaaaaaacaaaaacaaacaaaaaacaccatgcagtttatataacatttttacttaacacctttcccctagcaacctccaccaggcaaccttcatttaacctaaaacaaagggctttgatcgcctcgtagggcctgcattctacaggatgggctgggggtgggagcagttcagaagttcgtcatagataagaaatgaaatatctgggttggccactcccagattccttagcttggagctctgaacacacattcttcttagaccatagggtcattcttcaggtatgcataagttattgctgccaagtgcatctgtcgggtgcatctgccatacaccccttaccagaagcgtccaaacacggatttgagggatctacagcagacactggacagatgctctgaatcattctctactctgatgctgaagctataatattggactaagcttgggccttctactcttttctttctttcttttttttttttttgagacggagtcttactctgttgcccaggctggagtgcagtggcgcgatctcggctcactgcaacctccacctcccaggctcaggcaatcctctcacctcagcctcctgagtagccgggactacaggcgcgtgccacaattggctaatttttgtatttttagtagagacagggtttcaccatgttccttaggctggtctcaaactcctgacctcaggtgatccaccctcctcagcctcccaaaatgctgggattacaagtatgagccaccgcacccagcctattcttttcttaaaggaggaggccttcccttcctcaggcaagtaattgctgactactccagcctacataacgtccagacatatccaaatctgtggagaacacaaagttcttaaggtatttatttagagtcaataatcaaagtaaaactaataattatagctaatatttagtttgtagttaatatatgctaggagctcgagctaagcactaccatcccaggaaactgaggcttaaaacacttttaaaatttgctcaagctcacaagcttggaattgaagaagaaagcaattgaatattggtctttcttctatcatacatccagaggctctgcacttaatcaatacaacatactgtctcttattgcacaagtaactacaaggttcatctgtaaaattctattctgtagaatagaagggaaaacaaattaaggaattacagatgtttattcttctgagctttaatttaacgtattgtttgattcaaataatttatatattagctatctattgccacataacataatacctcaaaatttaccattttaaaacaaccaacattcattatttctcagagtttctgaggatcaggaatctgggagccacttaactgagtggttctggtccagaagactctcatgaagttgcagtcaagctgtcagtagtcatctcgacacccaactgatgctgaaggagctacttccaagctcactcaaggttgttggtgggcctcagttcctcattaaatgttggctagagacttcattccttgacatcacatggacccctcaaagggctgcttataacatgacagcttgcttgtctctgagcaagagaaagggaaaagaacacccatgatggacatcttttataatgtaattacccaagtgatataagtatcatcactaatgctgtatgcttttggtcacatagaccaatcctggtacagggatcattcattgggtgccatcttggaggcaagctaccacatctgccagggtatgaatgcatttaatctaaagttctagccctgaactgtagggttatctaccatataaatcagttttacattttttaatatgtaaaataggaacatcccaattcagaatattgcaggataaagggcctcaggtaactgattaagattctaagctctctttctcttttaaaagatgaaatttaaggctgggtatggtggctcctacctataatcccagtactttgggaggccaagacggggggatcacttgaggtcaggaatttgagaccagcttggccaaaatggcaaaaccctgtctctaccaaaaatacaaaaaaaatagctgggtgtagcggcgcgtggctgtagtcccaggcacttggaaggctcaggtgggaggattgcttgagcccaggaggttgaggctgcagtgagccaagaccacctcactgcactccagcctgggtgacagaaggagaccctgtctcaaaaaaaaaatgcaatttaaatagtaatggcattcagatagtaatcacagtgcacctggaactggacggcaccatcttaggttgctctctgctttgcgcatgtggacaagccatctatgacaaatagtttcttttcttcctaaggatatgcagcttcttttgtagtatactgcattg

SEQ ID NO: 1882033 - DNA, 4001 bp, Homo sapiens
acttggaaccaacccaaatgtccatcaatgatagactagattaagaaaatgtggcacatatacaccatggaatactatgcagccataaaaaaggatgagttaatgtcctttgcaggtcatggatgcagctggaaaccatcattctgagcaaactgtcacaaggacagaaaaccaaacactgcatgttcttacttataggtgggaattgaacaatgagaacacttggacaagtgtggggagcatcacacactggggcctgtaataaggtggggggctgggggagggatagtattaggagaaatacctaatgtaaatgatgagttaatgggtgcagcaaaccaacatggcacacgtatacctatgtatcaaacctgcacattgtgcatatgtaccctagaacttaaagtacaataaaaaataaataaataaaattaaattaaaaaatttttaaaaagacataatagtgcttctattctgagatgcggtgtgttactattccccctattatttcaaatgatagcaatattaaaacaattttgtattatacttccctgaagttagcacaatcaggctactcttttttgccttcaaagctaagaccttgaccccaaaccaccaccatctctcactcaggtggtggcaacagcctcctaactgttctcttagcctctagctttgtgcctctcttccccaacaagaggaaatgcaatagccagaacagccttacaaggtcccttttgttcaacaccctacaatgagcctcagttcattctcagtaaaagccaaatgtcttccttctctttttaattatctaagttcattttattttccaggatattgtttatcttgaaattctatgggtgcaagaaaaaaatgtgactgctgctattattgcgtggagtattcatatacagagtatggcatctatcttgttggttgattgtgtttttcaaatcttctatgtccttaccccaaactcccaatcctcccattatgcttatcaccttctaatgcaatatatgcttacttaatatgcttagtgtttattgtctatcttcccttgttagaatgtaagctccacaaggtaggcattattgattgttttgtttcctgatgtatctcatttttctggaactgtgcctggcacataggagtgcacagtaaatattcattgaatgtttgaagaatgctccatcccaaccaaaggtagaataaaccagttacttatttattttgagacagagtcttgctctgtatacagggtggagtgcagtggtgtgatcacagctcgctgcagcctcaacctcctggctcaagtgatcctctttcctcagcctcttgagtagctggcactacaggctaattttttaaaaaaaattttgtagctatggggtctcaacatgttgcccaggctagtctcaaacttctgagctcaagggatcctcctctctcagccctccaaatggttgagattatagacatgagccactgcgctcagcccagctatgtttatttctatgcccttttcttccctttattattctgtctcacacacaaatatgtcttttattctgatgtcccactgatatgatatcaatctattttagtcaacattttttattcttatgggttatatacttttttagtcttaatatcatttaagggtggatccaagatttgggggccctcttcaagtaaaagaatgtgaaattaaaaacacaaaaactgcttggaaagaggctcttcactctcattcatgccagctatcatgttgagatgcaagacaccactcccctttctttccattgtggaaggaatttcagatagtagaaaacaggggcttccactgataatttcctagcataagctatgatgttgatgataaacaagattaaactaaaaggcaaagaagaagcaaaaaaagtagtttgattctgccaacacataacaaattaaagtgatttacccgaaccacttaaggttaattacgatgaagcacaatgtagactgtgaatgtcattagtctgatagattcactttggctgccacagaagctagcatttgattctatgctgagctaaggagtttcttcagcttctggcacacaacccaaggcttgccccactccttgtttttttttttttgatttttttttaattgttgctaaaatcagtggaacactggaagagagggaaaggaagagagagaatcaaaagcatggaggcatatagcaatctgaggaaaggaagaggttgaagacattaacgtagatatctatagccccagttgagtttctgttcatctcccttcaatacccattctctatccaaatagtgatgtggcgctttgtttaattattgtttaatagaagtcttctctcctagattggaagcttcctaagagcaaaggcctcatccacttccctcctgctctccctgcaacatgtccccctccatgtgtctggcacattaaagggtttcaatcaataattgatgtgtgaattccttttacgaatgagtaaacaaattgaagaaaatttggctcttagaatcccccacttggtagagcatctccttagtcctgttttctttatttcatttatttctacaccaaggatttcttctgctccttatgcccaaggctggaagacttaaacccctgaatgggaaagtgccttatagcaactgccttcatcaaaacgaattagaccataaagacatctagtctgcactctctcctacctatcactttcattttatttgtaatatgttaataatacatgcagagcaggataaatgaaaaatattacaatatgttctgttgacctaatgtgagcatacatttggccaagtaactgtgaaatatttgatattttcacaggaaagccaatgactttccgtctctgaagttggtgctttggtttatttgacacattttccatagtcatgttaccagtaattttagaggtcccaggggaagaaacatttctcttccctgagttcagtaattgtcatctgaaggtctgagagctgtaccacttgcttcttgattgtttggttaaagaaaaagttgtatgaaatgtcctttctattttcagaatatatatttaacatagaaaacctgctggtaattgtgccagcacttaaacgctattgtttcttggaaagggcctattctgttgcatgtgccttttaaatgtaacatctttaaaacttgagttcaaaggactgcctctcctttcattaaactgtaaggactttggaatgctgtaaattcatgttcccagtaattctggtcctggacaagtttcctcttcaacaccccctgtcctttgttgtcatctgtcttctcagcgtccttctgatgtccagctttgtgtttcctgctatggacatttcctgagatcacttgagcttatgttccatctccgagagaaagctgatgagaattagtcatccatgaatgtgattatgggtgataataagcccttctcagttgaggtattgcagcttagcaggagacttttgaaatattatcactttgcacagtatgattttacccaatattcacaacaaccctgtgaaggagaagatgtggctagaaatatttccatttgtaggtgacaacactgcattcctgaagggctaaatgatttgctgatggtgatgttacaggaccccagcacttacccaaaggtagccattgggtcagggtttctgctctatagtcccttctgtgtcaccagaaagatgttacaggaccccaccacttacccaaagttagcctttgggtcaaaggtttcctcactgtagtccctttaggttttgccagaaagatgttataggaaaggggtccggatccagaccccaagagagggttcttggatctcgtgcaagaaagaattcagggcgagtccgcagtgcaaagtaaaagcaagtttattaagcgagtaaagtggtgaaagaatgtctactccatagacagagtaggatgttcctgaa

SEQ ID NO: 1882034 - DNA, 4001 bp, Homo sapiens
ttggacactggtttctgccaccgtgccttgtggaacaagggaccccagagagagccacagggcactggccctcaatgggcccacgtgtgcaagagggagacagccccaactggggttagccacgtgctctgagaggcctggggcatagccctctgtacttcagcatcagtgagagatgaagccacaggagaccttttctgcagagggaggggctgtgtgagctcagaggtccaggcagtgcctccctcccaccctgactgcctgcgccagctcccacctggactgaaggtgctgcttttctgcaggttcgctggttaaggactgaggaggcagctgcacatcctctcctctgtccgtggtgtcatagcaaatggctcttcctttttctcaccgtgcagttggtcttgaggtgaagctcagagcacaggacacattgtttgaaactggtgaagccgtgtgttgtaccaggcagcgagagaagacatgtggccttatttcccatgcgatgagttttcagagtgatgtgaagacgtgccctcttactgagcaccacctctcaaatggccaagggctcccacgtggtccacttgcaatgtgggaggtcatcctagcagacggcaagggaggggagctggctgcaaaggtggacagtcaggctggaaggcctgagacccgcaagagaccgctctgctacgggacagggggctggtgtttctggagacagtgtactaactccgagggcccagggagggccgtgctcctgggagccagcctctgcaacctggctttctgggtgccgtgggacggcggggctgagcctggcctctccacacatgtggccagctgccactccccaggggtacaggtgatgtgcagtctgcacacaggggcccaggggcctgttgccttcctggacacccctgctcccatcttggggctggtcagctcagcccagagcgcctagtaccttctgaagttattttctcctctttaccaggaagaaatgtttgtagtaaaagaaacggtggcacataattttggaaaacaaaggtattttgagggctaatgcttgtagctgggtttcccagatgcaaagtttgcacattttattgtcatccttccatgttttgtgcatacatgatcgagaagtgtgtgtgtgtgtgtgtgagtgtgcatgtgtgggatgccaatgtgtacatggtacaactgtgtgtgcacaggtgtgtgtttttgccctgagtgtgtgcggtgtgtgtgttatgtgtatgttatgtgttgtgttgtggaatgcccatgtgtgttatgtggtgtgtgtgccttgtgtgcaggtggcatgtctgtgtgtgttacatgcctgtgttgtgtgcccatatctatgtgattggtcactgttgtgtgtgttgtgtgtgtctgcactgggtactcgctatgtgtgtcgagtttatgtgcatggtgcatctctctgtggagctttgtgggaatgaagaatcaggttaatctcccagctctcaatcagaaaaggacaaccaaaatttgcagtcgcacacagaagatgaatttgttaatgcctggctggactttccactcaggtcttaaccacctggaatgctgaggtgcagcatatgtgattgatgaaacagggacgagggtggtttctgctgagcacttcaggcatgaaatccaaactcagcaaaagagccccctttgccagccccctgctgctgtcccaacccaattgcttgtcccgctctccttggaagatggcagccacacttgagtgggatatcagagtggctgcttttcatcaggaagaggcagagacaggctgagtcaagtggaaccactgctgtcccccactgtcaggcggcccctgcccccacttggagcccgcccaggggcagctttgtctagacatggaggggcacaaggacttgagctgagcagggcactgggcagtgggggcagcccagtgtactgtgctcagaactgcctcgacccagagccagacaagtgaccgggcagtcacagccccatctcctccctgctaagcactggcaggacccgcaggggaggaggagggaaggcacttcctgctgcctggacattccccactctcaggagcagcacagacctggccactcccatgaacagaaagtacccctgcagtgttgccctcccacaccgtaggccacacacctggacattccacaacatataacatacacataacacacacacacactgcacacactcagagcaaaaacacacacctatgcacccacagtggtaccacatacacactggcatcccacggtgtcccatctggccacaattgtctctcccctgttaatggctctcaggacactgcacatagggtagcaaagggcagtgacccatgacagatgacatgcaagtgagctgagccctgacgctctccagcttcctgcctgaagagaatctctgagccatgacacaggcagaggagcccaggcacggcccacagcctggctgaacgcaggagacagagccgagagtctgtggaggtgagagaaagtgacctttgccctacagagtcttgcagaaaagagacaggcgtggggcacgagctcctgggatccacaacaggtctgggtggagcaggccacagagtgctgctcggtgcacgagagaaagactcacgaaacgggaaggaggctctgggaaggagtagaggtcaatgcccagcactcacactgggccggccgcctctcctgccaggcaaagttgaatacgcattgggtagagcacacaggagagtgttgcctcggtactggagaataattcatccttaattgctcacctctcaggttctgcctaacaaagcttaaaagcaagatccaaaaggctcaatcttgtttcaaagaaactcaacgttgtccttggacaaccctcaagaatatgtatagaatcagaggagccaagatggcccaataggaacagctccggtctacagctcccagcgtgagcgatgcagaagacgggtgatttctgcatttccatctgaggtaccgggttcatctcactagggagtgccagacagtgggcgcaggtcagtgtgtgtgcgcaccgtgcgcgagccgaagcagggcgaggcattgcctcactcgggaagcgcaaggggtcagggagttccctttcccagtcaaagaaatgggttacagacggcacctggaaaatcgggtcactcccacccgaatactgcgcttttccgacgggcttaaaaaacggcgcaccacgagactatctcccgcacctcgctcggagggtcctacgcccacggagtctcgctgattgctagcacagcagtctgagatcaaactgcaaggcggcagcgaggctgggggaggggcgcccgccattgcccgggcttgattaggtaaactaagcagccaggaagctccaactgggtggagcccaccacagctcaaggaggcctgcctgcctccgtaggctccacctcttggggcagggcacagacaaacaaaaagacagcagtaacctctgcagacttaaatgtccctgtctgacagctttgaagagagcagtggttctcccagcacgcagctggagatctgagaacgggcagactgcctcctcaagtgggtccctgacccctgaccctggagcagcctaactgggaggcaccccccagcaggggcacactgacacctcacacggcagggtattccaacagacctgcagctgagggtcctgtctgttagaaggaaaactaacaaacataaaggacatccacaccgaaaacccatctgtacaccaccatcatcaaagaccaaaagtagataaaacgacaaagatggggaaaaaacagaacagaaaaactggaaactctaaaaagcagagcgcctctcctcctccaaaggaatgcagttcctcaccagcaacggaacaaagctggatggagaatgactttgacgagctgagagaagaaggcttcagacgat

SEQ ID NO: 1882035 - DNA, 4001 bp, Homo sapiens
tctcgttactgtgactgggatcttttttcccctattgcactttctacttgctgtgactagtacatatatagaaaattgagtcagtgtaattcatgtgagtggcgtaacagtcttaaagtttcagtgctttaacacctgtatttcttgctgatggacaagttgctgtaagctgggccactttcatctcagtaatgccttagcatgccggttctttccactgcaaccgtgccgagtggagaatttctggactctcttccttaacattgctgactgcactctggccctccctttctgaatgcatctctttcttgtgatggttttccaagtggagctttcacagcgcatgctactaacctctgctcttctccagaatgacaaaagcctctggcgtgtgacctatgctccaagaaataaaaggcaaaagtttcactaaatattttgctgcaagaaagtgttgatccaattttccagtcttaaatatcatttgtcttacctcctgacacccagctgctagaataatactatgtagtttaggttttattattttttaaaaaatcaaataccttgtttccagtcactaagttcttattagggtaactaacacaggctgatgtcacaaacaacccacagatctcatcattgaagtgatttctttctcacatcataggcctctaatggacttgctctgattttgaaggtgttttctctttgtcttttctaggaagttggggatgagagaggggaaggagtagcatcttgttccgtcggcctccttgatctaagcctttgttgtgaattcgtttttaccacatttaaagtgtgatgcccagaatggaactcggggctgctggcacccccatccatctttggaggccctggacataatcgatggggcaggcagaagacctgcagctccaagcctgctagtcggtgagcctggaattgctatgctcttaggatcatgtgttcccactgtgaatgcttttggcggcttttcccactggccacttggtcatatccatacccagactgaaccagctctgaccccaggccctccccaccatgcccatcctaccagggtgcccccggctgaggctgcctcttgaggccacaccctccacctgtataaccccagctttggagcctgcggatcctgcctgagctgctctcaccctttggaaaccaaggattgagcattgttccctgagtgtatttctggttatgactttctcttttctccacagaaaggcatctctctgcaggtattgggttttctctgagctcagctgctgctcttggccttctttctccagtttctgtcctcctctaccagccttgagactgcagtgtggagatatgtcgcctctgttttgtctgggctgcttctgtctgggatgatggaatcctcactaaatgggaaatgtttatggaggaggagggagatggggaagtcattccctcctgttaacatttcggcttaagttagcttattcatatgaatgacacaaagtcgtaattgctcctaatcaaatctgtgcacacagtaaagcctcttttatgcaatgagtgtttacttaattgaatgttacatataaatgaaggttactccttcaagtgacaaacgtgagggatttcaatggaaaattctgaaaatgagcccctgaaggagggaagatgggagatgaaagatgctggaagagaacagaatggggccaagacgctccaggagagcaccgggggaatcccagttgctcttgggtttcacttccaagggcaaaacgatgatgacaaattgctttctgagaatccatccctcttgcagggactttcagccagagacttgtccataatgggctctgcatcatgtcagagccctaaaccataattaaacaccattgcatttattagagtcctcatgatgttaccttagattcttccccacaagggcaaaccccctagtgttgatgtcaatgttctatgggattctcctggtgttagatgattacagtatcacggaaacgtgaggctgcatctgctaagtaacgtttcactcctgtgtatcacagaggttcttctctaagccccacccacaggagagccagacctctgcatcacagatcacatggagaaactgaaacaaatgctgactctcgggaggtgatgataggactcgtttccttatcattttttcagagccccagaagtttacaatgataaaaacaagagcatttcatgaaacagcatgcaaaagcccatgcatgctgtctatttttatataaatcagcagaagataaagagcttgtcttgattcatgctgttcctccagggaatgttttgcaaaaaggcaaaaaaaaaaaaaaatcagggagaagagcgaagcctataaatacaattggaaaggaaaataaaaacaactcactaaacgttgagtttgacgaaaacataacaaaaccaaggaacatttttatgtttttttcctttcagttttacttttgatcatgtttcttcctgaggttttatgaatatatacatcaagtgggagagataaaaaccccaaataactgtagaatgatgagaatgtaggaaagagaatgtaggcccttttattccatgttatttttctcagaaaaatgacagttcaacctttccccttctgattgtcactggaaagcagttttcatctgaaatgaaatgagtgaggatcatgagtttgcctgtatgtcttatatgaagccagcgctgtagtgtcctcacttacaaacccgtgtttcaagtttacccctcaattcctgaaagtctgaaattttagagggacaaaggaaaattaagaattaagctaaaaagagttaaattgtggttaacaaacatttctgtaaaaggggcggaaagtaaatattttctgcaccgtgggccacaattcaacccagctctgccatcgtagcccaaaagcagcaagagacgagatgcaagcagagggggcagctgtgttctaatacacttcatgcatatgcacatgtcaatttcacataattttcacatgtcacaaaatgttaacattcttttgattttttttttcaaccatttaacagtgtaagaatgattcttagctcatgggttctataaaaacaggtgacagctggatttgacccatgggccatactttactgacctttgtactaaatcatgctctcgacccaatttacctttaaagttgttctgatgaacatatttcaacattcaaaaatggtatgtggattcatctgttttactgaatacttttacttttgattactgatctctgtcttggttaaagatgccaaaaacttaggcatgactcatcaggtgttctaccgtgaccttggctcccaggccagggaggatggcataaatagggtcagatggcatgttgtcgtggaaaccataatgatagcagctactaatgaagcagaactgactgtgtgtctggaactgtttgaagggctttagaacactagcccagctagtcaacacgatgaacctaggagaaaggtgctaacattctcattgtggacatagagaaactgaggcacaggaggctgactgacctactcaagatgatgtacagtccaagtgagagcatctgctcccacactcggttgggccaatccaggcaccacactgactcattccactacagaaaggagagttctcccctgccaacgactcatcctgagagagcagagcaatgaagtgaaactgggatgaaaatcatgagcaatgaaatgaaatgaaacttgtagagctgcttaatttaagagtaaacaaattctgccttaaatgccaaggctcctggcaagtgacagaaacccaacattgactaactgaagctcgcctaagtgggacgaccaaggtgagtgtcccaagagctgagcccagagactaaagcactgtcctcaggatgccccctccatcccttgccacctcatgtctctgccatctccattctgcttttcaggtcagtc

SEQ ID NO: 1882036 - DNA, 4001 bp, Homo sapiens
gtttggtcacaggccaaggcaattttaatctttttccctcacttcttttaaaagaaaaaaaagctaaagagcagacttccttctccttagcttgaactgtgagcaggagtccacgctttcctgaactaggaaggtgagttccaggaagttacccacacgatcaactttcaggcctcttgaatgcacacaaaaaatgtggacttgcctggggctccctgctggtgtttggagactaggaactaatcctcccattagttctttctctgccgcaccagggaaacatcatatatactagtgactttctgtcttctttatctcatcagtaaaaggcggatcctgtttttgttttcaagaatgtgttagggtattgggatggctagaatccatttggagcacatgagaaaatgtatagcattttctgtttaggagacatttgaaccatctaattaaaaaaaaaaaaaaaaaaagacttaagtccggatactagaccaccagttttttaatacatggaaaatttagaagcaatttcaaaaatgtctcactgtgactggaactaggttatgtcaatacaaggctcctaggggaaaaatttatactggataaaactctaaaataaatgaatatactaaaaaacaccaaaaatctggccagcagtggtggctcacacctgtaatcccagaactttgggaggccgagatgggcagatcacttgagaccaggagtttgagaccagcttgaccaacatggtgaaaccccatctctactaaaaatacaaaaaatatctgggcatggtggcgggcgcctgtaatcccagctactccaggaggttgaggcaggagaatctcttgaacccggaagatggaggttgcagtgggccgagattactccactgcactcccacctgggcaacagagccagaccctgtctcaaaaaaaaaaaaagaaagaaaatagaatggctgcaagaagtaaacagaggatgtttgctcctattttgttccttacaagtatagctaacaaaggaccttgtgagtattggaataataaaatgtcattcccatttaagttgcacatgtacatttttatacctgcaccaaaggtttttggaatctttgtctctggctgttggatcatgaaagacccctttggcttcagctgtaaaacaaggcaaattttacccataatagaaactactatatatgtgtgttggtttagggaagcctattttttaacattctatttcctgataaaaccttagaaaaatcatattgtgtttaaaagttgaggattttttcagcaactcaagggctgactgataatttctggttttgctagtacttgtctacaatggaagttggaagcttagtcggagtagaaaagttgtaaatttggtgtcatcaagacaaatggcttttatttcccaacagacttctttataaaataatttaaccccttgatttttgtttgcatttggatgcaatttaaaaaaaaatctggccctttaataagtgcaagacagattaaatgtattgtgaaatatcaggtcactgagtggaaagtttcttcactgatcatcctagcttcacatttttagttatgtgaagtacacattttgatagtattttggttttctcctgcctgaaatcttcagtcctcctccctggcagtctgtagaatgaagcagctgtggtccgtggccaagtgtgcgtcctttggtgatggaagagctgatctgcagatacctgcaggaggaagccatgcatgatgtctgctgggatatgatttccccccatactcctggaaaattagaaccgtttatagcagcctggttccaatacactggcagggcaaggattggctccttctcttacaaacacagcgtggctggatgcattcataaatgaaaaatgatctgagtgctgtgggtgggtggggctctggagctcaggaggtgaagccgggaggagagagagagaatctgctcctcagctccacagagcatggggagctggcaggaagttggagcacgcatggcgcagcttgtatttttgttgatagttaataacccaggactttaaagacctgaatggagaagggaagtgaagcacaaccaactttggagtctgtcccattccagaggctgctgaagcacagcagagcacgctcacctgaccagctcataaagcaggtaggacgggagacctgagtggtgaagagaatcacattttctctctgaacacaacttacaggtcttccaagggtttattattttttaattatatgagagatgagcaggtaataataacataaaagactcagcttgaattgtgctgatatctgcccaagcaagagttctctcagttactagtgtgatgaccaaatgacagttttattctgagagttgctttaaaaaaaaaaaaagaaaaaaagcatgcagcattgaagcttttttaatttaaactcatttaaaaattggcagatgataaatgaactgcagacactgtgttttagaacaaatactttgaagggagtcaaccagaaaccgattttcaggcttgactgtggctccattttcatatttcagagccaacgaggtgctcactaatttttgctggcttttgtaagaaaggaggtggatgtataacagctgtgaaatatccagaaattgactgggatccagagtgaagcccgaatgcactaatgttttctccattaaggcaggctgcctctgctcggcttctaagtcaagggattggaaagcagtgtgaaagtgaagtgtgaatcctgaatatttgtcatggagtggggggagtgcagagggttggaaactgtcacagtgacgtttcacactcagaagtagaaaataaatggggaggaccatgggtggcagccacatgcaaggataattttaaaactgatttttgattcccatgattgtagccgagtctcagggtgttccttccgttgtcaaggtttggggcttgtgataagagaagtagaacagaataaagatcatctccagccccaggttctgaatcatttctaggccttgcttctcctgggcactgggatgatctgacatgttttccctcactaatgaagtggccagggtgttgggggattgggctaacatggaggaggttggatagaaatggtgcgtgtggtcagcctgagaagaacgtcagaggtaggtggagaattttgtttcggtagaatagcccagcctgaatcctggaactgtttgcgttgaggtttggagaatgccccgtagccacaggggtgtgtctgaaaaggcaaaattgggagctgcttgggttactgcttactgcctggctggcatcctcatgctgtggtcatcctcatgccgtggtggccacgttttgtggctttgcattttagtcctggagggctgggggatggctgtgtttagtcaagcaagcccacacatcattgctagtctctctttccgtgtgatttctcagcattacacagctagccttctatgggaggaggaacggcacctcctgtggtcttttagaaaactttttcaccccatgttcctaccgtcgccaccccaactcttgtcctttcttgcctactgttcacctgttgtgtgtgtcccctttgtctcccatccttcagactgatctgtcccaggtgctatctgcagtgacttagaagctgtgttggggacaggttccttcccagggttcctgctggaagcggtgttcagcaagctatggcccttaggcaaatccagactgccctagcctgtttttgtatggcctgggagctaagaatgtgttttatgttttgaagagttgaagaaacaaagaagaatataggacagagatagtgacccacaaagcctatccgatctttagaaaaaaacatttgctggtttgctggttggtctgttgatttccgcccccatttagagacagagtttcactctgttggccagattggtgtcaaacttttgacctcaagtgatctgcccac

SEQ ID NO: 1882037 - DNA, 4001 bp, Homo sapiens
caaaataaaaatatattgtgtcacaaaacaatttggtcctttgagcaccaatgttaagtaagaccttatacaggaaattagtgaaatgaacatgaaacttgtcttttaggagtacataatcaaataggagagagtaagcaaaaaggtaaataaagctgaaaatgacaagtaacaccagtgaggcataaagtgcactaacgttgagagcaggaaatctcggagctaaactgctattttaataaataataattgtaaaaggttatcagaaaaattttaatgagaagattcatgtagaaagaaatattctaagataagtaatcaaatgattttccaatgtgtgtcaaaataacaggatacgatgtacttggtgtacatgaaattgaaacacatttgcatatcatctgatctgcagttttttgcaggcttttgttgaaagttgacagaagccttccaggtgtcagtgttttccccagatatattttccattcccacatctccacacagtgagaatgacattatatgctaaaatgacattgtcaaattttagtttaaaaaggatccttatgaatctgccaaatacttttaactccagatataacttccatcagcaaatgtaacatgaaaaataaatatgggactgggtttcacaggccatgtgttgaacatttgggaatattcatcttccagagagttccatgttagtgctcttctgtggttaaaacgtggatgttgtgctctaaaataatgtgtggtacctttctaaagaacaggatttagttaataactaaatcacaatgtgaaaaggagggttggtattacatggtaaagctgtttgtgttttaaagcaattcatggttcatactttgcttttcttttgctgtcttatacagttaaagtttattttctcagtgtttgttttactttatccaacaagaattcagaccccttcaagtttagtacagtagtccccccttatctgtggtttcagtttccatggtttcagttacctgtggtcaaccacagtccgaaaatattaaacggaaaattccagaaataaatgattcccaagttttaaattgtgtgccattctgagtagcatgattaaatcctgtgccatcccactctgtctcacccgggatgtgaatcatcctttctccagtgtatccatgctgtatatactacttgccccttagtcacttagtagccatctttgttatcaaatcaactatcacactattgcagtgcctgtgttcaagtaacccttattttacttaatagtggccccaacccacaagagtagtgatgctggcatattgttataattgttctattatattactagttattgttaatctcttactctgactaattataaattaaactttatcatggggtatgtgtgtataggaaaaaatcatagtatatagagggtttgatactatcctcagttttagacatttactgggggtcttggaacatatcccttcttggataaggagggaatactgtattggattgtctttgacttctctactgaaagaaggtcttcttccccaccctttgaacccaagtaattcctacttaagactgaacaaaaatgaaactcaaaggaatacagagtcaataccaaatattttatgagcaaaagatgggtgcaggctatggaagaatagacttggggctacatattaaaagctgctaatcattctaaagacagaccctgaaaatctgtcaacaaggaagctgaaaagctgtcatcctgggaggtatccaaaattggaatgaggaaattcacacaggtatccggagacaagaaccagggttcagacctagggcaactcggcacattctgccaaacccttcctcctcacccagcactgtttccgtcggtcaccagcatgttccactgctttcactccatagcatcacaaaggtgtcattcagtcttgaacatacctcatcctttaaggctctgctcagaactacactccaccctgattccttaccttaagttcctaatgatctttctattttgacttcctgtgtcattttcaggtctgttctgcacaatggaaatgagtgtataaccatttgtgctgctaaataaacgtggaacacaacagttaataaaaagagattgaaagacagccttagaaaatctaaggtgaagctgggcagaaaataaaggtcaggcgtgtgagtgggccaggcccagtgatagctcagttgcaggtaatgccaaagttaagcctggaactaatgaagccttctacaaaagaaatacttttaaaatactgatgctaaatgctaaggtcaaagcaacagttcagaaccaacaacttagacaaggccaagaaggcaggaaagtactgaatatttgagcagcaacagaatggggatccagagaaattccaagaagtcaactttcagatttgtgtaaaggataaatgacactgtgtatctaaagtaattctcccattcctttacttcggcagcctcactctttcccatctccccccagaatcttcgcttttgacctctcccaaggaacctttcttatctgagtcctatttaatgtaagccatatcctagtagaggccactgaacatcccatggccttcttatatccacaatggggcagtaaccccctggaggcagagatatttttattcttctgctccttattcacaaacctaatctagaaaaaacgaatgtagaaaagcaagggatttttgctgttttaaagtcaggttattttttaagtagttagttagttggtttgtttgttttttgagacagggtctcactctgtcctccaggctgcagtgcagtggtgtgatcatggctcactgcagccttgacttcctggctcaggtgatcctcctacctcagcctccacagtagctgggactacaggcacacaccaccatgcctagcttttatgcagtattaaggtattattggacacattatttataaaggaatgaatatctccattattttcagctcagtccttcctatgctttgatttgtctagttgcctttattgtgcttcatagatgcctgtcctagcatgaccccctgcagagttatcacacaactgtttttgaataattaaaaaaactgtaaacatttgtttcacatattccacacttatcccccacctgcagccactagttggcatttcgttctcctttgaaatagaaatttttggtccacagaggcttatcagagtgaaacacactttctttgctagtgcattcagagagcgagatcagcagtaactcgcctgttattttttttttttttagaaattttatggcactgctctaaaacccaataaaactattaatggtcatacaaaagtaaaacatttaattttaaattttgattaccttttagtgaattataaatacaaagtgttcaaccacaaataacacacattacaaataaaacaagtaagtaaattaaaattgtaaacaaataaatggataaaacccaaaagtcagtcaatgctagaggaataggagaaaacaaactgtgttaagctttgtggagctctgctctagttctgctcctgcttgctacagatattctcttaatggtcccctgaaactctttattttaataatcgaacaccaaaagttgtttagcagcatgtgtggccacaaatctaagaaagtacattccatgcagctaggtatggcgagtttcagcccttgatatatgactgtaagtagtgtgtgacaaatctttggacttcaatctttggtgacactctctattccccttaccccattcctatgggttggaacatgatcatggtactagtgaccatgtagacaaggacaactgatgcaactgacattaaggagaagaactcgtctattactgtgtctgtagcaaaagagatacataaatattaatcttatttaagtcattgtactaaaaggttcccattgtttcagcaacttagcttttaccctaaacaaaacatccac

SEQ ID NO: 1882038 - DNA, 4001 bp, Homo sapiens
ttcaaaatgtctgggggccgctgggaaggccagagggcctgatctgggctggaggatgagagacggaaacggggtggggagtatcccgtctgacaatttggcaacacagacaacagtgatggagccagaactgggtgtctaggcagactgagcccggcgggggggtgggggaagaggctggtgtgggaagacagggttctcagggcgaaggccaaccagcacccagagacaggaggggcaggctgcatgctcccctttcactcctcccacaaaacatcagcttccacctactctgtgccaggccctgggccaatcgctcactgtctgaagtgggtaagagaagaacagattcagttcctggacctcaagtagtggggagaggacttccagcctccaaggactgactatgtgaggagggaagggacactgcctaggccttgagaaatggggaacagatggacatcagaaaggagactgcagagggtatcccaggcccagggacccacacagacaaggcagagcaatgtgctttcaggacagtccatgtgccaggagccatgggtgtggtgggaaatgtagactgaggcaggaccatgaagggcactgaatgccagggtacagggagccgaggctttaacttgtaggaactggggtccatcaggggctcccaggcagaggcaggagcaggaagtgccaatctaaggggaagagcagcatggcttggaggggccaagtctattatcagagagagagtgtcagagagccagaggccagcaggaatgaaagaccctggggaggaggcaggagggaggccagagctgggatcaagcagccatgcactttagccttctcccggtctccattgccaccaccctcgcccctgccaccctcatcctgtggcctcatcaggcctccctgcagtttttctgtccccagaggcccaagtgaccgttctaaactaatcacatcatggcagtcccttgcttacagtctctcgtggccatgataacaacgttttgccctggcctgcaaagggccctcgtgaactgtctcctgcccatcgctctgacctcacctcctaccactacttcctgccctgcccccagctcaccccagggcctttgcacctggcttttctgcagccctgcccccctcttattactcagggatgaggcattctcttcagggagccactggatgtcaactcgcactgctgaaatgctctgtatcaccatcaggagatcaggaaccattctttcctgttcactgtgaaaccccagcatctgcaggatgcctggcacatagtaagtggacacaaaatatttttcaaatggccacaatccaaatatgccacgaccctgggcaagttatccaaccctggcctttcttctgataccagccagtggttgcaaggaaagtggacggggaagagagctggcaaaggtaaaaccacaagagttgtgatgcaggtggacctggaacgcaactcaactcggccttggaggtgctggagggaggcgccacaaggggaggggtggggcttcagaatctataaagctccgttcaaaccccagcttcagcatttaccagctgctgaccttgggcaaggtacttagatctctgggaagcccagtttcccttacctgtagaatgggccgaagcattacatgaggaaatggatgttatgacattttacccagtacttggcatacagaaagtgttcaacaccagataactattaataatggtaaaaaagataagaaaaaggaggctgtctgctttcatcactgcactggtccctggcctttcagctggagccccccacctcatcagcccgccccgtgtccccatttccggatacagacccaggcttctatgggctggctatgtcccctatgacccctgctgacctcgccccatctgctgactcatattctcctgcccagaacccccctccccgggacccggccccagctccacactgtcgggggacccccagccctgcagccccagaaaccccgccccttacccaccgacgtagaggacgccctccttggtcttctccgccgcctcggtgaccccctgcttggttttctccgcggctgccacaacgccctccttggccatggacaggcccttcatgaacacgtccatcctggcggcctggggagggcgatacacgggcaccggtgcactggccccgcactctcaccccagcccctcccgcgggacgcagatgcccccctactcccgagaccgcggcgcccttctggaccctgagccccctcccgctttccccccatcccaccccactccccagtgcgaagcctcagggccgcggagagtcctagcgtccttgaaacctggggacgcgggaggggccactgcctcggttatccgggccctgcaaactgcagccccgtcgaaccggagtgctgggttcggcgcgaatatccaggacccgcctgtacacgcacggcacagtcacacggtcatgcacacaaacatacaccacggacaagctcacgtgcacacacaggacacgcagacgctccaacgcgcacgaataccccgacccacatgggcgcggacacacgtccccacagccgcccgggcagctgcaaacaccggagcatactcacatactccggggtgcacactgacgcgcatcccccgggtctccctccattttccatccccttccccagctccctcctgtcgccccagtcccctctccatcctcatcccgttccccatccccggcgcgcggccgcctcacctggatgcggggccggggctggggatggagcggcggctgcggcgggcggacgcgggggctccgctaggccaggccggggtggaccaggggccggaggggggatagggccgggatcaggcgctcgggtcgcgggtcctgagcaggagcgcagcagtgcccgggtctcgggtgcgtagccagccaccgctcgttcctcgcgccctgcgagctcgcgcgctccggctccggctccggctccggcgctgcggcagctctgagctcagcgcccccgctggcggccgcgccgccccttcggcctgactgacagggggcggggagggtgacagcgcgtagccgatgagcctcccggggcgggcccgggacgcgcccctgggggccccggccgtaagactcgcgtagtctgttgggagttgagggagggggacaacgcggcgtgtgaagagtggggaagaaatcacgcgactggatttggagttctgctgggctcgaatctcagctgtgctttttattaaccgtgggaccttgagctactcggctctcctttctgaatgacagtttcctcctctgtaaaacaggaatggttaattcaacgaatgtttactgagcgcttagtccagtggtgcaggtttaaggctggaggcagcggaaaaggaaaacaaggttcctggtctcgggaagcttaccatgggggtgtctgtacgcgtgtgtgttcgtgcgctcagtggtggaagacaggacagaaaataaacggatcaacatccaaagcaacaaggtcattacagcttgtaagttgtgaaggtaacggtgatgtaacacggggactagaggaggggtgcttgagacagggtgctcagggaaggcctctaccagcaggtgaattgtagcagagactccagagaggcaccatgacaccacgatgggtgaggacaagatccatagagagtgcaagtgcaaaggctccaaggcaggactgtgctgacaaaagacagcgcagctggagagccaggatggagggaggtggagaacaaaaccacttttttgtgtgcttacggtggggactgtcaaaatgatcacagaatgccaggcacacagtaggccctcagttggttctatgatagaattatgcccaagaagctgtagtatcccagaggaaagggactctgacaacttaggggagtcaggaaaggacataaaaaagaggtgacaactgaactgtggcctg

SEQ ID NO: 1882039 - DNA, 4001 bp, Homo sapiens
gtgaaattgacagtaaaaaaggtttttgactctgtctaaaataatctactcacccatcaagtttaaaattaggtaagctctgatgcagctttgaggatttccaaatattagaaagatcatgctaatgaggagttataaatgccacataaaagacttttggcatttttatacatagcttgataatagaattgaatgctttcttcaataaggacatgacttccactagtttttagaggggcacatgacattccaggattctggggaaattcctggagacacactcagcagcctgaataaagtctgtaaattaggcccattagtggtgtggagctattcactaggagagctgatgcccacccacattcccattcagatcccaggaaagacgctttggtggaacaagtgattacaggaacagttccggcaatttagagacatgttcatcatgaaaggcaaggtctgatcaacacatgtcatcttactgcatatcaatgatcttttaatgtgatcatgattgtatttgttattaaagctcataaaaatagggaagtagtaacagattatcactgatgcggtatgtgcaagggaaaatgtcctcggttgttaaactctggtattagaaaagagatgaaataaactaaactctggtattagaaaagagagatgaaataaactgagtgtggtatgtgctgtctgttgcccatgaaagactggatgtcctcatgatcagggagacgagctaatgtcattctctgcatatggcattgaagaaggagggcgatgcatgaaaggaaatagggaaaggaaatcatcaaaataaaagttctgtctttggcggtctgattagtgtcatgacgctggtggtgtcaaatgaacttcactgaggtggagtatagcttttatctgtattacagtttccccaaatatttcccttgcttcacgttgttcaaagaaatgtgcatgaaaataaggtgtgctacgtttttatcagggctttaaaagccaatgtgaagttggccataccctcttcccatttctactgctctagagaagtggaagcctgttgaaaaagcagcctgggcctctggttggctgcaattagcagaagcccctgatctctgttgtaaaggcagcctaagttaaaaagggtctcttctttgttaagcctgtgagattcaaagaccaacatctgaccctaccacgccctaccgatattggcttttccaataatatatgatgttaactattttgtcatatgctcattttccatctgtatatctttctgatgagatgtttgtaaagatttctaccccattttatacttggatgactccttttcttactgttgggttttatgagttctttgtatatttttaagaactgtcatttgtcagatatttcttttgcaaatattttctcctactctgtgacgtgcctttttattctctttacagtttcttttacagagcagaaaatttcaattttaataaagtccagcttattaatatattttagtgaatcatacttattgtcaggcctctgagcccaagccaagccatcgcatcccctgtgacttgcacgtatatgcccagatggcctgaagtaactgaagaatcacaaaagaagtgaatacgccctgccccaccttaactgatgacattccaccacaaaagaagtgtaaatggccggtccttgccttaagtgatgacattaccttgtgaaagtccttttcctggctcatcctggctcaaaaagactcccactgagcacctttcgacccccactcctgcccgccaaagaacaacccccctttgactgtaattttcctttacctacccaaatcctatcaaacggccccaccccatcttcctttgctgactctcttttcggactcagcctgcctgcacccaggtggaataaacagccatgttgctcacacgaagcctgtttggtggtctcttcacacggacacgcatgaaatttggtgccgtgactcggatcgggggacctcccttgggagatcaatcccgtcctcctgttctttgctctgtgagaaagatccacctacgacctcaggtcctcagaccgaccagcccaaggaacatctcaccaattttaaatcaggtaagcggcctcttcttactgtcttctccaacctctctcactgtacctcaaccactttctcctttccactcttcagtctctcccttctcttaatttcaattcctttcgttttctgggagagacaaaggagacacattttatccgtggacccaaaactccagcgccggtcacggactgggaaggcagccttcccttggtgtttaatcattgcagggacgcctgattattcatccacgtttcaaaggtgtcaggccacgcagggatgcctgccttggtccttcgcccttagtggcaagtcccgcttttctggggaaggggcaagtaccccaaccccttctctccttgtctctaccccttctctgcttttctgggggaggggcaagtacccctcaaccccttctccttcactcttagcggcaagtcccgcttttctagaggggcaagtaccccaacctcgtatctctgcgccccaatcccttatttctgcgccccaacctcttatatctctgtgccccaatcccttatttccacaccccaacctcttatctctgcaccccaaccccttatttccgtgcccctaccccttatttctgtgccccaacctcttatctctgtgccccaaccccttttcccacttttctggaaggtgagagagtagagaaacggaggggaggggttcgggggttcttttttctctaggcttgcttccttcactataggcaaccttccaccctctattcctccttctactcccttggcctgtgttctcaaaaacttaaaacctcatcaactcttacctgacctaaaacctaaatgccttattttcttctgcagtgcctcttgaccccaatacaaactcaacagtagttccaaatagccagaaaatggcactttgaatttttccatcctgcaagatctaaataattcttgtcgtaaaataggcaaatggtctgaggtgcctgacgtccaggcatccttttacacatcagtcccttcctagtctctgtgcccagtgcaactcgtcccaaatcttccttctttacctcccacctgtcccctcagtaccaaccccaagcgtccctgagtctttctaatcttccttttctacagacccatctgacctctcccttcctcccaggctgcttctcgccaggccgagctaggtcccaattcttcctcagcctctgctcctccaccctataatctttttatcgcctcccctcctcacacctggtccggcttacagtttcgttccgtgactagccctccccctcctgcccagcaatttactcttaaaaaggtggctggagctaaaggcatagtcaaggttaatgctcctttttctttatccgaaatcagatagcatttaggctctttttcatcaaatataaaaatccagcccagttcatgacttgtttggcagcaaccctgagacactttacagccctagaccctaaaaggtcaaaaggcagtcttattctcaaaatacattttattacccaatctgctcccgacattaaataaaactccaaaaattaaattccggccttcaaaccccgcaacaggatttaattaacctcgccttcaaggtgtacgacaatagaaaaaagttgcaattccttgcctccactgtgagacaaaccccagccacatctccagcacacaagaacttccaaacgcctgaaccgcagcggccaggcattcctccagaacctcctcccacaggagcttgctacacctgccggaaatctggccactgggccaaggaatgcccacagcacaggattcctcctaagccgcgtcccatctgtgtgagaccccactgaaaattggactgttcaactcacctggtagccactcccagagcccctggaact

SEQ ID NO: 1882040 - DNA, 4001 bp, Homo sapiens
ttgtggggcattgggggatttatgttctgccattgaatgctcctcaaattcctctcttcctattaacccccaaatcatgtaataatcctcaagctctgactatcttagcaaatgcagtacagtaagaacataatgattagtatataagctaagtctatgtggcttaggagacatgataaccaagaagaagaaaaatgctttaaaggattatcctttcatgcaactacttaggtattgaaacagctgaacaaaaggtagcaaaacaggcaaaaagcaatagttttctgtcctgtcatgacaactcttactttgaggatctgaaatatcttttgcaaatttacagtaccatctgcacattagggaaagttatgtcaggtgatttacagaatgcctgaagaaaggcaaagaggagcatcagacattttgtccttttccaccctctaaagttgagctggcagggtgtggatatggggcagcaactcaggctcatgtgtggtgggagtactcccgagacccattgtggagcccttagcaatctgagctccccacaggaggcaaaggccccactgtttctccctgactgtacagggccacactggaagctactcgcctctctgcttcatctctaatacaaccaggcttatggtggtaattttagagatggactaccaccataagtggatgactgatgctttcaacaccagtggattctaacagtgtttggcaactaccgggcaactaccaggccagaactggcattggggctttcctggatagctcttttccagagtgacaaaccccaaagggacacgggtcagcaatgaaggacatggagatgatagccctaaactctagggccagcctggaacatcatctggattgtttacataggcttttaatcccaaggggcagttacaggtacttagagaagcattaaagcctccagcttcccactgaacacaccatctatctattcactccatatggaggctgcacattgcatgcagggcatgtactgttctcagccttcagagatctagatgaaccaagagtccaccatccaagagcttcatctcttcaaaatgtagaatcattaaagagcctttaaaaaacaccaattgctgtgctcccacccaaaagaattggattacaaattctgtggatgtggtccaggcatttttcttttttctgaggtggagtttcactcttgttgcccaggctggagtgcagtggtatggtctcagctcactgcaacctctgcctcttgggttcaagcaattctgcctcagcctcccgagtagctgggactacaggcacacaccaccatgcccagctaatttttatatttttagtagagatggggtttcatcatgttagtcaggctgctctcaaactcctgacgtcagatgatccacctgccttggcctcccaaagtgctgggattataagcttgagccactgcacccagcccaggcattttttttttttttttttttttttttttaacaaatcatagttgtcaggcctctgaacccaagccaagccatcacatcccctgtgacttgtacgtatacatccagatagcctgaagtaactgaagatccacaaaagaagtaaaaataatcttaactgatgacattccaccattgtgatttgtttctgccccaccctaactgatcaatgtactttgtaatctcccccacccttaagaaggtactttgtaatctccccaactcttaagaaggttctttgtaattcttcccacccttgagaatgtactttgtgagatccacccctgcccgcaaaacattgctcttaacttcaccgcctatcccaaaacctataagaactaatgataatccaccacccttcactgactctcttttcggactcagcctgcctgcacccaggtgaaataaacagccatgttgttcacacaaagcctgtttggtggtctcttcacacggacacgcatgaaatttggtgccgtgactcggatcgggggacctcccttgggagatcaatcccccgtcttcctgctctttgctccatgagaaagatccacctacgacctcaggtcctcacaccgaccagcccaagaaacatctcaccaatttcaaatccagtaagcggcctctttttactcttctccaacctccctcactatccctcaacctctttctcctttcagtcttggtaccacacttcaatctcacccttctcttaatttcaattcctttcattttctggtagagacaaaggagacatgttttatctgtggacccaaaactcctgcaccagtcacggactgggaaggcagccttcccttggtgtttaatcattgcagggacacctctctgattattcaccatttcaaaggtgtcagaccacgcagggacgcctgccttggtccttcacccttagcggcaagtcccacttttctgggggaggggaaagtacccctcaatcccttcttcacccttaggggcaagtcccgcttttctgggggaggggcaagtatccctcaaccccttcttcacccttagcggcaagtcccgcttttctaggggacaagaacccccaatcccttatttccatgccccgacccctttcccacttttctggagggtaagaacccctgaaccccttccctccatgtctctatgctctcttttctctgggctggcctccttcactatgggcaaccttgcaccctccattcctccttcttctcccttagcctgtgttcttaagaacttaaaacctcttcaactctcacctgacctaaaatctaagcatcttattttcttctgcaatgctgcttgacaccaaaacaaactcgacagtagttccaaatagctggaaaatggcactttcaatgtttccatcctacaagaactaaataattcttttcgtaaaatgggcaaatggtctgaggtgcctgacgtccaggcattcttttacacatcagtcccttcctagtctctgtgcccaatgaaactcatcccaaatcttccttctttccctcccacatgtcccctcagtcccaaccccaagcgtcactgagtctttctaatcttccctttctacagacctatctgacctctcccctcctagccaggccgagctaggtcctaattcttcctcagcctccgctcctccaccctataatccttttatcacctcccctcctcacacccggtctggcttacagtttcattccgtgactagccctcccccacctgcccagcaatttactcgaaaaggtggctggagctaaaggcatagtcaaggttaatgctcctttttctttatcccaaatcagatagcttctaggctctttttcatcaaatataaaaattcagcccagttcatggctcatttggcagcaaccctgagacactttacagccctagaccctaaaaggtcaaaaggccgtcttattctcaaaatacattttattacccaatctgctcctgacattaaataaaactccaaaaattaaattccggccctcaaaccccacaacaggacttagttaacctcaccttcaaggtgtacaataatagagtagaggcagccaagtagcaatgtatttctgagttgcaattccttgcctccactgtgagacaaaccccagccacaacttcagcacacaaaaaattccaaatgcctgaactgcagtggccaggcattcctccagaacctcctcccccaggagcttgctacaagtgccaaaaatctggccaccgagccaaggaatgcccacagcccgggattcctcctaagccgtgtcccatctgtgtgggaccccactgaaaatcagactgttcaactcacctggtagccacttccagagcccctggaactctggcccaaggctctctgactccttcccagatcttctcggcttagcggctgaagactgacactgccagatcgcctcggaagccccctagaccatcacggatgccgagcttcgggtaactctcacagtggag

SEQ ID NO: 1882041 - DNA, 4001 bp, Homo sapiens
tctgctccccggctccttcagctgtactcactctttgttgagtctcccacaattaccgttgttcctggcccagacttcaatctggcctcccacattattcctgataccacacctgacccccatgactgtatctctctgatccacctgatattcaccccatttccccaaatttccttccttcctgttcctcaccctgatcacgcttgatttattgatggcggttccaccaggcctaatcgccacacaccagcaaaggcaggttatactatagtacaagccactagctcgcctcttagaacctctcatttcctttccatcatggaaatctatcctcaaggaaataacttctctgtgttccatctgctattccactactcctcagggattattcaggccccctgccttccctacacatcaagcttgtagatttgcccccacccaggactggcaaattagctttactcaacatgccctgagtcagatagctaaaatacctcttagtctaggtagacacttccactggataggtacaggcctttcctacagggtctgagaaggtcaccacagtcatttcttcccttctgtcagacataattcctcagtttagccttcccacctctatacagtctgataacagaccagccttcattagtcaaatcagccaagcagtttttcaggctcttagtattcagtgaaacctttatatcccttacggtcctccgccttcaggaaaagtagaacggactaaaggtcttttaaaaacacacctccccaagctcagccaccaacttaaaaaggactggacaatacttttaccactttcccttctcagaagtcaggcctgtcctcagaatgctacagggtacagcccatttaagctcctgtatagatgctcctttttattaggccccagtctcattccagacaccagaccaacttagactgtgccccaaaaaacttgtcatccctcctatcttctgtctagtcatactcctaatcaccattctcaactactcatacatgccctgctcttgtttacactgccggtttacactgtttttccaagccatcacagctgatatctcctggtgctatccccaaactgccactcttaactcttgaagtaaataaataatctttgctaaaaggactatgctgaatctccttaggcactctctaatcagatatcctgagttgtcccaattcttagaccttttatacctgtttttctccttctgttattccatgtagtttctcaattcatccaaaaccgtatctaggccatcaccaatcattctatatgacaaatgtttcttctaacagtcccacaatatcaccccttaccacaagacctcccttcagcttaatctctcccactctaggttcccacgccgcccctaatcccgctcgaagcagccctgagaaacatcgcccattctctctccataccaccccccaaaaattttcgccaccctaacacttcaacactattttgttttatttttcttattaatataagaaggcaggaatgtcaggcctctgagcccaagccaagccatcacatcccctgtgacttgcacgtatactcccagatggccggaagtaactgaagaatcacaaaagaagtgaatatgccctgccccaccttaactgatgacattccaccacaaaagaagtgtaaatggccggtccttgccttaactgatgacattaccttgtgaaagtccttttcctggctcatcctggctcaaaaacacccccactgagcaccttgcgacccccactcctgcctgccagagaacaaaccccctttgactgtaattttcctttacctacccaaatcctataaaatggccccacccttatctccctttgctgactctcttttcggactcagcccacctgcacccaggtgattaaaagctttattgctcacacaaagcctgtttggtggtctcttcacacggacacgcatgaaatttggtgccgtgactcggatcgggggacctcccttcaacattcccactgaagaaataagaaaaagcacagcaaattaaatccaaagatgatagaaggaaagaaatgatgtaaacagaatgagtaacatacaaagaacaggagtagaaaacagaaatatttaaaaccaaaatctagtgttttgaaaatactgtaaaatggacacacactaacaaaggtaatcaagaaaaagacaaaaactgtgagaggataattattgttgttgctgctgttatggcagcacagttacgggagtccatttttgaacacaggctcccaccttcaacttatcacttccttatctttgcttgggtgcccgatgactttaaagagactgtttctttgtagaaggtggaatgagcttaaaggtgagagtcatgttttggcattcagaccaggtattaggctttctcctacattaacaaatgaataatgttaggaatgcatggaaggtcacagctgcacctggaggggagagtatgaaaaccataacttaataacatgatgccaatacatctgaaagcatagaaaatagaatcgtacaatatagataactacagactaaatggataattttctagaaagctaaaaaatagctaaatagattccagaagatgcgattacctagataacctaaccatcgttaaaaaacatttggaatagagagcaaaacattttatcttaaccttatctttcaccccaaaatgataccagggccagaaggcttctggctgtgtgggagtaaatcattcattgcatgagtcctcccttatgctaactgttccacaaagtagagtaaaatttctttttatgaggctaatacaaccttgataacatttctgaataagaactgagtaagaaaattacataccatatgtaccatgaagtagatacaaaaagtctaaatttaaatggggaaattggattcagcagtataattatgaaaaatgtcttcaagacacactaggatttgtctcctaaaaacaaagagtggcataacagtgggaagtctatcaattataattcaccacaacaatgagcgaaagaacaaccaaatgaacatatcgattgtaaatattggaataaaattcaaaactcactttcaatttttaacaaatgtagaactttagtaaagtagaagatgagaagtatttaatcaaaacacatgcaaaaaccatttgtaaatgggagaattcccattaagtaaagaatattatattttctatcttcactagtattaaatatttgagtaatatgtgatataatatataatatgactgaaaaagagtatgtaaggagtgaaacagaaggacccaatgtgtcataattgtagactgttgaaaatagtctacaactgagagagttaacagataaattaaagagcaagatgaatttataagatgaacatataaacatcaataacagcataaattatttgttaaaattatactaggaacaaatattcacaatagcaacgataatatatttaagaatgaacccaacaaacaaaatatgtacaagcacttaatggatgatactgcaaaattttgccaaaggataaaagaaccgaacataggacaagtaacattaataaatgggaaatctcaatgatatgcagtcattaactccaaaagtaaaattataaaattcttacagaagaataaacatcccagaataacaatgcgcattttgaaaaatgtaaacaatgagatgaaattgacaacaagtgttaagacatactataaaattatattaattcaataaagtataatatgggtaaagtcatagagaaataattataaaagtgtatttatttctacctgtttgtctaactattcatacatcccctatctagcatttgtatatatgcacaaaaacatgaagtagtgtttacttcatattaatgattggttttcccggatgatggggtttagactcatattgtctttcgccattttggtacttttcttcactgcttaaatgct

SEQ ID NO: 1882042 - DNA, 4001 bp, Homo sapiens
acagtgctggatgcccaggtgcactgctgctgagagtggaaagttcccacagagaggaacgcctgcagccggtggggaagcggaattcctaggcagagcgcagcgctcatttgcacacattagcctttcagatctggacaccgctcatgccagacccagtcggcacagaacagctgctggggcaggactccgtgtccctgagctcagagtcaagggcctggcactcggggtcccccccggctccctcctgtcccgaagtctcttccttcacagtccctggaccccaccggcaggtccacagggaggtgcagggccgtcgtcacctcatcactcccgacttcacggagtgtctgcacctgacgctgagccgcggccttccctgtctctgacctaacccttccgcgagtgccagcaatcgggaagagcagttgttcacggagccgcttgggaactcaccccacctgtgccgaccccagcacaaacctcaacctcctgcaggcggggctggctcagcacagggtagggggtgacttgccagagcccgggcaggatttgtctcccagcccggtgcaccacggccccatccaggattcgtctcccagcccggtggaccacggccccatccagcctgtcctggccactgctctgtgacctcccagccctggggccctgcagaggcacttgggcgcagacagggcaggcctgagacggcacctggagggaggctggctgctgggacactgctggggaccagtgctctcctccctgtccgagcggggccaggtgtccccttcaggcctggcctctgaccctggcctgtgaccctgtagctcacgcacgaggacatcctgagttgacccaacctgcccgagtccagctgcttgtccagactcctgcgagaaaacccagagcggaagtgaggactcaggtcagcacccccataggaagggggacccggggtggacgcggagctgagggaatggcattcctcagcagtgctgtgggtggtgcagccccctccgcatccccctgggacctagcaggaccccacatgctcacttccggcccccagctgtccctggctccagccctggcagggcccctgtcttcttggggtgtgtgttggattttaggtgtgcggaggccacagatggtagtaagctgggccctgaggatggcttgggagatgtgcagtggggcggggcccttgtcttcaagccacatctccctgtgggagggccctgaaccagccaccagcaaggccgtgtggacagctgggaccaccaggctggaccccagcagagcgctggtttcagccgcctcctgcccccggcccctgccttctgggaccctcacctcacccttgcccccgcctccccaggggcaggacccctcctcccagttgagaacctagaggcctccccgttgggggtcgttgtggggaacccagaggccagtgagcctgaggcctcctgtccctttgcagtcggacatcattgcgggccgctggcacgcgccctgcagccggcgctcggtcccgtgggtgtctgtgctcccctgtgggcaacgtgaccctggcagcgcccagcagtgctcagtctgccgtgtgcacacagagccccgtgctgcccgctcgccgtgcttggggggcttgtgtgagaggtgtggactgtggggcctgaaatgtgctccgggggcacctgcggccaaggcccccttccgaggtcccgctgcccctcccagactgcaccgtcccggatgccatcgctggggccccaccccgcccaccccaccaagaccttgcaggaccgagcccgcagccccttcatgtgctaccccccgcccaccccacagagaccttgtaggatggggcccatagccccccaacgtgctcccccaggcacaggctgtcctggggtcaatcgggctgtgagggagacttgtcttgtgatggacgtgaaccctaacttcctcccagaaaaggaagccaccaggttcatgggatgtaatacggagcaagagtcaggatgctggagtgctctgagtcaccgttgggtggccactccccacccgcagcccacctgggcagggcgagccagggacgcaggcgacagctttgggtggaagacaatatgcaaatcaggacatttttcctcgtggttcagaagtgcttccttgacagggcttcagccaagccccaggcagacgccagagccgcagatgcagaggcccaaacagcctttgcttgccaggaaatgccccctggatgtttagatttcgggaataatattttcaaaaatcaatctctcatgcgtctgttgtttcggctgtgacaacaagggtgttttccttggatgtgtgcacagggcccccagctccctgcagcagagtaagccctcggcagagacaaagtggactctgtcacagccctaacaagccgaccacctgctggctcgccacttcctagccgggcctttctccctgagtgttgtgtgttagtgattctgtgactctgcctttctccctgagcgttgtgcgttagtgattctgtgagtctggcttttctccctgtccgttgtgtattagtgattctgtgactctgcctttctccctgagcgttgtgcgttagtgattctgtgagtctggcctttctccctgaacgttgtgtgttagtgattctgtgactctgcctttctccctgagcgttgtgtgttagtgattcggtgagtctgactttctccctgaacgttgtgtgttagtgattctgtgactctttctccctgagcgttgtgcgttagtgattctgtgagtctggcctttctccctgagcgttgtgtgtcagtgattctgtgactctgactttctccctgagcgttgtgtgttggtgattcggtgagtctgactttctccctgagcgttgtgtgttagtgattctgtgagtctgactttctccctgagcgttgtgtgttagtgattctgtgactctgcctttctccctgagcattgtgacttagtgattctatgagtctggcttttctccctgagcgttgtgcattagcgattctgtgactctggcttttctccctgagcgttgtgtgttggtgattcggtgagtctgactttctccctgagcgttgtgtgttagtgattctgtgagtctgactttctccctgagcgttgtgtgttagtgattctgtgactctgcctttctccctgagcattgtgacttagtgattctatgagtctggcttttctccctgagcgttgtgcattagcgattctgtgactctggcttttctccctgagcgttgtgtgttagcgattctgtgagtctgacgctgcacaggtgggcgatgctttgctccggccggctcacctccccgatgaaagcccgctcaacggcatctgcagggcactgcccaccccaccgcggggctgagacaccttccctagcacggcctcgcgtctacagaaagccgctgagaaggcaggtggggtccggcgctgcccaccgttctccagccgtgctggccaccactgggctcccagaccaaggcccatggactgtcccccatgcctgtctaccgtgaatacactcattgctcagtctctaacttccctatttagagactgagtattatacactcagaaaaataacaacagctcacggctgctggccccttgcgggtccctacccgggtttcatctgatacctgtgggaacctggtgcggccagcctggcattcacctccactcctaatcccattttaaaacaaggaagcggaaggcttcagtggccggccatgggtcacgcagtcacagagccaggccccgctccctgccaggccccactctgctggcctcgctgtggacgttctcaccgagtggcagccgtgtctgcattggcccgagggcctgggggaatcccgttcccacactggttggctgtgctgcctctagggagtcacttggcctctctgtgcccagcgttctcatctgtc

SEQ ID NO: 1882043 - DNA, 4001 bp, Homo sapiens
tatatacatttatatatatacgtatatacgtatatacatgtatatacgtatatacgtatatacatgtatatacgtatatacgtatatacatgtatatacgtacgtatatacatgtatatacgtatatacgtatatacatgtatatacgtatatatgtttatatatgtatatatttgtatatacttgtatatttatatatttatatatgtatatatatttatatatgtatatttatatatgtatatatttatatatgtatatttatatatgtatatttatatatgtgtatatatatttatatatgtatatgtatatttatatatgtatatatgtatatttatatatgtatatatttatatatgtatatttatatatgtatatatttatatatgtatatttatatatgtatttatatatgtatatttatatatgtatatatttatatatgtatatttatatatgtatttatatatgtatatttatatatgtatatatttatatatgtaaatatattatatatgtatatatatgtatatagatttatatatgtgtatatatgtatatatgtatatagatttatatatgtgtatatatatttatatatgtatatatatgtgcatatatatttatgtatatgtattttgtttgtttgtttttgagatggagtttcactctgtcaccaaggctggagtgcactggtgcaatcttggctcaccacctctgcctcccagttcaagcaattctcctgccttagcctcctgagtacctgggattacaggcatgtgtcaccacacccagctaatttttgtgtttttagtacagatggggtttcgctatattggccaggctggtctcgaactcctgaccttaagcgatccacccaccttggcctcccaaagtgctgggattacaggtgtgagccaccaagcctggcctaaaatatgttttgaaatatactttcagtgggtaaaaaacattttaatgtagcattttttttccttttggttttaaaaaatgtcttttgtcttgtgtttcctacaagaaatctgtattgttttcgttgtttcttggcctgtcattaatctcttttcctctgatactcttaagatattctctttgttgctggttttcagcaatttgactgtgatataacttttaatttcttcctgtttcttgtgctttgttttgttgagcttcttggatctgtggttttatgtttttcctcatatttgaaaaacttttagacattatttcttaaagtattttccccctgcctctgctcctacagggcctctgcttacacatatgtaaggccgatggaacttctgctgaagctcactgatgcccttttcttttcgtttctttatcttttttttcctgtgtttcacttcatgtagtttctgttgctgtgtgttcaaatccattaatcttttcttcggcaatgcctcatcttccattgatctaatccaatgtatttttcttctcagacattacactttttgtctgtagatgtttgacaaggatcttttgctatcttccatgtctctgccttaacatcttaatctttcctctagcgacttgaacacgcggaataaaggtgatcaacgggtttaatgtccttttctactaattctgtcatgtctgtcgctccccggtaagctctgggtggttttcttcccattgcaggaattgtttccttgcttcctcgcatgcctggtaatatggatgcacgcagtgtgcgtttcatcttgtttggtgatgtatatttttgtgttcctaaaaatattgtttagttttttcctgggaaacagttacattccttggaaaaactcgatccttctgaatcctgtgcttgggctccagtaagtgggaccagggcaggggttgatccacgaggaaggttttttctccgctactgaggccagactcttctgaatacgccagtcaataccttgtgaattgagcttttctaactcacacggtattgactggagtactccaaagagtcatcatgccaagataattgacgtttgggctgggcgtggtggctcacgcctgtagtcccatcactttgggaggctgaggtaggtggatcaggatcacttgagcccaggagtttgagaccagcctgggcaacatggtgcaactctgtctctacaaaaaatataaaaattagccacatggggtggcatgtgcctgtggtcccagctacttgggaggctgaggtgagaggatcacctgtgcctgggaaggtcatagctgcggtaagccaaggtcgcacccctgtactccagccttggtgacagtgagaccctgtctctgaggccaggctctactgagtactccagtcaatacctggtgaattagggctgggggcggtggctcatgcctgtaatcccagcactttgggaggctgagatgggtggatcacttgaggccaagagtttgagaccagcctggtcaacatggtgaaaccctgtctctactaaaaatacaaaaattagccaggcatggtagcatgcacctgtactcccagctactcaggaggttgaggcaggagaattgcttgaacccgggaggaagacattgcagtgagtcaagatcgcgccactgcactccagccttagcaatagagtaagaccttgtctcaaaaacaaacgaacaaaaacaaaaacaaaacaaaacaaataacaacaaaaaaacctggtgaattagaagcttttctgctctggctaattagaaccggcactattgctgtgggaacaccattccttccaatcctattgggttgttcttatttggaccttttcctgtaatccagtcctttttctgacacacatgccgaccagccatcagccacatatcctgaagcccagtttccacacagttcactcctccagtgctttctcagacctcagccaccttggcctccctggtctccagctccatctcctcgccccagggagacgaccaggtccagcctcaggtgggcaccattgcccggacagtcttcccaggtaagcgattgtaggcttgccgcatttggctcctgccttttgaggttcaccttctttccttggctgagcttcaggatctttagggctgtgatttcatacattttgtctagtctattgttggttgtgttgtcatgtcaaatgggaggacgaatcccgttcctgttgcttcattttgtccagaagtgaaagttcctagaacaaggctaaagattaatgagctcattaaccagctctaaaggtatgaaatgaaatatgaaaatagaccaatgaatgtacaaagaaacaagtaatggatctgagcagaaattagtgaaggagaaaacaaaatatcaacaatcagcaaagctaaacatttaacatttactcttctaagaaaaactaataataatgaaaatgacaaaaacaggtcattccagaaaaataaagatacaagtaactatgtaagtgatgcaggacacgcaagccccaaagtggggcttagcaggtgagggttcttggcttcactcaaggatgagccagtggtagtgttaccagtggaggttgtccaggttcttggtgttttgaactaagaattggacaaaatccacaaagcaatgaaaaaaaaaagcacagatttattaaaacaaaagtacactccacagagtgggagtgggctcaagcaagtggcccaagagcccaggtacagaatcttgggggtttaaataccctctagaggtttcccattggttacttggtgtatgccctatgtaaatgaagtagtgacccacagttggttggcttggttgtgggaagcgaacaatcagaggctgaattgaagttacagcattatattcccatacaaatgaagacttggcccacgaccagtctgattggttgcaggaggggactcatcagaggtactttcaatttttcatctgccactcagaaaaaagggggaggtattgcaaagggaatagcttctggttctttggtaacttgggcatg

SEQ ID NO: 1882044 - DNA, 4001 bp, Homo sapiens
gtctctaagatggccatgctgtcaccgcattcattattcacagtcagtgacccttagaccaatgcttacacaagatttctttcaaatatgacactgtggagatggccacaggaggtactacaaaaaccaagtgctcgattaccacttaacatgttcagcttgaaatgactgctacctttgccttcaattccttcccacacacccaggtatacaaatatcttttataccaagagtccttgtgaaagtaaatagagggaactcccagggataagggagggcaaaaaacaggaagcacttgaagccaaaatctggagcaacttttaagaaggaagagacgtccgtcctattttcatatctctgcatggatctcccatggagaacttgagttaaatgtaatgattacacgtggcagaaagacaactctctagcacagtgtttctttcacataggctgctacattgattccataagctcaacaattttaataaaaaatatttctgctaaatactttatattcatcatcataaaaaatgcacagccatttgaaaaaagggcaattaccctaaatgaatattgccaaagcacagatcaactttatataggatttctttccttgtttctgaaaaatcgcaaacagaactggcagactttatttaacaaacattgattttgtccaggcatggagtttaaattttagtgcatgtgctggaggcagggagaagtgatgcgagaaagtaaagcaacgacaggtcatgcggggaccagtgctacaaagaaactaaagccaggggaagggttggggaggcatggagtggggtaggactactaaatttagacagaatggggtgctagaaaaggttgactatgctgtggtaacaaattagcccctgaaccccagcggtgtagcataagtttatctcttacccacattctacgtccaccacaggtcaccagtggctgtgctctagtcattcagggacacagctggatggaggctgcaccatctgagacacggggcacctccctagtcctgccagagccgcagtagcagtggaccagagctggaaagtcacacatggagccttaaagtctttaagcaataagccacaactagtaccatggccccacctactgcaagagggctgagaaatgggaggagttcatagcatgagcaatcaataactgtcactgatatccagggaagtcgtctctgacacagggaaatctaagcaaagaccaactaaagaaagaagctacacagaaagttggagacaggatgatgtcatttatgattccaagaaatattctgtttgtctgccatttgtttccagtgaacaaccacatcaaatctttaatttagatattttgataattaaatgcattaaaaatctgtctctatttctatgcttagttcaagtaatagcttacctcagtgattttaacagtcttacataccatatagtatcactgcccttacattacatccttcaataattatcccctcccgagtaaaatcataatacaagggctgacaaactcattcttgattgacacacatctcgactcctcactcatttcttctccacatattattattttctcattacttacctaaaatttaaccttatagataatgaaaagggttctgaacattaagaaataatagaatagttataaatggaggaaaaagtttgaataaaaaagtttcttaaaaggatagtgtcacttgcaaaaatagctctttgaaatacaggttcctataaacattttacacgcattaagatattactcttacacatactggtaacacagacactatacatatttgtctccattttaggaagaaatgaagcaaggctatttttaataataaacttagaaacaattcataacccctagtatttgcattaacctgcaaatactaggcagcacaccacagcagagtgtaactaaaacctaaaatagtgtttcactttcttccacacctacctctgtgcgctcatgcaagtgtttttattttgctttgcattagatgcttctgtaatacaggcatctgattcaccccacataaagctgttgtaagtaatcaatgtgagaaagtctacttattgttaagcatatttgtatattttttactagttatttcatacttgccctgaaagaatacacattcaaaaagcttgaaattaggcaatgtcagtctcatcaaacaaaaccagcattggaagcgaatattaacaaatatcagaatgaaattacaaaatatacatctccagcctcataaaacatgaattttataagcactttcataaacataagaaaaatagctttgacaataactatttgaaaacattattattaataatcttgtatactgtacatgtgcacttaaatgtaatagcaccaacattcattatattatgaaggggatactttataagaattataaattatttttacatgattaaataattttggcagagtaagtccgcaggacttaaataaccagtcagccttagtatctacatctggaccaggaagcctttgtgttacagacacagattccctgtgaagttctccagggtgtaaagaaggccccagggaggtgccgacgggatgtgagggctgcctttcagctcaggcgagcctgcaagcaacagggcagtttgggaagggtcacaggcacaggaagggagcagtgggcaaccattgattacatcaaaccaggatggtttcttctttttaaagaaacttttgttgagtgtttacccacccccatccacacaaatatgctctctaggaaatgtgaaagtataagcttcagaaaaatgtttttctcatcctttaatttctggttttatgatcaaatgttccgaagacactgcttctttttgctcaaaatagttgacattgtcattgcttctagtttttcagctcctactatgcttactatgtccatgggtgccattgacgtctttggctatttatcatctctagaaaagaaaaaaaaacattaaaattttaggatgtaggattcacaataaatctcttaccaaatcctccttaaatccctaaactctctacctggctctgactccaggatcaccctttcagttctttccatgtttttcttcggaaaatgtagtttcctaacctttctacccacccttctcgtctactcttaggtctgcagccacagtgatagttctaagttgcaaacctgatcatgtccttccagtacttagtctttcaaaaatcttcctacttcccgcagagtgaagcctgaactctttaataggcatctaaggacttggacccggatcctgttaacctgttaattcatctttgcctctaactccctcccttcatctttcaaggcacagcgcaggacttaactcattgtgaaagtactaagccttgatgtatctttaggaaaaacacacgtatacacacacacgcatgcaaagagaggaagcatagcttagtggttaacctacatagactgcaacttgcttaaataatccagtatttatctatgttttaataaaattgttttaataaaaatatatgaaattcatctatcttttctctggaatgcttttgcctgttcaaagattatacaatgctcccgtatgttacagaggaagccgtcccttcatttataaaagacagttaacacatagcacaaaaactctagagtaggatggatccgcaactactgtactggaaatatgctaaattagggttctgattagagttaatggaattaacttgggtgagagaaaatactcaccattaatctaggggtaacagaggagttaaactccaattcagaaacagagcagttcaaaatcagaatctagagtcagcctacatgggcttgatctgggaatgtgccctttattagacgtgtaaccttgggctgctgcttgactgaataggtcttcgattcctcatggaatgaatataataagatctgatgaatgcaattagacagtgcc

SEQ ID NO: 1882045 - DNA, 4001 bp, Homo sapiens
tacttagtctttcaaaaatcttcctacttcccgcagagtgaagcctgaactctttaataggcatctaaggacttggacccggatcctgttaacctgttaattcatctttgcctctaactccctcccttcatctttcaaggcacagcgcaggacttaactcattgtgaaagtactaagccttgatgtatctttaggaaaaacacacgtatacacacacacgcatgcaaagagaggaagcatagcttagtggttaacctacatagactgcaacttgcttaaataatccagtatttatctatgttttaataaaattgttttaataaaaatatatgaaattcatctatcttttctctggaatgcttttgcctgttcaaagattatacaatgctcccgtatgttacagaggaagccgtcccttcatttataaaagacagttaacacatagcacaaaaactctagagtaggatggatccgcaactactgtactggaaatatgctaaattagggttctgattagagttaatggaattaacttgggtgagagaaaatactcaccattaatctaggggtaacagaggagttaaactccaattcagaaacagagcagttcaaaatcagaatctagagtcagcctacatgggcttgatctgggaatgtgccctttattagacgtgtaaccttgggctgctgcttgactgaataggtcttcgattcctcatggaatgaatataataagatctgatgaatgcaattagacagtgcctgaaacagtagtcttaagtaggtatttttgttgtcccactttttgagaaacaaaaccaaagtcaattcaattaaaactgcaggtttcttgatttcatcctaatactttgcaaattaatcacagaacccaagtgaaattgcctagactctcaaagagttcgaaaaacatttctaatacactcaaaattttcctagttgacgttcacagattatcaagagtaaagcaccttcatacagttttgatcctcacactgtctaaatctgaggagctgtcaggaaagacatgtaaggagagatctaagctaaaactcaaaccacacatgaggcttttcaactgtgaccaacttgtagttaaaattcagtttatgcttttctgtccacctaagagcaaattaaacctttaagaaagcaaaggataaaatcattgttagctcaagcattaaaaaagaaaataactgaatatatcttcttcaactctccacccctagggatgagaactgcacctggcaaacaagaggacattcaacacgtagtagctgttaaaatgagtaactccccaaaagcactattagaaggcgatatagttattatgaccaagttctgcggaaacatggtgttgaaaaccttactgaagctaacaatgtgcgtcaccttccaggagccacacacacatcctgagggcttcccagatcaacccctcatccccgcgacagagccacaatccagcaccaccttcccaggactctcagctgaggccccagcccccgcaggcccagggacgacgcggcgggcagggcacatgcctgcgtcgggccaggtggaagctcggaacgaccacaggcccccggggcgcgcccctccccgtcacgcgccccgtttcccacgtccacgcatgcggtttccccaggcctggaaagcgtctagagccaaagagcccaggggcttgcccgcgcagaggccgacgtggggcccagggacgcgctcccggggtcctccccgccgagcccgcagccagcacccggagcgatcccccgagcccgaggggcgtgggaaccacgcgcgcaagccggctgcccttccagtcccgggacgcttccccatcaggccagtgctaggcgggcggtcgggacccggggatcgcagcctccggagcgctcacctgggtggcgcaggccaaggacgcccatggacagcgcgacctcctcccattccacacacgcgcccacgaccaaagtgcgcatgctcgacacctgggaccaataggaatctcggtccgagggtagctggggccaatcacagcgcgtctggcgtgtgggcggtgtctcctcgtgttacgcgtgcgcggaggggctgcgctacccggtcttgggtttttcatcggggagtgggagtggactgaaggcttggccgctccgcctcactgagccggctcagccagcgcagctgttcctggaacgccagtcccttaggatgggaggtactttcatctcgaagagggccgtggcgtctggagcttccctcccttctgtcctgctgagtcatccccgcgtcgcctgcgaggccgcgaggcgtttaggtctgggcaggccgccttttccccatcacgagatcctgttattttactgtttcattctttttctcactttcctatttgttaagccaaactttttccttccatagacgtgaccccttagaaggctacccatgcctcgacatatctgacatttgacgttttactcaaataatttgccaaagtctattgccttttttaacttctattttctaaagctagtttgatactaatcaacacagttttttcaacaagcatgtaagtgtgcatattctagacatgcgcggcctgagtttaacccatctgctactaatttgtgttgtctcggaatattatctaatcccgtgcttcagttctcatatataaactgaaactttatagattcactggtggcctgtaagcctggcctgtaagccttaagttgaaacatggagcatatcagaactgtgcctggcacgtggtgaaatgttcaaaagttagtattgttattaggtgctgggcacttttctaggctttgggatatagagatcaatgtccctgatgtcctggtgtttataatttattgtggacactttgctatttttttggatacagatctttattttcataaacatggataattttcattgagtgcagtgtgatctcaattgatacttttgtagtatttcatcattatgcttatattctttttaaaatttaggtactgttgagggaaagtgagaatgacatgattttgataacatggtagaacctttttcattcatctggtgttgccacactggggctctgggtgctttatgaatcatgttcacaagtcatacttgtgtctgtccatggttcttttcactacagccaccatagttcagggtgagatttttcacaccgactgtaaagatttatctgtggaaaatggtaatgagcttgcctggttgatgtcctgttgttttcccaagtacatacttggaagagagtgaacagaagactaaaacgtgggtcaacagatgttttgcagtgagctaaaaaataattgacttcactagaacaactgcttgatattctacagcagttttgcaggtttctgaagtggaagaagcagatagtgatggaatgctgctaaaagaaatataagagaataataacacccttggtgcttgttaatttcattttgaattttttttttttaagttgtcagttacatgtttggtgactgctttgaaagttctgattctgttgcatgtggatccacaaggtagcttaggaagcctgatggcagaatacaaattgtcttaaaagagttcataggtattcacaatctttgtattgaagaaagtatgatgaaactccccaggtccagttagggcagcactgggaatgcaaggtgagaaattggaagaatttaccacacacaaaaaaatgatgtgtctgtattagtccattcttgtattgctataaagaaatacctgagactgggtagtttataaagaaaagaggtttaattggctcacagttctgcaggctgtacaagcatgctgctggcatctgttagacttccaggggaagcctcagggagcttttattcatggtggaaggccagcaggaggaagagagaaaagtggtggggaggtgccacaatttacagcaaccagatcttgcaggaacttagtatcag

SEQ ID NO: 1882046 - DNA, 4001 bp, Homo sapiens
ctggggaaagcaaatggaaatagtctagtggtgtctccttataaaaggaaaagaccagtgtctctgtgatcagctcagattaagtttccttttttccattgccaattactgacatcatttaagccccaaagaaatgttttcctacttctagtccccttgattaaaagaaaagccaagagacacgaaggtggctctcaaactagcagtaacaagaaactttacaatgggatgtatgggcagcagccaggtgggaatgtagcagtacctgtaagcacaaaactcctcttgactattatgctgcttcctagtttttctagcattccaagcttcttaacagcttcagtgggaatgccaagatatgtcatggagactgggtggggtcccgtcattccaggtgttgccttccagtctcatttgtgctggcagcagagaaaaaccagagtggaactattttatttacagagtgatagctgaatattcactctgtgtcagtctttcttctagctcacccatttggtaattttactgttgactagcatctttactatataccagatctggattataacatgttcaaatggtgtgggtggtgggaaatcctgtgtctctaaatcatacagattggtattcaaacaccaggtccactgcttacaaactgagcctcatctaaagaaggaggatgattatgaagcacctacttcacagtgtggctgtgagaactaaatgcctaaaacctacaatacatccaaaaatagtggctataatcatttctgttccttttctccttcttaaagtgacagactgggactaataaagtccacaaaccacagattgtcaataaaatgttgtaaatccaagagtaagctaataaacaactgagaagaaggaagaagaataaagaagataagatcctaagaggaaaagatatttaacttttaatttttatctgcttttctgcttttgtaaagtttgatgcataaagctattgaaatctatgtgagcttaagtgtctttccctgatgaaataaataaaagacaattgcctgtgttattaagaaaaggcacatgttttcagaactgtcagtttctattattcaagtcagagagattttactttaatagtattagaggcagagtgaaaaatacatctatttccttcttaattttgatattttctatttgactctgaagcttaatttttaagttatatcacattaaaaatgctcaaataaaagacacatataagaaggtaaaagagtaaaaagaattttaaattaaatgagtccatttgcccatatttcacttccccaggtctcagtggtagcaatcttcacacactattaatgttctttagtcttttactccttacactcctgaggaattttatatccccacaagacacaaaaactctagaaatataaattaagagaaacactcacagaaaaacccaaagcagatctgacagaatgattcttagtacagaatacaggaaaaaaaaaaaaaaaaaaagtcctggcctatcattatactgtattactttaaataagttaaagtctcctggcccaaagaagctattataagataatttataatttagatggttaaatgaatgttcatgatctttgccaagttcaggacaataaatatagggggttcttccaaccctaggaatctgttattgtcactagacaaacaaggtaggcttgagaaaactgatatactttccccaggtagacgtgaagcttcttcatattgaattacagaagtaaagttttagtgaatactactttacataatttttctatcacggtcatttaagattttattcacaaggcagccaaaggcgaaaagcaaaaacagaagctagaacaaaacagtctttgggttaataatatatattcctttttttttttgagataaggtctcactttgttccccaggctggagtcagtgccacgatcttggctcactgcaacctccacctcctccgcctcctgggttcaagtgattctcatgcctcagccttctgagtagctgggaccacaggtgtgcaccaccacacctggctaatttttgtatttttagtagagatggggttttggcatgttggccaggctggtctcgaactcctggcctcaggtaatctgcccaccttggcttcccaaagtgctgggattacaggtgtgggccactgcacccagtcatatagttcatgtggagttttaaaattgtagtaatttaatcttgtatttaagttatacccttaataagtaccatattaaatgtggtaaaatgaagagtacggactaggtaagaggataagatctagaattagaaagacctggatttatacactgactctgcagtttgtcttttaacccattatactaccttatatctattcataataaattatgtatctgaataagtgtgtgtgcatgtgtaaataatacatacacacgcaccacagagttggtacaacgattaaatgagtacccagcacaatgcttggcagacactcaatagcaaactaagaaatcaggataatataggccaggcgcggtggctcacggctgtaatcccagcgctttgggaggccaaggcgggtggatcacgaggtcaggagatcgagaccatcctggctaatacagtgaaaccccatctctactaaaaacatgaaaaaaaaaattagctgtgcatggtggcaggcgcctgtagttccaggtattcgggaggctgaggcaggagaatggcgtgaacccaggaggcggagcttgcagtgagctgagatcgcgccactgcactccagcctgggcgacagagcgagactccgtctcaagaaaaaaaaaaagaaaaagaaaaaaaaagagaaatcaggatagtatagcagtaatttgatgaaaaattatggattcatatcataatatacgtcaatattaaatcctttctgataaactatttgaaatagtgacaaagaacatatacaaactctttgagaaagtattcttcactgcagaattaaatcacaagtaagaatcctgtaaaaaaatcaccttctcaaggccaaaacttacatttttagctgacatctcgttacaatggtactacgttctaatagattgtggaggtatataattacaacacttaaaagatgaaactaaatgaaaaataaaattcatagtgttaatagagtccaatgtaggagtgcttttttttttaatcccccaaactatgtagaaaacatccatggaggaagacatcagcgttaattcctaaaaaggctcctgtgctcatcaagaggcctccaaccactggaccactgcagttgccacataatctgtctgaagcaaattcttcctcttagcagttgctgaaggagtggtgacttcttattagcttcccttatgagaacatcttctatgctacgcaggatgtttcaagtaaccccaaagatgtttagttgtgcttcatcatcataaatgaagacttaacagggagaaattaagagtaccgttaaatttttcttatgcctgttaacatattgtcattcatttactcaagttcttcaaactctgacctccttttggctggaatgcaacaggatgaaggatgatatcttctcaaactgtgatgtttatttaaggatatctactactcaaagaaagaaaatgaatgtggtaggaatatcatgaaaataacacggaaaacatggctccagagaagcaacgtaaaaagtgtcttaccaggcccaagtagaaaatcaccctctttagacagttcattaaacttttcagagattaatcactagagagattatagcagtggctatgaaatttatggaagcattcccccagaaaaatgaacgcagacactgagccataaatgtaaagaactcaaaaggaagcaatctaccttccaaacaagtgttgaaaaggtctgaaggaatttggttgtctatgtcagccattatacggggaaacatgatgctcactgttctaagg

SEQ ID NO: 1882047 - DNA, 4001 bp, Homo sapiens
ctaagtgtggtggcaggtacctgtaatcccagctacttgggaggctgaggcaggagattgcttgaacctgagaggtggagattgcagtgagccaagatcgcgccactgcactccagcccaggcgacagtgcaagactcagtctcaaaaataaataaataaaaaataagagtgtgataccttttaaggtgtgaaaatagacatttgccatctattatctctaaaggctctctcttctctctaaagcctacaacctagaggcttcatctacataacaaagatcttagcttccacaaccccccttatcttagctcaggcatttctttctatgacttcaagtctttagacaaagcttaactgtcaaccaattgccgatgagaaaatctttgaatccacgtataacctgtaggcccccactttgagatgtcctgcttttctgggctaaaccaatgcgtatcttacatgtattgatttatatctttgcctatcactcctatctccctaaaatgtatagaatcaaactgtaatccaactgcctcaggcacactttctcaggacctcttgagatcactcatattggctcagaataagcctctttaaatattttagagtttgtcaacaaaattaaaagagcaaagaactgtatgtgtggtaagaaatctcttccctgtttttctatatttttgaattgacttctccaagtatgttgcagagtacctgtcccatatgtaaagccacgatggttagcagtagctctaacgtactgctatgacccagggtcatccaagtgtctcaatttttattttcttagctttttaaaattgttacctactgcattccagagtgttcttagagttaactcacagaaataagcatttaaaaatttcccatgcattatcatggctcaagatattatcataaatctttttgccttattattattgtattgtcttacatatccttacttccctatttactcctggagtttgagtaaactccaggttccaaagttgttattatccctctactgtcacaaaatcagagtgtccaattctagttgctgtaacttcacctattttccagatatcaccacaaacagatcttttgtccagaaggaacaggtatagagaaacagaggcacttctataaaatagataaccgtattatcccattttgtcacaaatcagccacatgtagccacttggtgtgcagcagtctcaactaagttgtcattgtacttatcatctagaagcatgtcagtccaacatgagaagccaggtaaccaaaccagaattaaatttaaattccttaggtactcttttggccagactaccatctggagattgtaccaaccaactgggtctggggttgctgttaggggaaagagaaaatcatcatatccagaaatagatcagaatcttgaacatcccaaataaattaataaaaccctcatttcttcctgattttttttttagccaggaagtggccagaggagattatccctttttgtaaacagccacattaagtaaacaaactgctttatgaaactatgaggatcagtagaaagtgagagaggtagagtcagaaatctttttgagttgatatttaaaacctgttccaatgttcaagaatcccagataccagtaggtggtagaggagaatggggaatccactgaatgatttgacggccaggccattgttgagctgcctttgcagtaaaacacgcattattaaagcaaaaggtcaagaaagccaaaaatatgacacaagattagcttcaagaacctcaatgctgtgtctgcagttagctgattagacaggaacaggaacagcaatgttgttgcctaaaactggggtcaacactggtgagacaacgcagcaaacctctatccagcaaggttctgaagattcacctggtttctgcccacagtggttgtgaatttacctcctttatcactgcaaagaggagaaggtaaattcacaaccactatgggcaaaaaacagtgcctctctgtgagagttgtctgttaattcttatcaaggtgaatcagaagagatgacaacattcgtttgtttatctcttcttcatagtgtcatggtacctttgacattattcagtgtcttaaaccagagaatgtctaatgttggaattttaagtagggcagaaaatctacatatttgctctaccaagtgtattagtctgttctcacactgctataaagaactgcttgagactgggtaatttataaagaaaagaggtttgactcacagttccacatggctagggaggcctcaggaagtttgcaatcatggcagaaggggaagcaggcacgtcttacatgccagcaggtaagagaacatgtgaaccaagcaaagggggaagagccccttacaaaaccgtcataccttgtcataccttgtgagaacttactatcatgagaagggcatgggggaaactgacgccgacctcccccaccccacccatgatccaaacacctcccaccacgtccctccctcaacacctggggattacaattagagatgagatttgggtaggggcacaaagccaaactgtatcaccacagtactgtcaaataatgacaagtttgcaaccgtttctatgtggggccaattatgatagaaaatgttactgcctttgctgctttatctgataagtataagcaatagtatcaccatttgtcataataatacacagactgaacatttgtaagatacttcacattttacaaagcaactttcatgttacgattttatccaccttcttaaacaccccaaaggaaggtaatatttcttctaacaaatgaaaatatgtggcttattcattattcaacctcaaagcagcaaaaccaacatagaaactggggtctttgatacagaaatctggtgtttgtgcagagctgtcattaaagctttcctcctagaaggaaagtatgactaaggtcttttgttttgtatatgttgagatcttgccatgcagcttgtaaatgttcacaaaaagcatggggagttttgatacttaattacaagattgggtcaactaatataaagccctggattctcaagttctcattagatacttttgatgttggaggttattgtgtgtgccagtggatgcagaaggttgatttggcccagcctgtcattcccccctcaagccccccaattacctggatgatgtattggtagaataggcaatgctactgaagaattctttcatctgagagtgaagatgaaaacaaaccaacacattctccctgcattgttcactagctttttgttttatcctcctaaggtttgatgtttgataatgaataaattaggataaaatgtgaatgcaccctctgtaaggacccagcgggaaacattggctgttgagccagatctcaatcagcaaatgaaaggggttcattttggcatcaagaccaggcctgtgaagtctgcatatttagaagaaattcaagatgaaaaaggaaatatgtgtgcatgatgtttatgtgtatgcaagagagatagacttagaaaagtttcaattttatggaaacatcacaaacgagataagcaacttaatttccttattatataatttatatataaaaaattcatcatttcactattgttgattaaagtggcatattttactagcgcacataatgttttaccatttggaggctgaacatcttttgaaactcatacacatctgtaaaatacctacatcgttggcataaactgttgctcatcttcatggagacaacttgagcctgatttaaaaaaattgtatggaaactggttttatatggaataacatgaacagtcatgaaattggtgttaatacttcttcttctttagtatgatatttagatctgcttctctcttcctggtctatatgcattccttctttcaaaggttgtgatatattgttattctaaggacagtgccctaaggaatttaattacattaatttaaagccaggatctgaggctaa

SEQ ID NO: 1882048 - DNA, 4001 bp, Homo sapiens
ctatatcaaagctctaagatgcttaattaatatcaaaacaaggctgggctgggaacgatggctcatgcctgtaatcccaatactttgagagggtggggtgggaggactgttgaggtcaggatttcaagaccaacttaggcaacatagcgagaccttgtctctacaaaaaatgttttaaaaattagccaggcatggtggcatgtgcctgtagtccaagctacttgggaggctgaggcaggcggatcacttgagcccaggagttggagactgcagtgagctatgatcacaccactgtactcaaggctagatgacagaggaagaccccatctctaaaaacaatgtttttaatttaaaaaataagtctgaaagaacaccacaaacaagtataagtctaggaatgaattctaaatggaaagaaaagacaacagactaatgtctgagactaccaggtctgtataaagcataagatctccacctcctctccaggctgtcctgtgccccacccaccgaaaccaactttgctacggtcactgatgtcctccatgctgcttcctccaatgggcatcccctggtactcatcttacttggtgtctcagcagaattcatacttccctccttttgaaacaccatcttcttttggattctgtgacatgacattgacctgattttcttcccttttttttttttttttttgagacaaggtctcgctctattacccaggttgcagtgcagtagcacaatcatagctcactgcagcctcaaactcctggcctcaagcaattctcccgccttggcctcccaaaatgctgggattacaggcaagagccaacagcctttttccatttatctaacaaatctttcttgtctttgccaactcctcctcttctaactcacccctaaatggaccaagtcctgagccatcctctcttctcacactataatttcttcttgagtcatctcatctattaccttggcttttttccataaatacctatgattctccaattatctccaacccagacctcacctctggctttctaattcagacataaattttctggaagttgacatttggatgtctcacagcactccttaaacagtgtccaaaccagaaatcttgatccctgcatcccaaacccattcctctcccacacttccccagctcagtaaatatcacttccagccacctatttcctcctttcctccaggcccgaaatctgggagtcatgttgcctaggctggagtggcacgatcttggcttactgcaagctctgcctcccgggtttacaccattctcctgcctcagcctcccaagtagctgggactacaggcgcccgccaccacgcctggctaatttttttgtatttttagtagagacggggtttcaccacgttagccaggatggtctcaatctcctgatctcgtgatctgcctgtcttggcctcccaaagtgctaggattacaggcgtgagccaccgcgcccagcctggaagtcattcttaatacccttcactccttttacccttgccatgagccctacaaacaactaacttaccactaatagtcacatcgtccctcttattaatcatcatcctagccctaagtctggcctacgaatgattataaaaagggttagactgagccgaattggtatatagttcaaacaaaacgaatgatttcgactcattaaattatgataatcatatttaccaaatgcctctcatttacataaatattatactagaatttaccatctcacttctaggaatactagtatatcgctcacacctgatatcctccctactatgcctagaaggaataatactatcactattcattatagccactctcataaccctcaacacccactccctcttagccaatattgtacctatcgccatactagtctttgctgcctgcaaggcagcagtaggcctagccctactagtctcaatctccaacacgtatggcctagactacgtacataacctaagcctactccaatgctaaaactaattgtcccaacaattatattactaccactgacatgactctccaaaaaacacataatttgaatcaacacaaccactcacagcctaattattagcaccatccccctactatttttcaaccaaatcaacaacaacctatttagctgctccttatccttctcctccgaccccctaacgacccccctcctaatactaactacctgactcctgcccctcacaatcatggcaagccaacgccacttatccaatgaaccactatcacgaaaaaaactctacctctctatactaatctccctacaaatctccttaattatgacattcacagccatagaactaatcatattttatatcttcttcgaaaccacacttatccccaccctggctatcatcacccgatgaggcaaccaaccagaacgcctgaacgcaggtacatacttcctattctacaccctagtaggctccctccccctactcatcgcactaatctacacccacaacaccctaggctcactgaatattctattactcactcttactgcccaagaactatcaaactcctgagccaataacttaatatggctagcgtacacaatagcttttatagtaaaaatacctctttacggtctccacctatggctccctaaagcccatgtcgaagcccccatcgctgggtcaatagtacttgctgcagtactcttaaaattaggcggctatggtataatacgcctcacactcattctcaaccccctgacaaaacatatagcctaccccttccttgtactatccctgtgaggcataattataacaagctccatctgcctgcgacaaacagacctaaaatcgctcattgcatactcttcaatcagccacatagccctcgtagtaacagccatcctcatccaaaccccctgaagcttcaccggcgcagtcattctcatagtcgcccacggacttacatcctcattactattctgcctagcaaactcaaactacgaacgtacccacagtcgcatcataattctctctcaaggacttcaaaccctactcccactaatagccttttgatgacttctagcaagcctcactaatctcgccttaccccccactattaacctactaggagaactctctgtgctagtaaccacattctcctgatcaaatatcactctcctacttacaggactcaacatactaatcacagccctatactccctctacatatttaccacaacacaatgaggctcgctcagccaccacattaacaacataaaaccctcattcacacgagaaaacactctcatgttcatacacctatcccctatcctcctcctatccctcaaccccgatatcattaccgggttttcctcctgtaaatatagtttaaccaaaacatcagattgtgaatctgacaacagaggctcacgaccccttatttaccgagaaagcgcataagaactgctaactcatatccccatgtctaacaacatggctttctcaacttttaaaggataacagccatccgttggtcttaggccccaaaaattttggtgcaactccaaataaaagtaataaccatgtacgctactatacccaccctagccctaacttccttaattccccctatccttaccaccctcattaaccctaataaaaaaaactcatatccccattaagtaaaatccattatcgcatccacccttgttattagtctcttccccacaacaatattcatatacctagaccaagaagtcattatctcaaactgacactgggcaacaacccaaacaacccaactctccctaagcttcaaactagattatttctccataatatttatccctgtagcactgttcgttacgtgatccatcatagaattctcactatgatatataagctcagacccaaacattaatcaattcttcaaatacctactcatcttcctaatcaccatactaatcctagtcactgctaacaacctattccagctat

SEQ ID NO: 1882049 - DNA, 4001 bp, Homo sapiens
aaatgtcttctgtttattgaatataaagttggtttccctacagaatcaaaagttctaaaaaagaaaacttaaaaaaatttaagttggcattttcagaaacagaaaatcaattacggcatgttcctcacttctaagtgggagctaaacaatgggtacacatggacatgaagatggaaacagtagacactggggactccagaaggggtagaaggaaggaatacaaggactgaaaaactatctattgggtacaatgttcactatttgggtgataggttcactagaagcccaaaccccagcatcgcctattatatttatgtaacaaacctgcacatgtaccccctggatctaaaataaaataaagttggcattttatatcttgctctttaatttaaaaaaactaacacacaaaagccaaagcttctaaatttagtaggttttatttttatcactaggtcagtgattctttatagaaaataacatgttgaaatttaaccttaaaaaaagacaagatgaaaataatatttacatggaagatatacttaaacataaatctcctgaaagtgaataacactgggcaacatcaaaaagaggatgtgatttgaaagtagtaaaatgcgtaagaatcaaattatagatatctatttaacccatgttctagaaatatgtttaaataaggaaagcataaaaattattttaccaataacttataatccagtacagtagagaatgcgaaatatttcttatatctcatctatggcttaactaactgatggcaccaccaaagtcagttccactgactggctgcaaatgtccgcacaagaatactgcatgtctggaagccagcacatatctatgctacttcgtgggtcaaaatgcctccaaggtaatgagaatatatttaaggtcatattgtatggtcagttcttcccacttcacaagttgttagatctcatgctgtcttccaaatatttcatgaacctgtgattttacagaaaatgaagtgaaaggattgaggtagatcttccaaaaaaatgtaaaccatcccccacccaaaaaaaatccccaatattcttgatatttcaagtgaaaaatgttttagttgactgactcatctggaaaattacctcaactttcccttcagttggtacacacacagtcatggctatagaaaccaattctaatgctgtatttagaaactaatgatgcagaggccgggcgcagtggctcacgcctgtaatcccagcactttgggaggccgaggcgggtggatcacgaggtcaggagatcgagaccatcccagctaacacggtgaaaccccgtctctactaaaaatacaaaaaaattagccgggcatggtagcaggcgcctgtagtcccagctactccagaggctgaggcaggagaatggcgtgaacccgggaggcggagcttgcagtgagccgagatcgcgccactgtactccagcctgggcgacaaagcgagactccgtctcaaaaaaaaaaaagaaagaaactaataatgcagaaagaatcctaaagacttcactgaaaatctggggacacattgtaggtccattccacattgttattacattctaaaccttatagttaaaaacatgtaatttcataaatacttaaacactgtctactccgaaagactccaaagactccaaaaatatttcttaaaaatttttagttatggaaaagcaggcataagtaaatttttcttaaaaggaaaaaatttaagtaattgtaatactttccttaccattataaaactgtgcattgtaagtattactgtattataagctaatggcaataatatattatggtaaatagtggcttgcttcatagcagaaagtacacataaacacacactaattacagattcagttacactctgatgttcattgtatatgcaataagacagcagttgcatgttagccgatgccattcacatattcaaccagctaacaatacactgccagctcatcacacacaggtatccagagcacttcattgacaagaagaatttatccagaagcaagtggcagggtagttgtggctgctgacttgacccaagcagccagctaacaatacactgcctacctgattcaggtcactgccgattctcgtggcccaggcagtcactgaggctaaatttgtaacatgaaacatagtggcagaactctaatcttaatagtcacattaaagaaaacttatacacaaaatgtattacttcaagactataagaaataaaatcaatatttgcttgaatctagtcaaaaacataaaagttaaacaaaaactttaaaactttcagaatacttacatttaggttttccaaattaaatgcttggataaaaatatgttctacagtacaaatgaattttaaaagttacttaactgtaggctgggcgcagtggcttatgcctgtaatgccagcactttgggaggccaaggttggctgatcccctaaggtcacaagttcaagaccagcctggccaacatggtgaaaccccgtctctattaaaaatacaaaaattagcccagcgtggtggtgctgcctgtaatcccagctactcaggaggctgagacatgagaatcacttgaacccgggagctggagtttgcagtgagccgagattgcaccactgcactccaacctgggcaacaaagtgagactctgtctcaaaaaaataaataaaaagttacttaactatagcttttcaaatcacttctgtttactgatccaaagactacttgtctgtattagacagtaaaatatctaggagtcgtgataatacataagctgtgcacgacacaaaactgcagcagtgtttgggggaaaaaatcaacattaaagtatttaagaaatgtaagggcttaaatgcaattagttttctcctactagaaatgacattagtaatcgagttctgaaaatgcaattatgtattcaatataggatgttaccacttgaatactgaatttttttttttaagaggcagggtctggctctgtcctccaggctggagtgcagttgtgcaatcatagctcactgcagccttgaacgcctgggctcaagcaatcctcctgcctcaggctcccaagtagctgggactacaggcacatgtcatcatgcccagctaatttttgcagtttttttataaagacaaggtctccctgtgttgtccaggctggtcttgaagtcttggcctcaagtgatcctcctgcctcagcatcccaaagtgccgggattacaggcatgagccacagtgcctagttgcaaaatttatataagatctagaaaaatctattaaaatggtggtggatttggaactagaatctctgcgtacaggtcaaaggaagatgaactattgagcctagagagaagcatggtaaatggtgacagagatttaaagcagatgaaggctctttatgaaacacgtttataaaaccatttaaatttgtttccttttacactgattacaggagacactaaagacctttgggtttggtctttcaaggagaacaggtactacattggatcaactttaaattgctcacgttaagaaccatggtttatgccacttctccacattgtccacaagatggcaccatttccatttctttggggggcgtgcttctgaatgcaacagagaggagtgcaactagcaactgttaaaatcattaacagccgctagcaatacactgcctacctgacacatcccagctttatcctttgctgtggaggcagaaactagaaagtacgattcagatgcaaacgattgcattatttgtctgggatcttcagtttcataaagaaattttttttagtatgtaataagatactaaaattctcatattttcagaccagctcaaacttcctacaaatacattatttaccaagaattcgtttgttcaagatcagaattaaaacagagaacaagaacaagccctggactcacgttggcggaatcttgacttctcttctgcttcaagtc

SEQ ID NO: 1882050 - DNA, 4001 bp, Homo sapiens
ttcctcacttctaagtgggagctaaacaatgggtacacatggacatgaagatggaaacagtagacactggggactccagaaggggtagaaggaaggaatacaaggactgaaaaactatctattgggtacaatgttcactatttgggtgataggttcactagaagcccaaaccccagcatcgcctattatatttatgtaacaaacctgcacatgtaccccctggatctaaaataaaataaagttggcattttatatcttgctctttaatttaaaaaaactaacacacaaaagccaaagcttctaaatttagtaggttttatttttatcactaggtcagtgattctttatagaaaataacatgttgaaatttaaccttaaaaaaagacaagatgaaaataatatttacatggaagatatacttaaacataaatctcctgaaagtgaataacactgggcaacatcaaaaagaggatgtgatttgaaagtagtaaaatgcgtaagaatcaaattatagatatctatttaacccatgttctagaaatatgtttaaataaggaaagcataaaaattattttaccaataacttataatccagtacagtagagaatgcgaaatatttcttatatctcatctatggcttaactaactgatggcaccaccaaagtcagttccactgactggctgcaaatgtccgcacaagaatactgcatgtctggaagccagcacatatctatgctacttcgtgggtcaaaatgcctccaaggtaatgagaatatatttaaggtcatattgtatggtcagttcttcccacttcacaagttgttagatctcatgctgtcttccaaatatttcatgaacctgtgattttacagaaaatgaagtgaaaggattgaggtagatcttccaaaaaaatgtaaaccatcccccacccaaaaaaaatccccaatattcttgatatttcaagtgaaaaatgttttagttgactgactcatctggaaaattacctcaactttcccttcagttggtacacacacagtcatggctatagaaaccaattctaatgctgtatttagaaactaatgatgcagaggccgggcgcagtggctcacgcctgtaatcccagcactttgggaggccgaggcgggtggatcacgaggtcaggagatcgagaccatcccagctaacacggtgaaaccccgtctctactaaaaatacaaaaaaattagccgggcatggtagcaggcgcctgtagtcccagctactccagaggctgaggcaggagaatggcgtgaacccgggaggcggagcttgcagtgagccgagatcgcgccactgtactccagcctgggcgacaaagcgagactccgtctcaaaaaaaaaaaagaaagaaactaataatgcagaaagaatcctaaagacttcactgaaaatctggggacacattgtaggtccattccacattgttattacattctaaaccttatagttaaaaacatgtaatttcataaatacttaaacactgtctactccgaaagactccaaagactccaaaaatatttcttaaaaatttttagttatggaaaagcaggcataagtaaatttttcttaaaaggaaaaaatttaagtaattgtaatactttccttaccattataaaactgtgcattgtaagtattactgtattataagctaatggcaataatatattatggtaaatagtggcttgcttcatagcagaaagtacacataaacacacactaattacagattcagttacactctgatgttcattgtatatgcaataagacagcagttgcatgttagccgatgccattcacatattcaaccagctaacaatacactgccagctcatcacacacaggtatccagagcacttcattgacaagaagaatttatccagaagcaagtggcagggtagttgtggctgctgacttgacccaagcagccagctaacaatacactgcctacctgattcaggtcactgccgattctcgtggcccaggcagtcactgaggctaaatttgtaacatgaaacatagtggcagaactctaatcttaatagtcacattaaagaaaacttatacacaaaatgtattacttcaagactataagaaataaaatcaatatttgcttgaatctagtcaaaaacataaaagttaaacaaaaactttaaaactttcagaatacttacatttaggttttccaaattaaatgcttggataaaaatatgttctacagtacaaatgaattttaaaagttacttaactgtaggctgggcgcagtggcttatgcctgtaatgccagcactttgggaggccaaggttggctgatcccctaaggtcacaagttcaagaccagcctggccaacatggtgaaaccccgtctctattaaaaatacaaaaattagcccagcgtggtggtgctgcctgtaatcccagctactcaggaggctgagacatgagaatcacttgaacccgggagctggagtttgcagtgagccgagattgcaccactgcactccaacctgggcaacaaagtgagactctgtctcaaaaaaataaataaaaagttacttaactatagcttttcaaatcacttctgtttactgatccaaagactacttgtctgtattagacagtaaaatatctaggagtcgtgataatacataagctgtgcacgacacaaaactgcagcagtgtttgggggaaaaaatcaacattaaagtatttaagaaatgtaagggcttaaatgcaattagttttctcctactagaaatgacattagtaatcgagttctgaaaatgcaattatgtattcaatataggatgttaccacttgaatactgaatttttttttttaagaggcagggtctggctctgtcctccaggctggagtgcagttgtgcaatcatagctcactgcagccttgaacgcctgggctcaagcaatcctcctgcctcaggctcccaagtagctgggactacaggcacatgtcatcatgcccagctaatttttgcagtttttttataaagacaaggtctccctgtgttgtccaggctggtcttgaagtcttggcctcaagtgatcctcctgcctcagcatcccaaagtgccgggattacaggcatgagccacagtgcctagttgcaaaatttatataagatctagaaaaatctattaaaatggtggtggatttggaactagaatctctgcgtacaggtcaaaggaagatgaactattgagcctagagagaagcatggtaaatggtgacagagatttaaagcagatgaaggctctttatgaaacacgtttataaaaccatttaaatttgtttccttttacactgattacaggagacactaaagacctttgggtttggtctttcaaggagaacaggtactacattggatcaactttaaattgctcacgttaagaaccatggtttatgccacttctccacattgtccacaagatggcaccatttccatttctttggggggcgtgcttctgaatgcaacagagaggagtgcaactagcaactgttaaaatcattaacagccgctagcaatacactgcctacctgacacatcccagctttatcctttgctgtggaggcagaaactagaaagtacgattcagatgcaaacgattgcattatttgtctgggatcttcagtttcataaagaaattttttttagtatgtaataagatactaaaattctcatattttcagaccagctcaaacttcctacaaatacattatttaccaagaattcgtttgttcaagatcagaattaaaacagagaacaagaacaagccctggactcacgttggcggaatcttgacttctcttctgcttcaagtctttggagagcacacgcatgatactttcctttgaaaacacagataacatattgagggagaaactatttaggaaaatcataatttcaggtgtggaatttttctagatcttgtgcttgtcaga

SEQ ID NO: 1882051 - DNA, 4001 bp, Homo sapiens
ggaaaaaatttaagtaattgtaatactttccttaccattataaaactgtgcattgtaagtattactgtattataagctaatggcaataatatattatggtaaatagtggcttgcttcatagcagaaagtacacataaacacacactaattacagattcagttacactctgatgttcattgtatatgcaataagacagcagttgcatgttagccgatgccattcacatattcaaccagctaacaatacactgccagctcatcacacacaggtatccagagcacttcattgacaagaagaatttatccagaagcaagtggcagggtagttgtggctgctgacttgacccaagcagccagctaacaatacactgcctacctgattcaggtcactgccgattctcgtggcccaggcagtcactgaggctaaatttgtaacatgaaacatagtggcagaactctaatcttaatagtcacattaaagaaaacttatacacaaaatgtattacttcaagactataagaaataaaatcaatatttgcttgaatctagtcaaaaacataaaagttaaacaaaaactttaaaactttcagaatacttacatttaggttttccaaattaaatgcttggataaaaatatgttctacagtacaaatgaattttaaaagttacttaactgtaggctgggcgcagtggcttatgcctgtaatgccagcactttgggaggccaaggttggctgatcccctaaggtcacaagttcaagaccagcctggccaacatggtgaaaccccgtctctattaaaaatacaaaaattagcccagcgtggtggtgctgcctgtaatcccagctactcaggaggctgagacatgagaatcacttgaacccgggagctggagtttgcagtgagccgagattgcaccactgcactccaacctgggcaacaaagtgagactctgtctcaaaaaaataaataaaaagttacttaactatagcttttcaaatcacttctgtttactgatccaaagactacttgtctgtattagacagtaaaatatctaggagtcgtgataatacataagctgtgcacgacacaaaactgcagcagtgtttgggggaaaaaatcaacattaaagtatttaagaaatgtaagggcttaaatgcaattagttttctcctactagaaatgacattagtaatcgagttctgaaaatgcaattatgtattcaatataggatgttaccacttgaatactgaatttttttttttaagaggcagggtctggctctgtcctccaggctggagtgcagttgtgcaatcatagctcactgcagccttgaacgcctgggctcaagcaatcctcctgcctcaggctcccaagtagctgggactacaggcacatgtcatcatgcccagctaatttttgcagtttttttataaagacaaggtctccctgtgttgtccaggctggtcttgaagtcttggcctcaagtgatcctcctgcctcagcatcccaaagtgccgggattacaggcatgagccacagtgcctagttgcaaaatttatataagatctagaaaaatctattaaaatggtggtggatttggaactagaatctctgcgtacaggtcaaaggaagatgaactattgagcctagagagaagcatggtaaatggtgacagagatttaaagcagatgaaggctctttatgaaacacgtttataaaaccatttaaatttgtttccttttacactgattacaggagacactaaagacctttgggtttggtctttcaaggagaacaggtactacattggatcaactttaaattgctcacgttaagaaccatggtttatgccacttctccacattgtccacaagatggcaccatttccatttctttggggggcgtgcttctgaatgcaacagagaggagtgcaactagcaactgttaaaatcattaacagccgctagcaatacactgcctacctgacacatcccagctttatcctttgctgtggaggcagaaactagaaagtacgattcagatgcaaacgattgcattatttgtctgggatcttcagtttcataaagaaattttttttagtatgtaataagatactaaaattctcatattttcagaccagctcaaacttcctacaaatacattatttaccaagaattcgtttgttcaagatcagaattaaaacagagaacaagaacaagccctggactcacgttggcggaatcttgacttctcttctgcttcaagtctttggagagcacacgcatgatactttcctttgaaaacacagataacatattgagggagaaactatttaggaaaatcataatttcaggtgtggaatttttctagatcttgtgcttgtcagattacacttttttttttttttttttttttttttggcaactaggcaccttcagaatataactaaattacatcactcaaatttacgaccagggcttagagtttcgtaccacctcttggtcctaaacagatattatgaacggggccttcggccccgcattagagagttagggagaatgcagaaaagggtgttactcacccacagcatctcctcttccgtgcggaccctccgaggcgcggtgcgctccagtttccactccatctccggctgacttcgccctgcctggcgtttggcctctctgctcgactgcctctggttttcttcccaggtctaagtcagtcttgacgcctaatcgtcaaacccctggagtcccgtcccccaggaccattctatttcaccacctccctccaggtcccccactcctcccaccgccgctgcaaggtgttccccagggtaccatttaaaaagccggcggggcggcagtcggcgcgggaatccccctcgccggcttcttattggccggcgccgcggtgtcgtcagagcccgggtgggattccccggcgcgcgccgcggccccgcccctgccggccctctctgggccccgccccgccaccgcctccggccgaggcgcgcacccgggcgccaagctttgccgcgagccgtggcgggcctgcggctgggcctggcgccgggggctgccaccgcggcaggaggcggaggggttggcgggcgaagaagcgggttctgggagttcacgatctttccattttcagaaacaagaatgtttccttataacggccctgatccctgttcctctgcacccacttctctttctccaaccacaccctgcctttgcaggatccgagcgtgcacagctctccggcctctgtccgttggtaatcgctgtgtcagctatagatgtgaggcgtgttcgtcagctcttcgttttcagaaggcaagaaaacgtggcaagatttctatgccgatcaaaagggagagcgttgacatatttatgcaataaattattccctgctctatacattgggagtagtcaggtcctctcactcgggcttctgagccctgttccttagcagggggtaggtgagagaggtgaagaggtagtgaaagaaccagtgacaggcaggacctcataaggcgtgaagagggggccagaaagctgagcacactggggactccgtgataaagggggagaggaagatattgagggttgaggaagaggtctggcgggaaatgacagggaaccagatgggctgtgcagccttagctgcccatctgagctgccaagagagccgagttgtgccatatggcaggaggggacactgcatctgggaagcctctgacagcctggcagcctgtttgtccctcccttgctaaccccccaaccatttttgacattggattgtattttgctctaaggcaatgtgagtttgtgtgtttttctggggaaacagttcatagatagcagatactcaaaagggtcagtgatccaaaaaaaaaaaaaaaaaaaaacctaaaactcactcccctgctttccttcatactgaaagcaagaaaaaatggcattagaactaagacccaatcttagaccagtttt

SEQ ID NO: 1882052 - DNA, 4001 bp, Homo sapiens
ctttagaaacctataaatatatttataggaatgctaacattgcataacttgttatgttaacataatatgcagaataaggaaagtgaatcataaagtgatttataaagtagatttccagatgttaccaagaccttaccaaatcactaagacaagattgttcctggaaaaacagatcagggactttttaatttaggctgtgaaataatacttattggctcttatttttacaacatattcacctattgtgaacattgatgtcactggcataaggttacaaccctagcttatcagttaaggtatgagttttctaaatccccaagggacgccagctgtctccacccaccccaggggtgaggactgaaggatttcttaagactgtgcctcagactggggtgaaggtgaagctagacaagcccaggaccacaatgacatttgaatctacattgggattcccttggttagctaaatgcaagaaaaaaaattcaaaattcagatcatagctcctactctcaaacacagtttatttataggtagctctaatgtattcagaaggagcaaaaaaggatacaatgctttaggtattattctggaatgttaatttttttttaagtgacacacatcaaaccaatggggtagagacaatacaaccacctcaggatccagctgtctcctctctgagcattagctcatctaccccctcttcctgccacgctcctgaggcaaaggttttgtaatcaaaaaccactaccttcaaactatcaagccaaaggcgaacaaggttcctttcctcctgccttccctcccttcccaccatgaacctgtcagtctcttctagctataaaatgttcatgcccctgtttaaaataataataatagtaataaacttccaagaaaatgaaagctggagcaaaatgccctgccagttaaccatcttgggaaaaggtcaaaataaccttccctggaacgcccttatcttctggccacagaaagctgccaaagccttccctgctatgtacagaagtaaaatcccctcactggcatccttcttacactgtccatttcctcctctcttctctgcaggctctgtctttcctggccacaggctggaaaatgcactggtggtagcatgatacaacatttatgtaaatttccatagttaaatgtttcctttacctaaaacttacaaaataccttttgaaaaattaaaacttttaagtcataaaaatgacgtaaatccccactacataatcctctcatttatattctttcccgtgtctcaaaattcatcagatctcaagcatttggcaaagctgcagacatacaaaccaagcatgaaacatgagctatgccttcatctacctgagctgtcggcagacattgttactttgacagaatatttaagaaaagaagtcaccaaaaacttaccacagcctaatactggcaatggggggtcttaaagatcagttctcatagaaccactaacaagcacgggtgcagtgtggcaaaggcagccactgtgtttcacaaggtcatcagccacagctgtcagaataagcacgaaggcaactcataccacggcgcaaatgaagaatacattctagactaacagtacgtgagccagggccacagaggctccagggcccaagtgtggagaaataataaatcactatttacgcaatgaactacatgtggccaaacttgtgctctttgtccctgccttcaagaaggggccaaccatccccagtaacatggactcaccgataggccaccttgagtcttcctaagtgacaagcatttattccaaagaacaaggagcagcaccaagacaaatgaacaaacaagagctcaagtttgtgacttgttttccagactgctcaattctcattaaacatgcaagcagtagtgctgtgttcggctgtaagtgacgctctgcatatgcctggctagctcctccacacgcatttgtggaggagctagccaggcatatgcggagacttgccatgtaacctgcagcaagttactcacctccacctccctatgttcttctgcacttcctcaaagtgaaagttcatttattaggtaaggaacaagaattgaatccaagtttgcattcactgtgccaggcatttaaagctgccactcacatgttgtggaatgaactgtatggtctcttacagccataaaacatccaagtctctaggattatgctgttaggttccaaagaatatagtgtacagtagtcatgagaaatatcatgactttctgagattatacacacatatgcatatatatgtatgtgtgtatatatatctctctcttctcatatagacataaatcggtatcagaaggtatatacgatacacagtgtgtgcatatttatgtatctatccccttcctttatctacctctaagctaggagaggcatcaggctgaagaagtcaaagtataactactaaaatgagataatatagaagagaaaatatttttaaagaattaaaaatataaagctatataaatgcaaaaatataactaatgcttaagaattattagactagttggcggaaaaatttcttctgaagagggagtagagtaatgctattgttattttaaacctcaccaaaaaaaagtgaactatacataatctcctataccaagcaaaacactgcaaaagctacaggtgaccagaattatataacgccttttgagaatgtacaagcgttttcaggtacatacatttcattaatttctagaatgtttttaagagttgccagaccaaggccctgaaattttcaaatataaaaatcctatcttggaaggcggggactcttacagagctggggcctagtttagaatagcattatcttagataagagcccagcctccctccaagccgtaacaggaaatgcttcataaagaagtctgcatccttagtcccagacctccgcagttagtatttggattctagcctttataaatggacttctcaaaggtgcatccaacatctgagtattctggcagcagtaacgtaaaaggactgacaaggaaggctgcagagaggtgtcagacacgaaaacgcttgaagacataaaaatgaggagtcttaagcacctaagaactgcaattccctatctgagcagcaggtaagattctggggtatcagatcactgtatccagttccaggttctccactggcagagagtgcagtctctgactttgtcctctgaatgcaggaactttatcgaagctaaagtacctgctttggacacttctggcacaggtgttggggtgacaggaaacatcatcaattcagctgccaactacagcggaaaaaaactagggaataatcctcagaaaatggcactgttaatgggtacaaaaaacacagataataggaataagctctagtgttcagtagcacaatagcgtgactatagttaacaataatttattgtatatttcaaaataactacaaaaatgaatttggaacaaagaaataaatgataaatgtttcaggtaatggatattccaattaccctgatttgatcactacactgtatgcttgaatcaaaatatcacgtctcctataaatatgtacaactattatgtgcccataaaaactaaaaacaaaaaagaaagaaaatgacacttaaatattaaaataccttttatccccgaatcccacatttcagtttggtcttctgaaaaaatgacttatcagtttctcagctaaagaaatgatatcgacagtgtactacctaaattataccttatattctttcctttccaaaatataaattcgccagtgaacaatctgatcctaaagagggcggaagattaacccgcctagcatgagagcacagcttaaaataaatgctgttaagtagtcctcaggtagaacaactttcccagccagcaggcccaggaactcaaggtctagcttaagttgggtatttgtattcaagaaggaattacaatcatggagtcaaatgactttttcaatg

SEQ ID NO: 1882053 - DNA, 4001 bp, Homo sapiens
tttcctcaagagggtgccttggaaccccaggattcattctgcagatggcaggtgtttgcaattttggcagtttcacatgcaagtgttaagattagtctgtgaagttggttgtttttgagcttgaataatacaccagacttacagaatcagaatttttagggatagggtcagtcttccatactacagccctccctccctacacacacacacacacacacgcacacacacatacacacggcaaagagcacaggcttcgtctctgctctttactgggtgcccttaagctgtataatcatctggaaccctcaatttctttatttgttaaatggaaagaagaggacccagaaaaacacctgtctcaacgggtttgtagtgatggagtggtaggaagcgtgtgataggcccagccctgctagtcgaggataaagaggccctggacataatcaaaaagaacttgggaatcatttccactggggttcaaacccacccccaccatttattgactgcgatgtttagacgatccttcaccctctttggccccaatagtacctacctcctacgagttttgtgaacataatccattctcagtgctcagctcatgatagatactaaaatagtagatgtcattgaaaatgtttgctcccttcttccaaggaaaagcatgggaacccagcgggactcactggggatggatgcacctttccccctaatttcttaaagccaagctacaaatggtgtgttctatacacttcaggtattaaggtaacagtcatactccaaggtggctccagggtcatcctattttgtccccagctttgccgactgaaagggagacaaggagagaatgacagaaaagtcacagcactaggtcggtaaccaggtaaactgctaagatcctgtcaagttttataatactggaactcaggagctgaagcagttgtagattatcacatgcctcagagcagcctgaacctcagggctacaaagagtgggcccggaggacatttgtcccaaggttcaggttcacagtccactttatcattgagatattctccccaaatagggttacataatcagttgcagagattctggaaaaggatgtgattcgtcacagggctcaaacctgggtcccctttgctgagcaggcacctaggacccacaaggaaattaatatacaatcatggctgcataaggctgtttcaggccgcatatatgacagtggtcccataggataataatggacctgccctatacagggtttttttgtttgtttgtttgttttttaccttttaccctgtatttttactataccttttctatgtttagatacacaaataccattgtgttacagttgcctacagtattcaggaatgtaacctgcggtacaggtttgtagcctagaagcattaggctacagcttagagtctaaggtgtgtagtaggctataccggctaggtttgtgtaagtacacactatgatgctcgccaacaaaactgccgaaggacacatttctcaggatgtatcccagtcattaagcgacacatgactgtatacctatttttcctaaatcttgtaataatcttgtgtcacatgcattgagcttacatgtttgttaaaaagcatcaagctttcaacaccaatactttgcacttagtgtaatctatttgtacttgttcctggcatttttcttttcattattttttcattactgaaggagcttcacgaactgggtgtagccaggcccctggggaggccgggagcccaggacagctccacccagaacctctggtcctgggaacagacccagcccgcctgtggaagtccccgatctcctgccgaacagaggggagcacggggcctgtgcacctgacggcggacaccctcgccaggactcgccccacaaaagacgccggaaagtgccgcgggagaagggggctgcagccggtgggaggggaaacgcggccgcccaagagccccgggccggtcgcgccgcccttgtccccggagtgaactctccctctgtgcgcgcagctgatggcggggcgcgcggccgcggcccctcttctccctccctttaaagagaagggcgcgattgtgtggatttcacagtctgagcacagctgaaagggagagaattaagtctccctcacggctcttttcaaggaggccgaggctgcgattcgccttcattcagaatatatgaagcttttgtgcgccggggccgggcaggcgcggcggccccgctccccggctgacactctttacagtggaaacgtacagtaattaacgcgggttccgctcccgcccgcgccccgagttgaaggggccgccgcctccgtgcgcctgggaaccagcgcccgcccgaggccgcatttgtgtacctgagaacgcggcggcgcatttgtatccgtgccctcgccgcccgagacccatccattttggcgcggagctgccgggctgtcagggtgcgccgcggcccccgcaagtgttgctaatcaaagccgagccggctcctccgccccgggagctcgcggcggggggcgctgccagggcggggtcgggggagcccgggggccggccgaggtgacccggtggaggcttcgccatctctgactgcggggagtctgtgattcggaagggggcaggaggggtgcagacaaaatacttcagccttcctccatgggaattgttaccatgagactgaaatttaatttatttttatttttatgtttttgatttaaaagagatgaaatctggcccgtgtagctggggcctgccaatattttggctgtgcttagttttcaagctcttttttttttttttttttttttttgtcactctaggtcggatgattcatgctggtaagcatgttgtatcatttatgcagtaatgcagcctaataactccctccccttcaaatatgttccttaaagagccagaagaatttgttcctgtagactcaaacctatgttcttaataaagtctgattgaagaaatagagctctggaaaaaaaaaaaaagagagagaaaagtgggggtgtggggggcaacttggcagcttgctgatgaaacgccaacatggcccttgtgctcttccttctgtctctcctggtggtgttacaatgtgtggcttaacacaaagttttgcatacaaagttaatttttaaaaaccatccttctctcaggatccgcactaaagggatgccaatgttcttattttgtgctccataagaaggaaggcaatttactaaactggtaattactgaactcagtgcccctggttcagcgtcaggttgagcaagacatccactctgggctgttgagggtttcagagtgggaatcagtggtgggtcaccttatcaccctgcaacgagcctctggaagcaggtacttccatctctgggcagagctccactttctttgagcaaggtgggagctagtgacaagcccccaaggctgacatggcgggcagctgctggacaagattcttattaaggcagcaaagtgtggtgttcaagcccaaaggctctgtctgggttcaagtgctgctgctaccactaacttatatgtggccttggacacaggaatcccacctactgtatttcggttttctcctctgtaaactagggataatgatattcctaccactccggttgtggccatcaaatgatggaatacatgtgagctattgattggttcattatttctaacagtaactgcaatttattgaacactcagtgtgttaaatgctttacatagatcacgtctttccatcatcccaataactgtaccaatgaatattattatccctacgtcacagataaggaaactgaggctcagagagaaacaaacaggtgaagaagcttgctctgttgcagattctaagggccaggatgcaatttcaagtcttactgggagctgagaacaggggagcaatgtggccaacagtaagataagaggtgaaggttaagattaagactcccagcagcttgagaagcaag

SEQ ID NO: 1882054 - DNA, 4001 bp, Homo sapiens
gcgtctcacccactgcacctgccgtgcaggatccctgagtctcacccgccgcacccgccgtgcgggatccctgagtctcacccgccgcacccgccgcacctgccgcatccgccatgcggaacccctgcgtctcacccaccgcacccgccgtgcgggacccctgcgtctcacccgccgcacccgccgtgcgggacccctgcgtctcacccaccgcacccgccgtgcgggatccctgcgtctcacccaccgcacccgccgtacctgccgcatccgccatgcggaacccctgcgtctcacccaccgcacctgccgtgcaggatccctgagtctcacccgccgcacccgccgtgcgggatccctgagtctcacccgccgcacccgccgtgcgggatccctgagtctcacccgccgcacccgccgtacctgccgcatccgccatgcgggacccctgcgtctcacccaccgcacccgccgtgcgggatccctgagtctcacccgccgcacccgccgtgcgggatccctgagtctcacccgccgcacccgccgcacctgccgcatccgccatgcgggacccctgcgtctcacccaccgcacccgccgtgcgggatccctgtgtctcacccgccgcacccggctcatgggagttgggagcagctgtgcctgttaagcaccagtatttaaaacagcacaccagatcaggtgcggtggctcacacctgtcatcccaacactttgggaggccgaggcgggtggatcacctgaggtcagaagttcgagaccagcctggccatcatggtgaaaccccattgctactaaaaatacaaagaaaaaaaaaaaaattagccaggtatggtgacgtgtacctgtagtcccagctactcaggaggctgaggcaggagaattgcctgaacccaggaggtggaggttccagccttggggacagagcgagactctgtctcaaaactttttttaaaaaaataaacagcatgccagactgaatggcagcgacccagacgcccctctccagccaggtggcacttgtccctgcggccagggctacggaggggtgggcagccccagccctgccagagacatggctgggagcatggggggtgctgggagctccaggttcccggacttcagagctaacaacccctgctcaggagctggggagctgcttctggcaccacggaggggctgggggtgcggctggggccatgggctcactttgcctgtttcctctgggccccagtggccgccccacctggccccctggcagggctggttctcccaggcagcattttgttactattttactaagcggttttatgacttggaaataacgttattcatacgactattagcaccaataataacccctacaaccttgaacccgcaaagcctcgtccaaacaagacaaactccagccatcgtccccgaagacacagccacatggaaactaagcccagtgtacaaaactgggcagaaaaccatccagcgtcacgcaggcctgcagccctcggcctaggaaaggtcctgcagggcaagaggaagaacaaccccacaggacaactgagttccacgggaactgacacagaaacacagaaggttgtcggtgaggcacgaagccgtgcctggcctcactcacagcccgacacaaaccaggagcaggtgctcggggcctctgccatacccagggctggggggctggggggctgggggactgagggactgggggactggggggctgcggggctggagagaccgcacctcccaggctgctgcaggggcacaggtggcttcctgggggacagcgtgacagtctctatccagctttatgtcttcccagcacccacctccaggagtccaggcccctgaggacctgcaaaaccatgcgctggggtcacgggagccggaagaaaccaggactttgcgggttctgacttcaagaccagtgttgtcggcgtgatccaagtggggtcagaacccacaaagtcccgggaccgccagcaggaccggaggggaaggcacagccgtggatccgggtgggctggtagcgagcaggcatggttccatccagcacaaggggcccaccagatccccaggatccagagctccatgcttgggggccgggggcaagcgctccaatgccaggcctccgcccatcaaccccgtcctctccaggcgtgaaggacgggacgagtctctgtccaggccctgcctatagctgaccgagggcctgtctgtcccacgtgacagctgcagcctggcctcactgaccagtgcccctctccccgggtcccgactgctgatgtgtggtttccagccgtgggaaggtgagcccatctggggagagcacccaaaacgggaggtgctcagaggtgcacccaccatggcaacaccactgaggtgtgaggtcctggacggggtcccgggccgaggaggacacgggaccatggaggacacggagatgctgatgccggctctagggcaacacccacacccgtgttacacgaggtgtccacaagcaacacacggggctctgtgctttctgtgatgtcctggcgattccaaaaccaagcctccttgaccaccccgcaaggcctggcagcccccgccacaatcgccaccaccttctcctccccacctccacctccacctcctgatctccccctccacccccacctcacgaggccacagccctcccgatctccacttccccctccacccccacctcacgaggccacagccctcccgatctccacttccccctccacccccacctcacgaggcccacagccctcccgggccgccccccacctcctccccacctccccccggcctcctcccctcaagccctcgggactcaccatctccaccacctccacctcggcgctgatgcgcaagtggtacaagaacatctgcaggtccttcttcatctggatgctgttgtcgtccacctgggccacggtgaagatacgcatccggcacttcctccacacctgcagacagggagggcatggctgtggggcctcagaggagcccgtcccggcccgcagcacgtggggtggccgtgctccggctggcgtgtccccgtcgcacgccccaccttgtgctggcgcagcaggaagggcagcagcatgagcatgccgccgtcgtgcacgatccaccacacgtcgatgtggcccccgccgaagcgctcctggttttgcggaaacgagtcgacgttcttggccaccagcagagcctggtgcgcggcggtggtgtcgcggacggtgtctgcggagagaggcggccgtccgcaggtcatctgaggccagggtgcggaaggggcctccccggggactcacagccagtgcaggggcgggcacggcgaggcgaggggggtccccacaaagcccccaccctcactccgtcagctcctccaaggaccagccagagactcacagcagagttcagctgctggtcatgtgtccagggaatcccccagcccctgcggggctctgggagaaggggagggagtgcctggacactttcagatggccgctcccagggccagggccttcgacagcctcagagcacacaccctcgggtcggtggcctcaaggcccatcgggacctgacagcgcacaggcctggggacgttgaggggacagcgaggagacagaggggacggcgaggagacagtgaagggatagcgaggagacggtgaagggacagtgaggggacggtgaggggacagcgaggagacggtgaagggacagcgaggggacggcgaggagacggtgaagggacagcaaggggacggtgaggggacagcgaggagacggcgaggggacagtgagggaacggcgaggggacggcgaagcgacggcgaggagacggcgaggggacagcgaggggacggcgaggagatggtgaggggaccgcgaggggacggcgaggagatggtgaggggacagtgaggggacggcgaagagatggtgaggggacggttagggg

SEQ ID NO: 1882055 - DNA, 4001 bp, Homo sapiens
acacacggccggctctccgtggtgttcccggagcactggctgcccatggggaacaggaggatgcactggcgggcgcggacttggacgccagaggcttcacactcagaccagtccgaccactccgaccagctctctgcagagaccagaaaaggggagatggggcggaatggccagtaagctcaatcatcctagactcactggcaagttacatatgtgatttctggattccaggattccatagcatatttttaatggttctgtgcatcagtaagatgtagttgtatcatctaacagatccagtacatacagtacacacgaggatgaataaaagtgcctgcgctgttatatatttgatcagatatcatgagcttaaaataaacattattttaacgttataaagtaattgtatttagacactcaataagtgaatccatgagacccagctgtgtgcagaccatcagcagcagcggtacataagtcatcaatgcagatgccattttgctatgggtaatgctcccctcaaagaaactcaaatgctttcctgaaacattcctgaaaattctccaccttcctctgtgctcaggcgagagaaataattgtgtgctcatgagagtcctgggttgctgaaagggagtctgaagctacacaattactttcttttctgttataaaaacaattccgcagagtcaacatgccaaagtcaggtgacccttgatgtagaattcatcttatctcgtgtttgctgtctctgaagagataaggtcaatgcacaagtcttgggtcaaggccaaaagaggggcattgaaaggatacttcatcccgaagtggaagatttactaggatgtgtgaaattcacccaggcatacagatgtgtgaaaagaaaggagtaagactcctatataagtaagaaggttaaaaaaaaaaaactctggatattgtttatggaattttaatcaggataaaaaggtatttttctatgcagtttgcttttttcccctttttaaatagaagcatccactttgtagtggcagggaaaatttgaaaatcaaacttgtgctttgctccagttaaagggtaaaatgtttccttagaaatgcagaaagtgccagtttttggaatgacagtgagaatctggctttaaggcccttttcaatatacatagaaccttctagaaagatgtgcaggagcaagctaaaaaaaattgtgtgtttcaatgtcaaagttagaccaagaaaagaatagctcattttcattccaggtcattccttcatgtcagtaaaccaagctatttctgggatggtggtggtggtggaggccccaagcgcctgcatcagccacagggagcttgaagcgaggagctcccacacccacgggcccaaggctggctcctatgaggtgcacttcacagcggtgctccctgctctccaccctgattttcaacaacaaaacctcagactctgttattaggctactggctttaagaatgctttgctatcaccagtttctgttgtttgctgtgctcctccacttactgatttgatgtcatgctttttctttcctttaattgcactacctctaaattacagcccatcgaccatggatgaagcatcctgcaagagtgcttagtgtccccttgtcacattttagaagtcattcctggaacacaggtctggagatctttggaagacatgtggctgcacccaggctggttttgagacaaaaaggctgcaggcgatttccccactcagacctccagactccatggggggcactaaaaatgttcgttctttcccacctttccttggactttctccctcaacacagcaaggtgtcacctgtgggtcactagtgttaattagcaaagtcaagaataaattgggatgtttcctaattagggagattgggtgttgtaacatgccatagattcagaactcgtgcttgaagcctttagcactctcccattgctgggctaaaggctttgaacacgagttctgaatctatagctcagtgagaactattttattatagatgctatgttttaaagtcacttcaagggtaatagcatgttgctaacttgcccacccccctttcagtacttaccatgatgcagtatcatcaattacaccatttatccattaaggaaagaggccaatttgtctgaaagctgtgcagtaggtgaggtgccgcttacctgggcagggctgcgtgttgcagagtgcctcttctgtgtgcagccccaggcagatgtcccctccataggccggggctggattggagcaagagcgggtcctcatatagtgtccaccgccgcatgttgctgaacattttgtccagggggaccagcaagaccacacgccatccactgtgaagaaacacaatgtcacagctcttctataatccaatcccaaccaagtgaaaggagttactaaatggaagctaagtggattctgtttagtaagggaaacaaaatggaatctgcactccagaaaggcttcagtgcataggcacacgtagcaacaaggcttctgacccctcgcagggctgcatttggagtcttcctcttggtgacagatccagttttacagattcctccctacactttttcagttccctttattcactgtttcagaaaacatttctaaatcaatcgtatctaagtacaaacatgacagcagagtgcacgagctgtcatagtaattccagcccctgagaacaaccatgaaccaccttgtacggttattgatgtaaagccccagccagctctcacctttgccatctaactagccagacaagacttaaagccaaggtaagtagttcaagtcacgagctcctttactaattggattatggtttactccctgacagtgggatagagaaaagctaacacgtcccatgaggaaggtaactgaagaatgctcggtaaattcaggcacagaatgaccaaattaagtacagccacacagacttgacactatgtttaaatgactatagagaggaatctgaaaatctgcagccatatgtcagattagatattaagggtgcagttttacaatgtgaaagttaggccgaactggttccttgactaaccatttccatgacagctcacaacccagcacatgtctctgcctgctcaagttagcctcctgaattctttaggctgggctcttggtacctgtagacccgcctgctgaatgctggggtcaggtggcccacctgaatctgggagactttaagagtcagtcctttattagctgatcttgctaaaaccaagacctcatgttggcttgggcttgtgacaatgtcaaatatgattttcagtttagctaactcctgactgtgcctctctcttactagccagatcttccttgttattgctgagtcccaggacaaagctacaggacgttgtcaaacaaggtattagatcctaatctggggttaagcacaaattgtaaccacagctaactcaattaaaaagctgaggagagactcactattgctgtatgtagacagtatcatattttaacattctttgtagcctacacaaagaaacaggagcaagaggatgccaaaatcattcagggcataagattgttttagctagaataacttagattgttttttaatatgcctgtcatgatgtattacatcattatggtgtaatgtttctttttagatattggcaaaggtaaaaagaaagcatttttgagaaaccagagcaaaaatatcatctttatgacaatattataatttgcagaaagtaaaaagaaaacaaaaatatttgaacccaatttagaaataagtttgcaatctaactggaaattttgtgattcaatagtttacacaaacttgcagaattcaacagtattttccctaaaagttatacggtatatcagacagttagaggaattgatcaagtatttgatactggctgtaatatcagcaataaaaaagccaggcatgtgttttcctagaactttaaaaattaaaaaaaaaaaaaagct

SEQ ID NO: 1882056 - DNA, 4001 bp, Homo sapiens
tggtatgtaagaataccttaccccaaccaagagtctgcagagccctcagatagctgtgactgcagacaaaaacccatctccatgacattttatctccacagccatagaggctgaaacaatctgttcccagcagggccatccttccttgaaagaaggaaaaaaaatagtctctgatgaaatgtaaataggaaaaaattaaaagtgatttatttttcagatttttttggaaaaaaaattagtcaagttaatcaagcagatctagcctagaaatgacatgtctgctgcatacgatgtattctcgtttgaaaataaaaaccaaaactggactagaagcataaagggcaacaacggctgggtgattttttccaataatagagatataaaaaagcggtttcttttttaatgttaaaattaagttgcatttaaattaggaaggaatgttcatggtcacgaattctaaaacacaacagctcaatgtcccatagaatcaaagggtaccctcaatattggttcatagaatgcgaatagctgtatgttaatcataatacaaaataagaagtaatttccaaacagtaccagtaataaataaaatgaacagttctgcagtttgtgagatcatttcatcagctgacaggagcgactgccaacactcctggttcccaaggtggtgctgaggtcccaagcccaaagtccctattaaattaccactgtaacagcccaaggagttagccctgatacttctattttctgcctggcccctgacttctgcttggcctgtcagggggcatatcagtagcctcccacctccaacagctctggttacacgccccaaaaggtgagcaatatcactttctcaactcagtgaaaataactttgaagaacaaatgtgataaagaatattctaactttgcacagtggaaaatgctttgagatctagaggtaaaaggcaagagattatcacctgttagcaacagacagacggatggtctaattgttccctatgtttttataaaactgaaacaaaacagtgtggaaagaaaaaacaaatattgaaaaataggtactttcctcatttggcttagaacaaatattgaggaataggtgctttcctcattcagctaccattaccaagatttttaaaagacacatgaggactcacaaaaacgactgggcaaatacccaactgccttgtggcttggccaaaagtctttaaggtacgctggtacacagaaattctaactactcagctattccatggcctatcaaaactctttctactactatacatctacagcttctatctgacatctgtttaaatatctacttcttggtgattttctttcttttttatttttttgagacaggatctccctctgttgcccaggctggagtgcaatggcacaatcttggctcactgcagccttgacctcttgggctcaagcaatcctcccatctcagcctcccgagtagctgagactacaggtgtgcaccaccatgcctgattaatttttgtatttttttgtagagacaggatctcactatgttgcccaggttggtctcaaactcctgggctcaagtgatcctcctgcatcagcctctcaaagtgctgggatttaagatgtgagccatcatgcccagcctcaagccttttaataaacatatcttagtgccttagaggaacctgaaatctatcgaattgataaagatggcaatgagctgactcatctgaactgatcgtgcagaatctcttaagaaaataagtgcctaatcttaacgttgtccgtgtacaggggctcacagaattgtgccttcatcttttctttctacagtgctatacgcaaaaaattaaaacacaagtaccagtgacatcatgttatgtaacctccataattaaaatctagaggttagggttagaaccctcacttgaatctgcagttagtattaaaaactaactaaatacaatctatgattaaaatactaattgcagatccaagtaagggtcctaactaatttttccaggacgaactaaacagatatcactggttaagacattaaaacctcttttccagactaacgcaatgtatgcatggttaacctaataaccatagcatgtttctctaagcaaataagttaaagtaaaccaaaggataaagtacacattgatgtgtgtttttccatgcacatgtgtattaggttttcttgacaaaccacccagctcatgacaaattaatgggtgctgtattaggtagaatgaacacctcatatgggattaagtctcaagctgtatatctggatttggtctcccaaaaaagaaaacagagttggtgactaagttatctctctaccaaatcttgtcagattacagattaaagggacagcgaaaaagaccaactagcagctttgttcttcctgtttgtgcttcttcatcaactcatatttgtcatttggattcatgcctttttggtaattccatttcttcatctatcaaatggggataattctggtacctacttcataaaggctatggtgggaattaataaattaattccatcttattaaataagatcaaataagtatgtcaagttcttggtattttagtacacagcaaatgctccctacatgttagctttcattattttattcagaaacaataacacagctgaatttcggcatgaacactggaatttgactgttgcatgccaagtaagagagcagattttcatattaattcttaaaattaaactgaaaaatgtttctgctttagagtgaaaccataaaccaaagtcaaaaccatcgatttgctctccatatgttctgactaacatccatgttcttttctgcttcctgggcccccagctaacctgcgtttcccacgtccctctgcagttaggtggggccatgtgaccatttctggccaatggaatgtgggacttttgagagtgtgagaatgtgggaagtctggtctccaaaaactcctgaccaaacctcttccctcacctgccagctacaggctgaaagtcagtgaagaactcagagggcctagaatacagcagaaccactgtctccaaggaacctcaccgacctgggctaagcagctgagcggtcaccactgtgcgctctggcagttcgcacactccagtccatggcttcttctttccgcgtgactctgacatactcctgttaacagtaacacctaagacttttaccaagggccactgctctaagtactgcatatacatcttagctcttttaattttctcaacaatcctctgagccaggtatttcttacagctgaggaaggtaaaacaaacattttaagtgatctgcctcaggtgcacagccaaggtaagctgatgaactggggctggatgcaaatagcagtccagccagccctagagtccatattctcagctgctagtctaggccttttaaagataaatgcacacatatgagacatgccgctgtggcattattcacctgagtgttacgcagggtcagtccaggcatagttgagaagaaggctgtggctgtcaataagggatccccaaagcccctgctgcgggcacatcccatttcctttgttaaccaggtatctcatcaggtagcagataactgggtgtctcatcatctcctttggcttcctagtgcttccaacttaaaggatcctctctgggcatcactaaggtttttggacctttgttgtatttctccttatatcaaaactgttgtcctaagacctattttttttgggagattctactcactgagtgctgataactcagtgatctgatacattgtatcaatgttctctttctctcagattatcttttatttcagaggccttcagggacaatgccataatctgaaatggtaacttgattgccaacagtttgcaacattcccaggtaggtgtaggagccatatctgtttggataaagaagagtatttgcatatctcagatcataccacgtgggcacctgttccggcataagataaatcac

SEQ ID NO: 1882057 - DNA, 4001 bp, Homo sapiens
aggattgtactagcgactctgcctatttacaaacgttgaccaacttctgcccagaccgccctcacagactatatagccctcataagtccccgctttgatttacgtctgagacagaagacgatgctatcttttgctcagcgagattaagccagctttctatgatcaacagacttctctcgtggtgtggtgcgtatgcggaggagacttcgacagcttaaaaatacaaaacggggccaggcgcggtggctcacgcctgtcatcccagcactttgggaggctgaggcaggaggatcacgaggtcaggagatcgagaccgtcctgccaacatggtgaaaccccgtttctactaaatacaaaaaattagccgggcgtggtggcgcgcctgtagtctcagctattcgggaggctgaggcaggggaatcacttgaacccgggaggcggaggtcgtagtgagccgaggtggtgccactgcacttcagcctggaaacagagcaagactccatcttaaaaaaaaaaaaaaaaaaagaaagaaagaaagagaagaaaaaaagaaaaaaggcctatatttgcaggactaatttcgaggccatcctgggctcaagcgatcctcccgccttggcttacccaaagtattgggattacaggcataagccaccgcggcgcatggcccgtttttatctctatttatgtatgggggaaacgtggaggctggtatttgtggggcaacatctcacaaaaatagactcttaaagtcaagagcataaaaaagaatatacggaagacaagtgtctcatatgacacaaagcatctttcttgacagggagtcgaaagcaggtcgtagcgagacaaaggcggaagcctaaccactaaatctcccagtaaagtgggagtgaatcagataggttttgacgctcacgaacgcctggggtcgtcctgcggtctcaccccagtttcgataaaccacattgttccctccagcacagcaagtctcacagcaagacgggggcaggccgtctggtaaacataaaatgcctaatatgtgctgcccgtgggcgagtggcctacagcaaagggtcatgcatgcacgatagcccgcggtgctggcctgcaggaattggtccacaggtacccgcctctcattctttctttgagagttagcgagggtgcaaacgttgtgagaattctgctcggggccttccacacacggatcggagaacaccaggttagtccaagttctaacacccactgttggtgaatctgctacccactaggtcttggtacagagaataccatttgtgcacttaggtaacacaacttgccttaacctttccaaaaagcgaaattacgcccaacgtggggctcgaacccacgaccctgagattaagagtctcatgctctaccgactgagctagccgggcggccatgtctgtattctaactttgtctctgaagatggaggttaccctcagaggtgtaagcacgtttccactgtgcaaatactaagaagcgcctgcgcctggctctgttctaggcactagagccgaggatctgaaatctacggattcctgtacatgtgatggctgcataggcttcagaagggaagagcaagagattaggtgaggggcgagacctgaatttacttgagtagtgctctccttcagttttgccccagtccgtgttcctccgaagcgcagggacacacatgtccttcctgccacgtaaggccggcctcgggagagaatctcccgaacagaccaaaacgtgtttccgcccggtttcgaaccggggacctttcgcgtgtgaggcgaacgtgataaccactacactacggaaaccaccttggctactttcctgccggcatcgtcctgaagacacacacggctgagacggccgggatagctctaggcaagcgcccttgtaggacaggcccggggacccctgccgcggccggctgagcggtgtccaggttctggagccggacttgtccaccgcagccgagtccgcaggtcctgtaatggcctagcatagttcacccacgagggttcgtggtttttggcgcgtttgatctgacatactcagaggcctgaccacccccctaggaagcgcgacgtccatctggagttttcccgcgagccgccttgagagcagggtaagttctgcaggcccagccctggcgtcacgctgtgtctggcactcactggagattctgtacataaatcatggccccgtcatttttctcgcatcaaacaacatttatttatttatgtatcgacatcaaatctctataaaaataaaatttaaagagctatttaagcatcaagtattatttctaccgcacaaagcatctatttttgcagagatgctgtgagaatgtagatgtaatgattcgtcaccacttcttcactgctgggcagttagggaagttcatctaaaccatgagacagtgtccggttggcagtttctacctcggatgcgaaacgccgactacagttggggaagggtggggcgtctgctgccctaacccgcgaagcgctttctcaggccccgcccccggtccgacccggacgaccctctgagtcctccacaacgaagtcgtctgcctagaagggccggaagtacttcagggcgcgccgcggacccaccccctcgcttccggcatcggctgtggggagtaccggctgcagtcggctgtgccgggagggtaggatggcgtctggccgatgcggtgatagcaccgaaagcagacggccgccaggcgctccccctaccccccgaagtttctccccagcggcgggggatgggggtaggcggttcctctgttctttctgcgttccccgcggcctcttaccacagagacgcgggcctccaccgtcctagccctcccgccctgttctctagtgcggactagagcgtctcctcgccatttcctgtcgccctggggccccgcggggaaaaagggggagtagcaggacagcggagggaagtcgcgagcttaggtggtgtgtagacgccggaagtgttgggaaggaggccggaagctaggggcggggccaggaagtgaggaggggcgggggtttatgaggagtccaagggagcattggggcagacttgtactcagagccacctgagggacttggcggtggcgcccagcactgtcccctcccctcgtagagacacggttgtcgtttgggagtagggaacactgtgttggggtgggttgtcggcaggacatctctctggctgctcttggggcgaggtgtggaggggcagggctgggggtggagccgggtcgccagggcgtcggtagggaagacccccgcccctcgcccccccaccgaacctctacactggctggctggacactaagatggctgccgttgccatgacacccaaccctgtgcagacccttcaggaggaggcggtgtgcgccatctgcctcgattacttcacggaccccgtgtccatcggctgcgggcacaacttctgccgagtttgtgtaacccagttgtggggtggggaggatgaggaggacagagatgagttagatcgggaggaggaggaggaggacggagaggaggaggaagtggaggctgtgggggctggcgcggggtgggacacccccatgcgggatgaagactacgagggtgacatggaggaggaggtcgaggaggaagaagagggtgtgttctggaccagtggcatgagcaggtccagctgggacaacatggactatgtgtgggaggaggaggacgaggaggaagacctggactactacttgggggacatggaggaggaggacctgaggggggaggatgaggaggacgaggaggaagtgctggaggaggttgaggaagaggatctagaccccgtcaccccactgcccccgcctccagcccctcggaggtgcttcacatgccctcagtgccgaaagagctttcctcggcggagcttccgccccaacctgcagctggccaatatggtccaggtgattcggcagatgca

SEQ ID NO: 1882058 - DNA, 4001 bp, Homo sapiens
acaggtgtgtgccaccatgcccagctaatttcttctgttttttgtagagatggggtctcactatgttgcccaggctggtctcaaactcttgggctcaagtgatcctcccacctcagcctcccaaagtgctgggattacaagtgtgagccactgcagctgtccttcttacactgttaaatgccttttctttaaactcttggcccacagatggtctttcaagacctcgactgcatcttcaggcactatcctttgctatgtttatctcaaaaatgtcccccgaaaagccaccatatttgctcatgttttcctctttaccctttttccttattctgagcagggaagacttcagtcttttccccctttcactttaccctttcctactctatgttgtcctgacacgcagcagcaagagaagggtgtcacttttgaaggcttgataagctacatgaacataaagctttggatagatattctagccctatatattaaacattattttatgttattttattttatttttgagatggagttttgctcttgttgcccaggctggagtgcagtggcacgatctcggcttactgcaacctctgcctcctgggttcaagctactttcctgcctcagcctcccgactagctgggattacagtgacctgctaccacatctggatcattttttgtatttttagtagaaacagggtttcactggtctcgaactcctgacctcaggtgatccacccacctcagcctcccagagtgctgggattacaggcgtgaacaaccgcgtctggctatattaaacatcaaagaggaccacgcaacaaggtcttggcaggttaactgttctgatcacctcttcagaggctctgccacaggggatactgagccactgtgtatgggatagtcccagctcctctcggtgggcagaaggaggagaaatttaataaaagaactttctccaactaaacctttcaccacttctccttcaaccaaatccaaaccctgtatttcagcagtaaaagatttattaaaaggctaaataaaacatttagtaaagggtaaatgcttgcacgaactattgagtactctcttggaaacatcatacagagagctgaccttcttgtaaaagcttcccttcataccattgtttttagagcagataaagagatgtgaaacccagcttgctgctgactcaggcctatggagaatcatactttgacggataggatgcaggcccttggcttttaaattagccattgagttttccatttcacctaatagcattcaacttaaagagccatactactaaagcttacatgaaatagactggtaatttacaatgctgatgtgttcatttaatttccactaacaggaatctaaatttttagtaaatcagatattcatgccagttggtcactgcattcattttttgccctagtgggatactttgcttgaaggttgttttaaataaagagtgttgtttggtgatagaatttactgtgccataaaataaggcatcatacctacttaaatctaatccatttcttacatgttcagctcatatttttatttcctcagggagtatctctctgtccacttcaattcccagagttgtctcttatccccaaattctggtatagcagttaacagtctctatactatatagctcaattagaggatgtacatagtatttatatgagctattgcctccaaccaacttataagactctagttaacaaaatgcttttacatactttcatgtacctctcattgaacttcctgtgaaggtggcaatttctatgtaaatctcacaaagcctagatccgagccttccacctatagggatttaggtgatgacaatcttttgcaaaaaaggacaactaaaaatatagatacccatagttacacacaaacactcactccacttctgaatgggatttaacatcatagtgtgggttgaaatgtgtgtgtgattcaatccacactattatgttaaatcccactcagagggatttaacaagcaaagtaaacaatcaaagtgtgatttgcttactttgtctttagaagtaagcaaatcaggtgatctaccttcaggatctgaaaaatatacacctgggccatcattagaagaaacccactgccatgcataaataattaaaaagaagacattgcctagctcttttcaagtgattagggccaaaaactgccccaaagtgtcaggagttgtttgtgtgtttggttttctcacacgcgcattggattttgcctgtggtcattctgccaccccttaagatctcttaaggaattaaaatgaggcatcgttagatttcattttgattttatattcaacgacaaggtcttcacaaggtcactattaatggggtgccacagtatgcccccaaaccatattttttgctgaaggttgatttcttaccttaacaacctattttttatttgttttaagatgagtaccgttgacctctgggatattataattgaaagaatacatctgcttatttaggaaaatgtgatgtagtaaaccaaaggaattaagttctgggccatatatttaattaatggtttacttaacaaacagagatttgtttctgaggcaattcaaccaaatctggccaatgggcattttcaaggcattgataaatgtactctgaaccaacagacgtagctctcctgagaaacaggtctgaaacccatgacaaagagcaagtcaaacaaggtagtcaaataaattctgtcctcttctatcttctttttaaaagactgaaattttagtttaaaatgagtccaaggagggagggaaataatctggggactttggggaaaattgcccttgagcaaatccccagattttaatttccatgagaagtaacaagttctcttaagaaaggcagcatgcataaaatcactttctacattcctgtcttgcattattctccattgggtattttttatgtatttatatacacttggaatatatgcaatgatccatatgtatgctaatcaaagttcttagaatgtattactctttgctctttcgtaaataaaatagtataaattgggagcatattttgtctctgtaaaaatgccaacaggtaagccggccctagagaaaaatggaccaaatcaagctctgccagagctctggagtttaactgaaagaaagaacatctgattcctgcccagaaagcaacactgaacacctcatttattttggagcagaggctgttgctggagaagctggaaggtgagatggagcaccctaaggttgccgagggcaccactgctcagtgtaaactcagatatctggaaaatgcaaggcttcaaagttaaggattggaaaggcaggaggtgagcaagcctgaggccctcctcagctcagggccttggccaagcgacaggagctggacaggggcaagagccaagtggaggagcagtgctttccgtgcgtcagctatccctccagaggagagtctaaccacattcccgactccagttctctttattctcataattcttaaatgacagaagatgatgccttaatgtgttatctacatcgttctgaaaaatacttgcatttccttccgtcacatctaatcaaattcattataaaagttcctgtttcgtaactacaaaactgctctaaagaatgttacttttttatttaaaaaaaatgaagggttactgggggaaagaaagtctacttatcaatacttcttttgactccaatgacaaagtaaaatatatttctcatttctggtccattctctttcaatataaaatgtctgtgcactcttgcttcattagacaaagcattcctttaatatcttggtctgtttttatttgatttaaagaatgacagttgcaaaaggatatctaacggaacactagaggtacacagcttggcacatacaaaatattctgaatgagttttcttacagatggatgattcttttaagtgggctcagttgtgtgctttccccagtttg

SEQ ID NO: 1882059 - DNA, 4001 bp, Homo sapiens
acacccgccttggactcccaaagtgctgggattacaggcataagccactgcacccagtcaaaaatgagttttttaatgcaacatcacataaagtaataacatagacaataaacgtttactgaatacttaaatatgggctgagcattgggttgtttcacatggaaaatccacacaacagccctataagacattaatgtacaagaataaaggtgggaaaaagccaaaacaattttgtaaaaacgagagaaatcaagagctgctataccagatcacaaaatacattaatgttcaataataaaaatagtactagttaaaaaaataaaaaaagggagactatatagcccagaatgataatagaacttaatatcctccttgttacactggtgctttttttttctgagaaagggtctcactctgttgcctaggctggagtgcagtggtgccatttcggctcatagctcactgcagtctctgcctcctgggttcaagtgactctcctgcctcagccacacaagtagctggaattacaggcatgtgctgccacgcccagctaatttttgtatttttggtagagacgggtttcaccatgttgtccaggctggtcttgaactcctgagctcaagcgatctgcctgcctcaggctcccaaagtgctgaggttacaggcatgagtcactgtgcccagcctacaatggtgctttctaaatgagtttatatttatgagtgatcttgtaacacacacaattttaattcctatgcaaacactttttgctcgtattatactaggcaagtgtggttaataaataggaaaaacaagttatttcactgtgctttttaatctcagcatcagattgatgttgatattctgctatcctgtcaatacattatctaaaacaataaaaacagctgcgttttatatataaaagtggctcccactgggtaccgtggcccatggctgtaatcccaaagttttgggaggccaagcagtatgaattgcttgaggcaagaggatcaagaccagcttgggcaatacagtgagaccgcctctcacagtagtagggaagacataagtaaaactcagtcatgactggcttgagttgtttaatgttggcactaattagcacagcaaaatgggtggtgctaatcttttaatttcctgcttggtttacgaatatttggattatattagtgcagtaatagagttagagtacctagttataattccatatttttaacatcatctctaatgttatagcctaggttttcattagcataggtttgttatagcataggtttatgttatagcctaggttttcattaataaaatctctggagtgaagcagctgctgctgaaatttgggggcaaataactgcagcctgctgggaataggacttctaaaaggaagtatgtctggaaggctgtggcccaaggccttttctgctggctaaaagcagggtctccagaaccaaaggaaacacacagctcttgttaaaattgaagatgttgacgcatgaggtgaaacagaattctctttgggcaagagatgtgcttatgtacataaaacaaagaacaacacagagactcctggcggcaaactaaacaaagccagagtaatctgggcccatggaaacagtggcatggttcgtgccaaatttcaaagcaatcttcctgctgagaccattggacacaaaatctgagtgatgctgtacccctcaaggatttaaactaacgaaaagtcaataaataaaagcggatttctgctcttgaagaaaaaaagaaaatctctgcagtttttataaaaattagtatctatgacatttaaaattatatgaccccacagaaactcaaacgtatcattaaagtggcattacaaagtaaagagaaaaggaagaacaattaatagatttcctaaagagaaaaaaatccagtcagtgtatttcgagggcaaggttaagcaagatacgacgcaccttgcttaaccttaccgtccaaatacactgactggaatcgttgctttcttgatggaaagaaaaaactcagttgaccatatgaaaataggaacattcaagtaccataaacatctggggaaaaaaaaaaaccctttactatgaagacatattaaaaactttttttttttttgcttatccagatggctaagatttgagaaattaaaattcatggctggcaaagttgtgacagaatagacacacagtggggtatacggttctataaatttcctagagaactatttggaatattgtgaaaaaacattaaaatgctcatatactttgaggaaaaaaatcactcctagtaattataacaaaaagaaacaaccttttattgacaaagaaagatattcactccaggattatttatgaggggaaaaaaagccaaaacaacctaaatattcaatggcagagaacagtctctctctctctctctatagcgtacacatatataatcgtcatttatgtaaatatggttatgtataccatgatggaatagcatacctccactgaagttttaaagactaatgacatggaggaaagcacacagcatacaataactgaaaagaacaaaccattaaatagtatatttaaaattttaagcactaactataggcaagatgtcatgttaatgtattatatattattaaatcaaattccttctcaaaccccctgaatacatgctatttagtatacggtactttcacagaaaagaacattaaaagatgacataaaaaatactaccagtgattactcagggtggtgaaaatgcggaaaatataaaattttctgcaatttagttttttcccacgagcttatattactttacttttagaaaaatgggcttaacattaagttaactaaattctgttgcatcacaactagtgggaaattattttttggaaaaaaaacaaaacttcacaatagagtctgtggttaaataacaaggattgttttttaaaaacaaaacaaaacaaaaaacaaaaaaaccccacaaaaatactgtgctgtaaattatccgaaatcaattataatttagaacaaaccatactcacataattttttttaaaataggcaattgctttttgaaaaatctctttaccaacaataaaattaagtctggcttctttagaatctcactccctgatggcaaaagaatgaattttataaaaatatgaaaatgaagaatcacttaagaaattaaagaacaaggcagcatttataagagggaacacttacttaggaagatgccttacgagtacatctttgcatattggctgttcagctaaagttagccaaaattcacaggcttctaaagccacattttcatcttgatcttgagtcctctgtagcatgtactggaaacacaatatccttaatattagtcagtttaaaaatcacaccattagtatcaattcagtcctattatcaagcaagcttttgaccttatggttttcaacctaggcaatttttttttttttttttttttttgagatgcagtctcactctgtcgcccaggctggaatgcagtggcgtgaactcggctcactgcaagctctgcctcctgggttcatgccattctcctgcctcagcctcccgaatagatgggactacaggcgcctgccaccacacccggctaatttttttgtatttttagtagagacagggtttcaccgtgttagccaggatggtctcgatctcctgacctcgtgatctgcccacctcggcctcccaaagtgttgggattacaggtgtgagccaccgcacccggccagaatttgaatttttaaagtttcctaggtgactataaaatacagttaaatttaagaaacactgatttaaactgctactcaatgaaaagtgttcagtgaatgtattgtttctgtgtagtttttttatgatactactgagatttttgaaatgtgaatgttaatcaaatattaagccttcttagaaacataaaaattaagaactcattatatatttcttaaaatg

SEQ ID NO: 1882060 - DNA, 4001 bp, Homo sapiens
cactgaagtactcagtaatataagtagtttcctaactttcttaccatcagagtgcacagacaattttgtgtcctgctttttgttttctaattcaacattacatcgaaagcatttccccacatcgctcccaagccttctctgcttgtttcatggctgcagaatattccatcgagggccaaatgtcccccacccttcgcctcctggcagtcactacagccattcccccaaaatggccaagtctgcgggtgcagagatccttagcttctggcaccaggaccagactcatacagataccctgtcactggtaaataataataataataataataataataaacaaataaaacctcttttgccaggaagaggtccccaaaccacgccagcgactaaatcccctgggccatcctcccatgaaagaccaaggccctgctggccttgggtgggtgctggccccagccagtgagccgtgccccccacttctgaccaagaattgaggccagggactctaagaagaagtgggggaggtgcggtttctgtgaggtggggactcagtggagacctttgcagttgcccttctcgttcatagaagggagaagggacagccctggcccaaatcccatggcttttttttttttttttttttttgagatggagtcttcctctgtcccccaggctggagtgcagtggtgtgatcttggctcactgcaacatccgcctcccgggttcgagcgattctcctgcctcagcctcctgagtagctgggactacaggcgcccgccaccacacctggctaatttttgtatttttagtagagacagggtttcaccatattggccaggctggtttcgaactcctgaccttgtgatccacctgcctcagcctcccaaagtgctgggattgcaggcgtgagccactgcacctggtcaatcccatggctttttaagttttttcttgaggcagagtcttgctctgtctcccaggctgagtacagtggcatgatcacagctcactgcagcctcaaactcccgggctcaagtgattctcccacctcagcctcccaagtagctaggacgacaggtgtgtgccaccacacccggctattattattatttgtagagtcagggttgctggggctggtctcgaactcctgggctcaagcaatccacccacctcagcttcccaaagtactgggattacaggcatgagccaccatgcccagcctaacccccatggttaatcacaggctgctccagccccaccaagactagagggcagtgtctttccagcagttagtcaaggaaacagtgcccagactcgaaatgcatggcagagatttggagggtgggtgatgagtgtctgtgggtggttagggaggagggaactctggctgtcagggtcaccactgcccagccttggcaagtctttctggaaggccggtcaacataagaactgcttcctgggtggctctgagatttacttcatgggctctggatgaaagcctgtgctttgctactgatttgtctgagagccttgagcaagtcactgtacctcccagaactgcagttttgtcatgtctaaatggcacgtgaccttagacccctgtctcaggctgctggcaggggcaatgagagcatagaaaaatcccggcagaagtcctggcacatagtagatgttaaataaacagctattcccttcccttccccatgggaaataacaagtccaaccactgggtaagcccctcacctccatctctttcatgctttttatttctacatcacagtttgagaggtggttaaaaagagcacaggcttggagtcagacctgggtttaaattctggttttgcttatttattagctgtgtgatcttgcggtccgtgtgatcttgaggtccgtacttaacttctctgttccccctgccccagcccccaacaacctagaaaagtaggaaaaatcatctctaccctgcaaggttgttgtgaggatgacacaaagcaaactcatcagacacacagtgtgtggcatgtagtaggtgctcattaaacacttgatctcctcctttaaccaccttatttagttcctttgactaggaaaggtttattcctgggtcagagatacctacctgtggcagctgggaaaatacgttctgaaacatttttctcccgtgtagggctcataaccttggccagcagaggcctcttgaaaaccctggggttgcttccccttggtgtccaaggacagaagcctatttttaaactatgccagcaggcgtcctaaatgcgccttgtgccatcccctgaatggtccccactcatctctccagcctagcccttcctttgatctaaaaagagcccaaggaaatggcagttaccgtcaggaggatggcaggaagcaacagctcccgatactctggccccgagacgccggcttccagcctgctggagttccgcagatggcatgctggctgaggttttcagcagattcctctccaccaggaaagggaattgccaaatgggagaatcgtctattctgcctcttcctttgaacatgaggattacactggagtttcactgggcctctgctatgtagtgggtacatgtcttggtttattgggtttaatcttcaggaaaactctgcagagtgggttttaccaccttgatttcccagatgaggaaactgagggtctgagaggaccaggctcatgccctttcttccaccccaccccttcttcaaggcagctgccataacttttgggttggcggggcgtggggaatggttcatggaccttgttagaagcaataaaatctatagaggcttccccgccagaaacatacccagactccatgcacaatctgatattcaacttcagggtttccccccagaaacatacccagactccatgcacaatctgatattcaacttcaggggcttcctggacctggacctttataacatgcgtccttggactgtagaccttgagtgagaaatctctggttcaaatgacatttgccccagtccaaaatgtaaaccagcactgttggcagtaggaagcaacatggtgctcatgtgtgttggggtgaggggggcaggctgtgctctagagagaggaaaaggcaaggctggtatttagcaaggcttcccgccatatccagaggggccaagatatcagtcacctttgccaacaaagttccattttccattggtgggtttaaaagtgggctggaaaaaaacataaccaggctgggcacggtggctcacgcctgtaatctcggcactttgtaaggccgaggtggacagatcacctgaggtcaggagttcgagaccaacatggtgaaaccctgcctttgctaaaaatacaaacattagtcgggtgtagtggcgggcatctgtaatcccagctacttggaggctgaggcaggagaatcacttgaacccaggaggcggaggttgcagtgtgctgagatcgcaccactgcactccagcctgggcgacagagggagactacatctcaaaaaaaataaagagaaaagaaaaaacataaccaacccttcctcacctctgccaaatggggcagtgacaggcactcaggagacagacaccagcttactggactttgttccctttttcagaggcctggttggccagcatccccaagggaaaagggccagcccgcgctggtaactgccactctgctccctttgctttgcaaacaaaaccccgtcaacagctgcaaggacatcccagagaggccagaggtcgcaatgctgcttgtggggagaaaagctcactccatccaggcctaagtggcagacctctcagcttgagtgggctctgatgcgagagttcccagggggtgaggtcatcccgacgccccctcaaagcatgctcagccagggctgggattcccaagctgactccgaccctctgccgggccccctgactgtggtctcttcttgataaagggacccaggaaactccaacttcagaggcgccggctcccaggg

SEQ ID NO: 1882061 - DNA, 4001 bp, Homo sapiens
gtcaatgttaggtgactaagagatagaagcaatgtctgtgttagttaagaatatgaacttggggatgggcgcggtggctcacgcctttgggaagctggggcaggtggatcacgaggtcaggagttcgagaccagcctgatcaacatggtgaaagcctgtctctactaaaaatacaaaaattagccgggcatggtggcatgcacctgtaatcccagctactcaagaggctgagacaggagaatcacttgaactcggggggcggaggttccagtgagctgagattgcaccactgcactccagcctgggtaacagagcaaaacttcatctcaaaaaaaaagaatatgaacttgggagtcaggtaaacttaaatttaacttttatcctttgccacttgttagttgaatgaccttaaacaaattacttactagtccaagcttattttctcatttagaaagtgggtctaataatagtacctacctcatatacttgtgataaggattagagataatgcctgaaagtacttggcacgctacttcagactttagtattcaataagtgttagctgcttttgttatctttccatatgctcattaatactatgtgggaatcaacccaactaagcgaccacagacagacctgcatccctctgagaaaaactcctacctcatccatctctgaagcaactgaagtctctagaattattcttggtacagatttgaccatttattagcttggtttccatggttacattagccaacctttgggctttcgcgtcttcattgtaaacaaagatggccactctatgtacacaccaagataatcacatgtgaaaatgattgtaaagagtcctaagagcaaatatgagttttcagtttatgctcttgtctagagagctaatattttaggattaggttagggagtgggaaggaatataaacatctgggagcactgtgtaatgtgtatccaaagacatttatcccaacatcactgactcatacacatcaatgaattgaagggtttgtcattcataacaattatgccaaccattctagctgcgtataatcagtaaacctgttttctttggaaagctgaagaagtcacatggtctccattttcattccagtgatgttccatggtggttttaaaaattcaggggctagggttagataatttaaaaaaggcccagcacggtggcttgtgcctgtaatcccagcaccatgggaggccaagccaggtggattacccgaggtcaggagttccagacaagcctgggaaacatggtaaaaccctgtctctactgaacatacaaaaaattagccaggcatggtggtacacacatgtagtattagctacttgggaggctgaggtgggaggatcacttgaacccgggaggcagaggttgcagtgagccaagattataccactgcactccagtgagactctatctcaaaaaaaaaaaaaaaaaaaaagagagagagagaattaaaaacaaaaaaaacctcaggctatatttctaccagtggacagtcatttttctcatacacagtaaagcagtgtatatataaaacaaagtaacatgaatggaaatgaaatagccaagaagggaaaagggaatagtggatacaatcatcttcatagttcaattaatattctaccatgccaagaattttgcatatattatctcaactcttgcctgtaagtagataccatcatctccatgttacacaggaagaagaaattaaggcttacagaggttaagtaatttggccaaggtcacagacctgtgaagtgcagaacactgccctcttttaatgtctgcttttcttgttttgttttcttggatggttgagtggaactggccactctgagttaccctctgtgttgacagaacatgaggtgaagtgacatttagagcattcgatgactcagtctcttcttgaactggcaaaaattcaagaatgagtttgtgccattgatactcattgtctgtggaatcccatacagttcttccctagctgtagatcagggtcaatctgcagtgacagaacattctacttctctaacataccatcagttttctcttatcactgtaatgatctgttgggtgaccttccatcaatcagtctgctgttcagtttccttcattgtcatttatgaagcgtatcctataagtaaagcccatttatactgggcacataggagacagaaaagtgaaagagattatccctgcctccccacgagaaactactctagtggaattgacatgaataactaggtaggtagagagaaatagatggatgaggagactatgacaaatatgagaataaaggctagaatagtttgctatacaagcaggaaagggagggtgctagcttgaaggtggggatctgaaaagccatcttgaagaggcagaatttgatctgggctttgaaagaaggatgaggggcaaatcttggagaagggtcgtgctaccaagcagacaggactgtcttgattatccagctcatagatggccatcttgtcctctttttcactgggctcaggaatagtctgagctgctttctccatactgcagcccaagggatcaccaccaattctacataactggttggtataaggaatgaatcctcttgaccatccctgatttacccctatagtggctctgcaggaaggaatgttaagccaagtaatcggggaattgttgtatcccacagacctgagtagatgactatttggatttagagagggtctttcaataaaaataaagtacacaacaaatataagtacctacttatagacatgtccttggaacctcttacctcattccttacctctctctcatctatgcttctcatggtactttatttaacagagacatttgttattcacctactttgtgcagggctctttgctaggtatcatacaaagatgtataaaatatgccatctgttctcgaggaaccatcaatttatggaagtataagacctacattcagaaaactatacaagtccatataatcagaaggtcatgtgcattggcattttgaagttctacactctcccatctctataaagtaactggcttgaaaaaaacaatctgcctccaaaatgtagggtatggtctcaggagaaagtgactcacacaaaaagatgatgactttttgttcttctgctgtctcagaatttttctatctgtatgattccacattcaaattcaagttttgagatgaatacccagttccctttgtattgggtgacattctatgctattaatctcaattgataattttatctgtgtaatggcttctaagtatgaaaaaaacaaaaaaattcctctccgatattaaagttgggaaccaaatagaataaatgttttacatctgacccaagcatgtagtggaaaaatacagaacctgtattttcaaatcatttaaatgaaacatgaaattgaaacagaaagtcaataaccaaattaatcatcttattacaaagaaaatgtaacctgcttcattactgtaatggcaaacatcaatagagtagaaaattgaccagttttcttacattagaaaaaaatctgattcctggttgcctaggaagctctactcatattagtctttattgcatcttctgtaatgaattaaagcctgtaaggtctcattagcacattactaatgtaagttttaaaagccatattaaataacataaaatgttacagtatgaatgttgtgaggctgagtgttaagagaacaaatttacattttactattttgaaagtgaacccatttggttttgaagatattcaacagcacatgtaaaataaccaagaactttatccaaattaaatagcaagttggaaataagggatgtaagtctaagagggaaatgttcaccttttatatctaaagcaagtcttcccagataaaccacttggctgatcaaatcatgggtcaagaagtttgatccttgctccatcaaattggattacaattaaggttctaatgt

SEQ ID NO: 1882062 - DNA, 4001 bp, Homo sapiens
aatattctgatggttccaggcttattgcttcatcctgtgtatatttggtaagaaattgttgggttttgaggggagtcaagaaataccaatccctttcctcatccaaattatgaattgattatgaagatcagaagaataaggaagacagagagtaaagtccatcatttcttactgacattggttaattagaaatgtgttttgggtcctgttagttaagtgggcttcctaatactctacccacaaattgaaagatttacacacccagtcacaaacacaactggatatccaccaaccttccttgtaagaacttgcccctgtaaacattgggcttagaaattctaagtaaaatgtgtgattttctgtgagcaactggatcttaaagaggaaaaagaaggaaagggcctgagacatttatgtccagtttctctttccctgctcaccaatatccctggaagagtgagtgagagggtggaagggaagaactaaggaatttccatccacatagaaggaaaaatgaatgggatataaaagtacccttattaaatgaccaatggaagcttttacttgggaagttaaaagaaaggcaacatcacaattctagccattggtcttgttgttagagtagatgccatatttattattactgtattagaagactcttctattgaccccattaaaggtgccttgaattttgcttaacatcatatctcagtgtcatggggaagcttcatggccttaaaaagagaagatgccccagaagtatgctttcattgaggctggtgagaagctggatttactttttggttcaggcacatttattaatagttgatgctttagagaaggattgtttctattatattgactgtggtttgggaagagtgtttaaaagtccaacagatattcctggcatgagaacttttaccatctatcactattttggcatatattttcaaaagtattaatcatttttatatttgcctgtaagatgccttcaaatattctgcagccagccctggttaaaaaattgaggaaaacattctttttcatagagatgtttggccattacatggttatcttgtcctataatgtctccctgacttttagtaacagctgtattaataatttgtcacatcaagagttattcccttcctttgaactcttccagtactatgtttgtacctgttttgtgatatttacttcatggcttgtcttgtccatactggggtctattcttaccagtcctataaaattacaggtttctaaaggtctggaatcatttcttggtcaacttttttatcatcacagcacctgtcatagagtaagtacacaataaatgtcttttgaatgcatgaataatcacatgaaaaaaaattgaatttcctgcctttttttgtctagattgtttgttgtgtttttctcttactattattctttcctacacaaatctgccactaaacgttcttcgctttcacatatttttttctgacataatctttgttgactaaatgatcctgctctatgtctatatcctctaatcttcagatttctagacttaaaatataacaataaagagaaaaaaattgctcagagaaaatatagtgatttaaaatactttttgtactgttttaaaatacctactttatcaaaataatacatccaaagtcattttttaaaaatcaagttgtatagaagagcttttggtaaaaagaaataattggccccacgtcttttgctagccctattttctctccctacttgcaaccacttttaacagtttttagatctttttatagatactgtcacatttctaaatatggggatatcataattaattgggtcttcatgtgatcaatgaggtgctagcttactttgactaccatccatgatctctcctttacctcctacatatacagatgttatttaatattaggttggtgtgaaagtaattgcagtttttgccattacttttaaatgacaaaaaccacaattacttttgcacaaacctaataataattgccattgtaacattacatcgcatgctttaaccttttattatctcacctataaatagtacctcttaacatttttaagttaagtgcccctatcattactgtgaacctcaaaaatcttagacaggtcttggttaatttacaaagtttattttgtcaaggttgaggatgtgcacccatgacacagcctcaggacgtcctgacgacatgtgccctaaatggtcagagcagtttggttttatacgttttagggatacatgagacatcaatcaacatacgtaagatgaatattggttcagtccagaaaaggcaggacaacttgaagcaaaagaaggacaatttgaagtggggagggggccttccaggtcataggtagataagagacatatggttgcattcttttgagtttctgattagcctttccaaaggaggcagtcacatatacatttatctcagtgagcagaggggtgactttgaatagaatgggaggcaggtttgccttaagcagttcccagcttgacttttccctttagcttagtgattgtggggctacgagatttattttcccttcacattactttcacctaaaggcacctatgaatacatattgaatatttgtgtcaattgggaaaagacgctgcttcaggtggactcaactcatatgggcatggatgataggtttttgatctttggtacaaagaaaacatgtctgatatggtttggatatttgtccctgctgaaatctcatgttgaaatgtactcctcaaagttggaggtagggccttgaattagtccattctcacattgctgtaaggaaataccagagactgggtgatttataaagaaaagagttttaatcgactcacagttccacatggctgaggaggcctcagaaaacttacaatcatgatggaaggcacctcttctcagggcagcaggagagagaatgagtgccagcaggggaaatgccagctacttataaaaccatcagatcttgtgagaactcactcatcatgagaatagcatgaggaaaccacctctgtgattcaattacctcccaccaggtccctcccatgacatgtggggattatggggattacaattcaagatgaaatttgggtgtggacaaagccaaaccatattaggcctggtaggaggtgtttggttcatagaggcagacctctcatggcttggtgctctcctcatgatagtgagtgagttctcatgaaacctggttgcttaagtgtatggcacctgtatctcctctctctcttgctctcagttttgccatttgagattcctgctcccccttcaccttccaccatgattgtaaactttctgagacctccccagaagcagatgtcagtgctatgtttactctacaggttgcagaacagtgagccaattaaacctcttttcttataaattacccagcctcaggtatttctatatagaaatgaaagaatgccctaatgcagaaagttgctatcaaggagtgagatattgctataaaaatacctaaaaatatgggcatcactttggaactgggtaatggatagaagttggaagagtttggatggcttaggagaagacaggaaggtgagggaaagtttgaaacttcttagaaactggttaaatggttgtgaccaaaatgctgatggtgatatgaacaatgaagtccaggctgatgaagtctcagatggaaattaggaacttattgggaactggagcaaaagtcatgcatgtcacgccttagcaaagaattttgttgcattgtcttcatgccctgggggtctgtgaaaatttgaactttagagtgatgatttatggtgtctggtggaagaaatttctaagctgaaaagtgttaaagatataacctggctgcttctcacagtctatgctcagatgcaggagcaaataaatgatttaaatttggaatttatatgtaaacatgaagcagaacataaaagtttggaaaatttgcagcctagt

SEQ ID NO: 1882063 - DNA, 4001 bp, Homo sapiens
ttaaatgctccatggtcccttgcaccataggaacctgcacattctgtcccttctgtttggcatatagcctcccttccctgaaccctccctaccagtacatgccttcatacatcatgtacctctccctcaggacacatcactattcataacacaatgtagttctcctccatcatactcatcattacagagatttaatacattttttgtgtaattttacatgaatatgtgtggttttaattaacatctatctccaatattttattgaaagctccattgtggaagaagtataatttttattaagtactatatctgagacatttgctttcatagtatctggcctatattaggcattcaataaataattattgaataaataaacttatggaaaagtaaactatgtgggtgcaaagttccaaataacttttggtggacaaccaacatgctagagtcacgagcagtagttctagacaagaatccaatcaatcatgcagttgggcatggtttatttttctttatattcccagagcctaccacaatgacttcacacagaagtattcaattaatgcttactgaaggaacacatcacctctattaggtctgtttcttgcttacatttaaatccatagcaagagaccactataagaaggctgagttacttggaaacatcaatttccctgacaggcggacagaaatctgaaaacatctgccctggatacgaacgcttcaggaagtttacattctaattaagcagttaatgcatgtttattaactactgtaaaaatatttcatcataagctcaacaatccccctttctttgaaagagcaaagagcacacaaaaaacaaaacacaaaacaaaaacatgtagatcttgtttttgttttctgttgtattatttttatcttcccaaagtgctgtcattttaattctaactgatctgtatttgaaatatagaatacttttaaatctcaccaagatcattttaatacctgtgttatttttaagattctttatcacatcatgttactatgaatggagaagtcctagggttgatgattgtattaaagaaagacactcgtcatataagcataaagctatggcagtgaaagtggaagctaaagctattgccccattgatgacacccataattcctgctcagaccaaggttctgtttcaccaatggaaagacaggaaaggagggaagatgtaacagatagatagatagaaattgatttatctccaaggcaagtttgcagataaactgagttatatattacaaaccgatgtacgaagcatagttctggcattaagagttggattcaacctctaagcttccaatagcacttcaatgtcaacaaaagcaaaaatgaacaagtggaattaaactaaaaacaaaacttctgcaaagtcaaggaaacaatcaacagagtgaagagataagctatggaatggcagaaaataactggaaaccatatattcagtaagtggttaatatttaaaatatgtaagaaactcatacaacttaatatcaaataaaaccaaacaagaacaaaacacaagaacaccaaaaaaggggaaaaaacccaagtaacccaagtaaaaagtcaacaaaggaactgaatagacatttttccaaggaaatcacacaaatggccaacagacaagtatacgaaaatgttcacaacatcactaatcatcagggaaatgcaaatcaaaactacaggtattaactcatacttgtcaagatgcatattaaaaaagacaaaatacaaaagataagtgttgatggggatatggagaaaagggaatgcttatacattattggtgaaaatgtaacttggtatgtctactatgaaaaatagtatggaagttcctcaataaattagaaatagaactaccatatgatacggcaattgtattaggttggtgcaaaagtaattacagtttttgcaattacttaaaaaaactgcaaaaattgcaattaggtttgcaccaacctaatattttgagtacatattcagaagaaataaaatcagtatgccaaaaatatctgcactcccaatctctgggcattttaacactttaagtaactgatctaagccaatgatccaacccatttatttaaactcaattatttcacaaaggctcaataaatagaagcccatctctgaagaaccattcaatgttctttatttctgtgcagctaacaactgtgaccagcaatgctgacaatcaacattttctttcatactatgtcttatcaccatacccccgaaatacatgtctggcatagtcaaaaccagaaatgaattgctttttaattaaataactagaagcaggaagggaaacataaaataaccaaaaaggaaatcatcatgaacccgtatgttctcttgaaaagttgccagcagcaattcatagcttaaaaaaaagcacaaaaatgtaaaccttccacttattatttatcacaatcttactaagaattaaatattatattctaaagaaaataaatattttagaacatctagtaaattatggaacaaaaggataaggaactgacatgtccaggctctttatctaccttctttttctatatcctcaggacaaagcttagagcaatgtatagctttttaatttttaaagatcagaagcctaaggctcagagaagttaagtaacttactttaaatcaatcagaaaaaaaacctataaaataagcatatttcacatagtctgaaggaggcacagactttttacattttttttccttcatgaaacagaacaagacagattggtttaagacattttacttaggcatcctaggggcacggtcaagcccagacaatattaagttaagaggccaagtctattttgggggccctcttctatttaaactctctctatatgtacttactagacttactagaaagtgactcttctttgatataaatttcctaaaattaagtagagaggttcaaggcctagaaaaaataagttcactaatgaaaatcaagttctaaaaatcatacggcagaaattgaaaaagaattgtttgaacatatttttaaacaattgctcaaggcttaggtatcagataaagttcatatgagggagaagaaaacagcacagtgaacacaagagtcagaatgcctttgtttaaattcaaatttctgaacttatggttgcaaatccttggactaattaacctcatcaaaactcaatatccatgtctataaatgaaggaaataatcataactccatctaagggtagtacttcacatagtgccttgcttataaaatgcactcatgtggtgtggcaaacaaaattgatcatcttggattgtctggcaaaatgctacctagaactgagggtcttaagaatctcccactttgtggagtttcttctcctaaacccaacttcccaatgattcaatgctttctttacaaccattaagagcacctcttaaggcctccaggttctgggcagctggcatttccatcatcccgtcccttagatgatacctaactgattcatgatggtttgataactgagccaaaaacatttctccactgaaaaggagtttacactcttataagaaggtagagtagcagtcaggcactatccctttgaaatacaaacccaatgaatgtccaaatgcttccccaaactccagcacccctaatcaatgggataattcaaaatgtaaaccatgtacttctttctgctaacggttgacttctaagcctctccagtaaagcctattcttaacctatttcatggggcattatagcacttacctttcccatctttgcaccattcagtaaatgttagctactcctgcttctactactacggcaccagctccttttataaaggaagctgcagaggaggagcactagccttgggtatgcccttcctgtaaagtcagctgtgtaaaatcttctgcctaaatgacaacaaatgttctcagttcattcttactagcactacctgggctttcttcc

SEQ ID NO: 1882064 - DNA, 4001 bp, Homo sapiens
caatatgtaacagataagttgaaaaataccttaaatcaggtcactaagtaggcaataagtaataactttctaaaaatttaaaaacacagaactgatcaaatacagtcaataagactgtattttgtgtttattatcaacctaatgttgtgtttgaaattgtataggccaatctaaattattgcaattcggtattaaaccagtaacaaattccacatgtgaaaaggacaagaatagatcttctttttaattctgtcagcataattggttagataatatttatcagcatcaaaagctagagcccagactacaattttgaaatccatacctgaatgtatctacctatacacaatttgatatttgaaaactgcaaatttttatggagtctatcaaaaatagaatattaacttgtgtttcatcctcattaggaaaaatattaaattgaaaataatgcattgataaaataatggaatattcacactgtttcagtataacatgttccagcttttatcccaactgtacatgttatggtttaaaatttagcaaaattttacattcaaacaataatttagtttatatacatgtatttctttctatgtaaattgatttttttgagttaccaaatccatgtaagctccttgtagaaaatttgaaggaaaaaaaatctaagaaaaacattacctataatccatccacataaggataattactgctataacatgcaacatccttttgcttctctggctgatttggatcttaatatatgttacattcacatatagacatatacaaattatttttcatcagagaggttatgttttatttttaatattattaatttcctttcatccttcctttcttccttccttccttccttccttccctcctttcttccttctttccttcccttttgttttattattatactttcttctgttgtatgaaacattcactctggactttatgtgttaatagaacatttataactttttaataaatttgatagcctctgtagatctcactactctctcacatacaaaacagagcatgaaagctctgttttggctaagtgaggtgtcttatatactcttgctccaaaatattagttcaatttcttacttcaaacaaactgaaaatttggaatgtctctacccaccaaatcagtgtgctatagaaggctatatttatagtcagaagacacagctttgtatctgtgatatgtttataagtacttgagaaagctgcttcacttctttggagcccagttaacaatatttaacaagaaaggttgtaatgctgtaaaagagacagtaaaggtaaaagaacataaagcttgacatataataagcaatactacttggctctcaacatatcccaaaacaatcattcttcagtcccactcacaaacccacttctctcttggaaccttctgtgactacttattggctggacaattgtggtaacgtcgtttaacctcaatggacatgtttccttaattctgaaacaaacatttaattctatggctttggggtttcctctataaaattcaattgcagtttcaaatcttctctctccgtgaaattgtgtgaaacactcttattccttgtctccttcctcctcaccattttgttccctttccttccttcaggttgtaacacattgcaaagaaaagaaggtacctaataaatgcttattgattttaaatcctgtaatattttagattttatctcataataaaagcagataataatcacccgatgagtcaaaatacctgattatttcaagcaaccacagttttaggaacaaaaatgttatatttaacaacgttgatactaaggagagctcacattcaatatattgacaaacaaggaatattggtttgtgtttatatttaaataaagaagtctaaaagtttagaagtattacattggtgcaaaagtaactgcagtttttgctattgaaagtaatgacaaaaactgcaattaattttataccaacctaataatgatagttttttctcttaaaatgttattcttcttccaaaaatcaaatgtgacaatttctagaagaatttgaatatcaaggatggaatctcactgtgccaacagttgtaatttaatgttatattataagcaaagtttccattaatgagcccagaaattcttctatctggaatgtgagatgaagtgtataacaaaatatacctttgtattcttaattaaggagtctcctctatttctcctctcatatttgtcttccagtaactgagatttgtgctgcattccactggaagtctatgtcaagggttaaaaaaatgtcttttggttcttccagtctgcagtaatttgagatattataaaataattggctttttttctttttttttttttgagacagagtctcactctgtcgctgtgtcacccaggctggagtgcaatggcgcaatcttggctcactgcaatctctgcctcccgggttgaaactattctcctgcttaagcctcccaagtagctgggattacaggcgcccactacaacacccagctaatttttttttttttttttttttttttttttttgtatttttggtagagactgggtttcaccatgttggccaggctggtctcaaactcctgatctcgtgatccacctgcctctgcatcccaaagtgctaggattacaggcatgagccaccgtgcccagccagataattggctttctattagtaatctttgcaggacatatctgcacattctcaactctagagtcaccccagaaacctaatagagaccatttatgatgaccttatttttcccatcaaaaatcacagtatggagcaataaataaatgtatgttttttgagattccatcattcacatttgtcaatatgtccattcattcttatgaggagtatatgtgtgtcagctacataacatgaaacttaaagcagtcatccgtggacatattgaaatagaatatctgctgttttcttccctactgttaaaatagtcctttcattgtattctagtctgcagtatattacataaagcacaaacaagttaattctgttttgaaattattttggtacagttcatgataccttttaagattatgagatggcttgtgtttgtcagataaagcagggatgatagtaaatttcttaaataaaagtggaacttccagcactgaacttgctgagaataattcactctgccatgaagtaatccttatagtatgccagacagacaataagtgatagatcttaaatcttcttctaatgtgtgtaaataaagggacagacagacatatttaacatgatttggcaagctaagagtaaacctagggataaaaagataagcgattactaagaggtagcaataagaataatttattgagagtatataatgggccagagacagtgtaaagagctctatatgtggtgctttttcatttaatcctcaccaaaaacctgtgagtagatgttatgtcatagctgaggacactgaggcttggtggtgatgggaaagaaaggataaataatcagttgaaggtcacagaaattgtaggtgacaggaccaagatttaagctcacatatatctggctataactattttaattttaactttaaaaaattgtattctttagctacttaagaacattcagcttggaatagcaagtccttaggatcatttccaacatggagttaataggtggaaaaaataaataatgatctgtatggtgttatggtgattaacaggccagtatcaatagtggttttttttctatgtgtgaagctttttgggaatttttttcaaaggtaaataagagaggactagtataaaggacccacttttctcatgtacactctcaaaagtgcttgaagtcagaagacaattttgtactttcactatatattttacttaaccacattgcaaatgacaaaggcaatgacattgtaccaaagggtatgaatttccatgcagaattgcatgatgcctctgaag

SEQ ID NO: 1882065 - DNA, 4001 bp, Homo sapiens
ttctctgtgtccaattcagtttggacaaaatacattttggggagaaaaatatgcaatatatttcttgctttctttggaaacaggtgttgcaaattctttccagaatcacatgaaaaattctcctactaatcaagttgtgtgttatttctgaacagaaagggttctcttccccttctttacaaaagatcattagatgtccaagagtaaagaaagtcattcaaaattttaccaacttaataagcaaaactaaaaagtttgccagataagacagcttgtttcctctgtaggtcaagtatacagactccatcctgattatcattcctgatcatttggcacatgtttcatgtctagcacacacctagacattcatatctggcactcagaaaagaatacagactgaagatgaatatctggaattatcagttataaaggaaatagctgaagccatgagactttaagattgctcggaaaaagtggcatgagccataatcttggaaagaaaagagaaagtcaacagccaactaagaagaaatgaactaccaggaaagtaggatgaagagtatgaaagggagcagggaaaatgaaggagcacttttcaaaaatgttaatagtagctactttttacttaacccccaccttatgccacgacagcatgctaggtgttacagctttccaatccttcaataagtttaaaaggtaaatattattgtataattttgaaaatgaggaaacctgcccaaagccacgtaggttgcagaattgagattcaaacccaattgagtcaatgagaccgagagccctctgggttcacctggtcttagtgaatccagcaggctctcagtctcattgagtagtaaaagaacaaagtacagataaaaggtcactgatgatttttttagtccacctatatctgcacactgatcactgaaaacttttttttttttttttgagacaagagtctcactctgttgcccaggtgggagtgcaatggcacaatctcaactcactgcaacctccacctcccaggttcaagcaattctcatgcctcagcctcctggagacctgagatttcaggcatgtgccaccatgcctggctaatttttatatttttattagagacagggtttcaccatgttggctatgctggtctcaaactcctggcctcaagcaatcctcctgcctcagcctcccaaagtgctaggattacaggcatgagccaccatgcctggtctaataattcttgacagaaggccatgcccagttcgcatgacctccccaaagggacccagggcctgctactctccacagctatacaaatgaaatatgaagtttatttcttcccacttcccattctctttggccctgatggaaaagatatggcaagcaggaagaaagtgagataagacactgtgggcacctctatgtgtctggcaccatattgaatatttattttcatttaattctcataattctaaaacacatgatccaagaaggcacagacatttctgttttgttcaccaatatatcccaagtacttaagtcattgcctagaacaaggcaggccttcaacaaatatttgatgaatgaacagtcatcctgcaaaacaggtattattatccccattttaaagatctgggagtggctcagaaaggacaagtaacttaattaaaatcatacatataataaacagggtgaaattaaaaatatttaataactcatacttgtaccagcatcggccactcagaacagacactagctggtgctagaggagctgggttctgcttcaaacttttagctgaggtatcatagggaggtccatagaagggactaagacaatgaagagtcatggggcaggggaagtgaagacccaggtgtacactggctgtcagcctcaatagttaagtggtgcactcaggattccaacctgtacttatttgaccctaaaacgttctaaataaagtgggtaccatttagaagatttcagagtcagataagtgaggagagcagagaacaactagagcttttaatagagtagaaaaaaactagtcaaaacaactacaatgtgaaatggaattagaactgaatttaaaaattggtaactgaactcaatctgctgttagacaactaaaaaacaggatgatttcactaaagtaacgtagaggggaatgagtaacaaagagaaataaatgtgaatgggcaaagcaaaactacagcatgaaggttttcaatttcaggtaaacaatttgtgtatgtttcaataagaaatgaaaaatcaacactggttcttgagcaagaaagctgtgcttcaggacaatgaatttgtgcaaggtattggtagggaaggggcagagcctggtggcaggtgagaggtatcagtgatagcactgtacagtatatttgagtgtgattcacagagatgttatgaaaagtgttaacaggcaagaattcaaagaacagtgcaccctcaacttttagaggcacctacattctggtcacttagcttacagtcaccatctctctgtggctgacatggttttattataaaaagttcttcgttatcttttcttttttattttaaaattaggataaaagggagaaaaagcagttgggatataggatataagtgacacttaccaaagatggtttttacatttgtagttttacgtcagtaattgcctacaatatcctcaaccttggagtagcttagttcattaagacacttaaaataaatttgtgtatatatttaatgagcttttaaaaaatcacgagctattagggcaagttacttcactatggactctcacatttccacacaaataaaaaacaagttaacctatttatttatacactaacaaaaacaaaaagcaaaccttctcacctgttgttcccttcccagaaaggcacaagaaaacagtgccaactggccaagaacaacattaattccttccactccctcatggtacagctgttcgctttctttctcttcccttttaagatggcaaaggtcacaatcagtagtaaaccggccacgtgatttttatatgtcaaaagcaaggagataactgaggtaaagggtactgggagagacagctgatttttttcaattgtactttctcctggccacttatcgggaaactatttagggcttccatggtatttgaagctataacttaataacttctttgccaaaaaacattctgtttacatggaactagggttagaagtgatataagcacatttagaaagggacaaaaacctacagcaaaactgtacagtaacatttacatcacagtacttggcataatcaaaaacgcattatgctatgtgaaagagactagactcaaatggctacatactatatagcctttatgattccatttatatgacattatatgacattccatttatatgacatataggatagagaacacatcactgtttgccaaaagtcaaggctggtgggaggagctgactacaaagaagaagaatgagggcactcagggaggtaacacaccaattcagtatcttgattgtatctggttacaggactaaattccatattatctgaattcacagaactgtacactaaatgagtcaatcttactatacatttttaaaacacaacaattaaattttagcttaagcctcatctcacctactcctcatacctatttcaaacctcttgacatgctctacacaatgaccccaccccctccacctagctaatgcctacttgccattctagcttccattcagctactggtggaaccaatcctttggtgtgccagggtggagtactggacagagttgggtagtcaagtatatctggctgggtttacttctggctttctcccagttactacttgtgggagcttgggcaaattacttacctgtctgagctcagtttcctcatctggtaagtaagaataatactgtgtacatacctcccagaactgctgcaaactaagagcctagtaatgtgcctaacttagtgcctggca

SEQ ID NO: 1882066 - DNA, 4001 bp, Homo sapiens
aggggttgtaaacccccctgtgatgttgtttgtaatatccagggaaggaagatgatgatattactcccaatatcacagaaggtgtataccctctgtgatattgtttgtaatatccagggtggtaggggatgatattactcccaatatcacaaggggtgtacaccccctgtgatattgtttgtaatatccggaagggtagggaatgatattacttccaatatcgcagggggtgtatactcccctgtgatattcttcaaaatatctagaaaaaaaaggggatgatatcactctcaatatcgtagggggtgtactccttcctgtgatattgttcataggaggtgtacgtctgcttgtgatattgttggtaatatctagggggcgagaggatgatattactcccaatatcacagggtgtgtaaaccccctgtgatgttgttaataatattcagtgggggaagaagatgatattacttcttcttattagacaaagggatgatattacctccaatatcgcagaaggtgtacaccctctgttacatttttcataatatccaggaggggaggagatgatattaccctcaatatcacagtgggaatacactccctataataaggtttgtaatattagaaggagaggggatgatattacatccaatatcacagggtgtgtgcaccccgcagtgatattgtacgtaatatgcagggagaaagggaataatattagtcccaatactgcagagggtgtacattcctctatcatattgttcgtattatccggggggcggggatgatattactcgcaatattgcaagaagtgtacaccctctctgatacttttcataatatttagggaaagaggggatgatattactcccaatattgcagtgggtgtacaccccaatgttatattgttcataatatccagaaggagataagatgctattacacccagtattgcagggaatgtacaaacccctgttacattgcaagggttgtacactcccctgttcataatatccaggggaagagaagatattactcccaataccctcatatcctacggagatattactcctaatatcacagtgggtttacatcatatgactacaccctgttatactattcattatatcatagggagatatttctcctagtatcacaatgggtgtacaccatgcatgtataccctgtgatattatctgtaatatcctaggaagatattactcctactatcacagtgggtatacaccatgtgtgtagaccctatgatattatttgtaatatcctggaaaaatattactcctattaacactgtgaatgtacaccatgtgcatataccttgtgatattatttataatatcctagggaggtattactcctactatcacagtgggtgtacaccatatatgtacactttttgacattatttctagtatccttggaagatatcactcttagtatgacagtggggggtacaccatgtgtgtacaccctgtgatattattcacaatatcctagggagatattgtgaatatcacagtaggggtacaccatgtgtgttcaccctgtgatattattcataatatcctagagagatactactcctagtatcacagtgagaatacagaatctgtgtacattcagtgaaattatttataatatcccagggagatattaatcctagtatcacagggaaggtacacaatgtaagtacaccctgtgatattatttgtaatatcctagggaaatattactcctagtatcacagtaggggtacaccatgtttgtacaccctgtgatattatttgtaatattctagggagatattactcctaatatcacagtgagtgtgcaccttgtgatattcataatatcctagaaagatattacttctaatatcacagtagggtacaacattgtgtacacctactgtgatattattcataataacctagagagctattactcttaatatcacagtgggtatatacaatgttatataattagtaatatcctatggaggtattactcttaatatcacagtgggtgtacaccttgtgtgtacatccattgatgttattcataatattctagggagatattacgtgtaatatcacagtgggtgcactctgtatgatgttatttataatatacttggcagatgttatttataatattcttggcagatattattcctaatatcacagtgggtgtacaccttgtgagtacaatctgtgatattattcataatattccagggatatattaatcctaatatcacagtaggtgtacactctgtgatactattcataatattctagggatatattactcctaatatcactgtgggtgtacaccctgtgatattatttttaatattctaaggagatattactcctaatatcatagttggtgtgcaccctgtgataatattcataatattttagtgataatattttttaatatcacagtcagtgtacaccctgtgatattatttgtaatattctagggagatattactcctaatattacagtgggtgtacaccctgtgatattatttgtaatatcctagggagatattacacctaatatcaaagtgttgtgatattaagtgtaatatctccctaggatattatgaatcatatcaaagggtgtacaggcactgtaataggatatcgccctgtgtgtatacccactccgatattatatgtaatattctaaggagatattactcctcatataacagtgagtgcacatcttgtgtataccttgtacactcactgtctacaccctctgtgatattaggagtattatcttcataggatattatgaataacctcacagtgagtgcacacgctgtgtgtacacccactgtgttcttaatattctaggaagatactactcttaggaagatgtcacaggatgtctacacatgctgtacattttctgtgatattaggaatcatatctccctaaaatattacaaataatgtcacatgatctccacacatgatgtacaccccctttgacattaagagtactatctccctatgatattatgaatgatgtcacagaaggtgtccacagacagggtacaccttctgtgacatagaagtaatatctccctaggatattatgaataatgtcacgaggtgtccacaaacgttgatcacccccgtgacattaagtgtaatatctccctaagatattacaaataatgtcacagggtttccacacatggtgtatacccccggcgacattaagagtaatatcttcctagaatattatgaataatgtcacagggtttccacccataatgtacaccccctgtgacattaggagtaagatctcgctgtgtgtgtgtgtacacccactgtgatattattcataatatgctatggatgtaatacatctaatatcatagagggtgtacaccctgtgtgtgcaccaactgtgatattatttgttatatcctagagagatattactcctaatatcacagtgggtgtagagatattacccttaatatcacagtgggtttacatcatgtgtttacaccctgtgatattattcttaatatcatagggagatattccttctaatatcacagtgtgtgtacagtctgtgatattattcatatcatagaaatatattactcaatatcacagtgagtgtacatcataagtgtacaccctgtgaaaatattcataatattttagagatatattacttttaatgtcacagtgggtgtacaccctgacatattatttgtaatatcctagtgagatattgcttttaatgttaatgtgactgtacaccctgggatattatctgtaatatcccagggagatttttctcttagtttcacagtaagtgtacaccctgggatagtatttgtaatatcctaggtagatattactcctaatatcacagttagtgtgcaccctgaaatattattcatagtatcctaggaagatattactcctaatatcacagttggtg

SEQ ID NO: 1882067 - DNA, 4001 bp, Homo sapiens
accacatgatccaccaatcccacttatgtgtatatagtcaaaggatgtgaaatcagtatgttgaagagatagctgcactccaatgttaagtgaagttttcttcacaatagtttagttatcaattcaacctaagtatccatcaataaattaataaagaaaatatcgtatatataggcagaccttggagataccatgggttcgatttcagaccaccacaataaagcaaatattgcaataaaatgagtaacacaattttttgtttcccagtgcatatacaagctatggttacatcatactgtggtctattaactgtgcaatagcgttatgtctaaaatgagtgtacataccttaattaaaaaatacatcattgctaaaacataacaatcacctgagccttaagcaagtcataatttttgctgatggagaatcttgccttgatgttaccggctgctgactgatcagggtagaggttactgaaggctgggatggctatagcaatttcttaaaataaggcaacaatgaagtgtgccacatagatggactcttccttttatgtaagatttctctataccatgtaattctatttgatagaatttagaacttctttcaaaattggagtcagtcctctcaaaccctgccaatgctctatcaactaagtttacagactattctaaatcctttgttgtcatttcaaccatgttcactgcatcttcaccaggaatagattccaccttaagaaaccacattcattgctcatcctttaagaagcaactcctcatctgctgaagttttgttttttttttttttttttgagacagggtctcctcctgttgcccaggctggagtgcagtggtgtgatcatagctcgttgcagtcttgacctcctggactcaagtgatattcctattcagctccctgaatagctaggactacaggcacgtaacactaaacctacctaaatttttttcagagatggcgtctatgttgcccaggctgatcctaaactcctggccttaagcgatcctcccacctcaatatcccaaagtgttgagattacagggatgagccatcgtgcctggctctgctgaagttttaccctgagattgcagcaattcagtcacatattcaggttctacttttaattctagttcccctgctatttctaccgtatctgcaattacttcctctactgaagtcttgaacctctcaaagtcatctgtgaaggctggaatcaacttcttccaaactcttgttaatgttgatattttgacctcctcccatgaattacacatgtccccaatggcatctagaatggtgaagcctttccagtggttttcaatttactttgtccagatccatcagaggaataattatctatagcagctatagccttatgaaatgtatttcttaaatgataagacttaaaagttggaggcattctttgattcatggactgcaaaatgaatgttgtgttagcaggcataaaaactatattaatctccttgtacacctgcatcagagctcttgcgtgaacaggtcactgtcaataacagcaatatttcgaaaggaaatctttcttctcaacagaaggtctcaatagtaggctgcaaatattcagtaaattatgctataaacagaggtgctgccattgggctttgctattccatgtgtagagcgcaggcagaataggtttcacataattcttaaacactctaggattttcagaatggtaaatgggcattggcttcaacttagttaccagctgcattagcccctaacaagagtcagtctgttctttgaagccaggcactgactgctctctaactacgaaagtcctagatggcatcttcttccaacagaaggctgttccatgtactttaaaaatctgtccttttgtgtagccaccttcatccattatcttagctagatcctctggaaaacatgctgaagcaagtgctgaatgacgtagaagcttcagcatgttatccagaagacctagcttcaccttgtacttgtagtttacggagaaagctcctttccttaaacctcatggaccaacctctgctagcttcaaactttaattgtgcagcttcctcacttctctcagctttcatgaaattaagacgagttacagccttgttctggattaggctttggcataagagaatcttgtggctagttcgatccatctagaccactcaaactttctccacataagcaataaggctaccttgctttcttatcatttatgtgttcaatggagaacgtttagtttcctttggaccttgtcctttgcatttacaatttggtaaactgtttggcacaagaggcttagctttcagcctatctcggctttcaacatgccttccttactaagcttagtcctttctagcttttgatttaaagggagagatatgcagctcttcctttcacttgaacacttagaagacattgtagggttgttaaactgtcctaatttctatattgttatgtctcagtgaatagggaggtctgagcagagggagaaatacaggggaatggctgatcagtgttgtagccacagtacacacaacatttattgattaaattcattgtcctacataggcgcagttcatggcactccaaaaccattataatagtaacaaagatcactgatcacagatgacagaaaaagtttgaaatattgtgagaattaccaaaatgagacacagagacatgaagtgaacacatgctgttggaaaaacggtgctgaaagacttgctcaacaaacggttgccacaaagcttcaatttgtaaaaactgctgtatttgcaaaatgcaacctagcagaacacaataaaaaggagtatgcctgtatatacactggagtaccagtcagccttaaaaaacgaaatcttgtcatttgcaacaacatggatgaacctggagaacattacagtaagtgaaataagccagtcatagacaaatattgcatgatctcacttatctgtggaatcgaatacaattgaaatcaaagaaacagagaataaacggtatttgcccaaggctggggacaggatgagaagggagacattggtcaaagggtaaaaagtttcagttaggaggaatacatttttgatatctactgcacagcatggtagctacctttaataatagtgtattgtatatttcaatattgctaagagagtacatttcaaatattcttaccacaaatattttacatatctgaggtgatggatatgtttagtttgacttaatcattccactttgtatacatatatcagaacattactttgtaccctataaatacatacaattttaatgtgctaaattacaatctaaaaattttaaagagaatttggcctggcaagatggctcacgcccataatgcccagcactttgggaggccgaggcaggtggattgcttgaggtcaggagttcaagactagcctggccaatatggtgaaaccccatctctattaaaaatacaaaaattagccaggcgtggtggtgtgcgcctgtagtcccaggtattcgagaggctgaggcaggagaatcagttgaacccaggaaatggaggttgcagtgtgcggaaatcacaccactgtactccagcctgggtgacagagcaagactctatctcaaaaaagaaaaaaaaaaaactaaaaagaatttgatttagaattttcaactttacttttttcaaagctatatgcaaaatgagaaaaagaaaatagtgagagaaacaaagagacagagacataaggtacgagcaagagactgagaccaaggagcagaggctaaaaggctaaactgcaaagtcccaataacactttttaaacctatagttccaataatgctgaaagtcagctctatttcttgaacttcccgggagatgagccaaaaaacatgctgttttgtttaagtgaacttaagtgagatttctcttactttgaactctctaagacaatgttattttctggtacctacaataatcgttt

SEQ ID NO: 1882068 - DNA, 4001 bp, Homo sapiens
acgtaagaaacgtctgtacaaatcaacacataagaaaaaacaagcaatttaccacaaaagaagtataaatagccaaacatgaaaacaattcaaactgaaacaaaatggctatcacatttaattggtagagattttattaagctgtagcaggggttctccaggtgcaattcagggacaccaagtggtcccggagaccctttcaggagatccatggggtcaaaattattttcacaataaggccagtcgtggtggctcatacatgtaattccagcactttgggagaccgaggcgggcagatcacttgaggccaggagtttgagaccagcctggtcaacctggtgaaagcccatccctactaaaaatgcaaaaattagccaggcgtgatggcaggtgcctgtaatcccaactacttgggaggctgaggcaagagaatcacttaaactcaggaggtggagagtgcagtgagccaagatcgtgccattgcactccagcctcggcaacacagtgagactctgtttaaaaaaaaaaattattttcataataaatactaaagacacttacttgctctttcattctaaatgtacagtgaaattatccagaggcaacatgtgttattcaccacatatgaacacaaaagcaaacatgagaatcttgctgccttctgttaaaaccagacattaaagagatgtacaaaaatgtaaaatagcataacttttcccactattctgtggaataatttttttactgtattttattgattaaatatatcgtgtaatattttaacaaatatacatgtaaccatatttcaaaaaataattaaaatgtcattttaaaatgaattaacaaatatttaaatttcttagttttaaatttttttttttttttgagacggagttttgttcttgttgcccaggctggagtataatggcgcgatctcgcctcaccgcaacctcctcttcccgggttcaagcaattctcctgcctcagcctcctgagtagccggaattacaggcatgcgccaccacgccggctaattttgtatttttagtagagatgggaatttctccatgttggtcaggctggtcttgaatcccgacctcaggtgatccacccacctcagcctcccaaagtgttgggattacaggtatgagcaactgtgcccggccagttttaatttttaatacagtaagtcttgacaggtataacccacataaggactctttggagtccttgataattgaggataaaggatcctgagaccaaaaagtttgagaaccactgagttatgctatccagtataggcagacatgtgagcatccttcaaacatttccatttcccatattctattattagcaactaacgataatgtatgcagtaatatcgcctcaataggttcacatacttggtgaaagaaacaaaaaagtgcctcaaggagggtcaagatattaataactataataaggaaacactggaaactacctaaatatctaaacaataacaacaaggattggttatgaagaaaattttacatatgcacaaaaattactatgtcctcatgaaaaacaaaataatccgaatttagtttttaaagttgaaggtatgtaaatgaaaaaagtggattatgaaaatacgtgtatggtatgtttctgctaaaactgtattttaaaagttatacaaaaatattcacagcagcaatactcataatagtcaaaatgtggaaacaagttgcatgtccatcaactaatgaacgaataaacaaaatgtggtacataaggatgtattattcagtattatttagtcataaaagacaatggaatactgaaacatgttacaatctggatgaaccatgaaaacacgctaagtgaacgatgccagacacaaaagaccatagactgtagtaagttgatgcaaaaataatcgcggtttataccaaatgaatttattaattcaaatcgtcatctggcacaaaccgcgattacttttgcattaacctaatatgactccatttatatgaaatctctagaataggcaaatctatagagacagaaaggttagaggttgtccagggctggggctgggggagatactaggtatgtgggacacatggggaattattgttaatgggtacgtgatttcttttgagggtgatgaactgttctaaattgattgtggtgattgttacacaactctgtcactgtataagtttagaagatatgttatatttcaataaaacttaacatttgtatctttatatatatataaacaaatatttgaaatatgttttctcaattctccttccctgtagccactaaagtttctttatggacattattaacatgtagaatctatcaaatcttatacttctatcaggaaatgtatgtctattttgcttgtttgaaaccgaggcacttatttataatatgaaactatttcttcatatgtttaatttataaaagatgccacttaaacatataactctaataccaaggccacagtaaaatattagtatagccagtaacaattttaatgcatgtctttcctagacctaggatcttcctcaagagtgaaaattggaagtaaataaatctggattgctttgaatgggagtcacatgctcagaatggctaagtttttaagaaaggctgaaccacttaccaggctattaaaagttaaagatattacctcatttccattctccaacgctcctcttcttctcgtcttcgccagtactcctccttctgcatttgcttcctcattttctcttcttgaatctttcttgctcgaatactaggctttacttctacttgcaaatctggatttacttttttctattaatataaataagacatttaaaaaacagcagccccaaaacaatctacatgtatttttaatcatacaattacacttattctttaatcacggaggcttttagttgcaagtttcccactagagagtaaaatcaatataattaaggtaaatcagagaaaagattcaaaatacattaataaaaattatgtaaaaagtatgtaacttagtgctgaccaacaaaaagtcatgaaatccttagaaaaactaatggatatttaattttactttacatttgacccttgaacaacaggggtttgaagtatatgaatacacttacatctatgctgctgagtttcttctccctctgccacccctgagagagtaagaccaacccctcctcttcttcctcagcctactcaacttgaagatgatgaggatgaagacctttatatgatgacccacttccacttaatgaatagtaaatattttgattttcatattttctcaataatattttctcttctctagcttactttattctaagaatacagtatatatgagatacatgacataccaaaaatgtgttaacataaaaataactgtttatgttatcagtaaggcttctggtcattagtaggcttttagaagtttttagggagtcaaaagttataagcagcctggagtcccagcactttgggaggccaaggaaggcagatcacttgaggccaggagtttcagactagcccggccaacatggtgaaacgttctctagaaaaatacaaaagctagccaggcatggtggcacatgcctgtagtcccagttacttgggaggctgcggtgggaggatcactggagcccgggaggttgcagtgagccatgttcatgtcatcgtactccagcctgggcaacagagcaaggccctatctcaaaaaaaaaaaaaaggcaggcaaatttttgactgcgtgaggggcccctgacctccatgttgttcaagggtcaactgtaactgtttataaacagatgactctaaatgtctatgttggggttaaaaagtttctttacatatttaagtactacccttttacactgttttaattttcacctcctccgtgtttaaaacagaaaacatggatctagtacatcaatctagcctagttaaaaacttcaaatacaggccaggcacggtggctc

SEQ ID NO: 1882069 - DNA, 4001 bp, Homo sapiens
gcaaacaacaaaatcagttataaacctgacactagctattaatttttttactatggcactctgtttttcagtctgattcatagtcagcactttaaagggttgtagatgaagaaatagaattatggatcctttattctagtaataaatgatttggttacataccttcccacacttcatgtgttagtatcttaccactgctgtaacaaattactacaaacttagtgactttaaacaacatccatttagtattaatatcttatagcttctgtaggtcagaagttcaaacatagcatagttcaacttagttctctgcttagggtcacacaagtttaaaatcaaggtgtcagcaggtttgcatctttctctgaagaagaatccatttctaatctcattcaggctactggcagggtctcacactgtcgcccaggccggagggcagtggcatgatcatggctcaacataaccttgagctcctgggctcaactgatcctcccacctcagcttccagatagctaggactataggtgcacaccaccacgcctggctaattttaaaaaaaaattttttttgtagagacagggtcttgctatgttgcccaggctggactcaaatacctggctgcaagtgatcctctcaccttggcctcccaaagcactgagatttcaggcatgatccacctagccaagccaaaactcagttctttatggttataggactgagatccctgttcccctgcaaactgacagctggcatttaaccttagctctagaggcctctccccagtctttgcatgtggctctgtatatgtttttaaattgtatatatttaaagtgcacaacagtgatgttttgatatactgtacatatacagtgaaataatcaccatagtcaaacaaattaacatatctatctcctcactcacttctctctctgcgtgtgtgtgtgtgtgtgtgagtgtgtgtgtgtgtgtgtgtgtgtgtgtgtgtgtgtgtgtctgtggtcctgaatattttagaagcagcaatggcttgtcaaattcttctcacacttgaaatttgttttacagggcttatctgattacactgggcctgcctgaataatttcatcatttttactggttccagagataagagcatagacattcttaggggtttattattctgtttaccataccatctatttctgttgaggccgaactatattgccttattatgacacagattaggaccagtgatcccatgaaactggagataaaaattggggttttcctaacttgagaaaataatagtttcaaagtccatatctttaaccttgtgccaacattcaagtgatgagttgcaaggtttagggaagaaggagaagaaaggggatgataatgatgataatgatgatgatggtgatactaaaatggggaggtaaataaaaattcagttccatgtgattaagcaccacagtagcaaaacttgattatactcgaaatcaaaatggcaattcattaaaactaccagattttagtgcccgatgtgtgggcatatcgtacccttcaaaacaccagttctgaaagtcttaaacatttaaaatccaattcaatctttttccaatcatcaaaatattattcaatattactttcaaatgcctttataatggtttcacaattagcgtgttaatgttactgactaatgttactgactaaagtactgtttcctgagtactttacggctgataatagtttttcaggccaaataccctttgatggaacttcagaggttaagataattttgtagtttgaagaattccaaatgttttgagagagagagagagagaatgggtaccaagtgatcagaacacaaacaaaacactgacaacaattttgtcaaaaccaaagattctgaaactgaatgaaaaatttctgaccggaacctaatgattcatcattctcaaatactgttaacttaaatatctgagtctgatgaatcattaggttccaattggaaattttatctaacttcacatatctgtatttttactcagatatgtgcaaaataataaaaaccaggagacaactcaaaatcctaattatgaaaaatcaaaagaaccagaattagaagtgaatgattaagtcaacaattttccaccaataattaaatttaaatcttccaaacataatcgttattcacatatttaaagatttcaggtatgagagagttcagtttaggacacagactactgcaagagactattactcccactcgaaaaatgaaaaaaaaaaaaaaaccatcataatattttttaaaggtacctaagagctgagttggcgaaccaaccaggtaacctgaattccaaaatgtgacaagcccctgaggacagtggcatactgtcctgctttaccttttgcaaggcatgaagagaagaggtagcaatcatgtaagcatataagaaaaaagaactaaaattttactgaattcttaaagatttcatacatagaaattgcaagacattttgatagagaataatctgtaaagtccttcctaataataaaataatttcaaaaaacgaatagctaacatttagaatgtgttcactaaattttaagcattgtattaatactagtacctgccaagctttatcaaattagacctcacaacctagtaagaaagggctgttcgtttccttgcttaacagaaaaaaaacagtgcagagaggttaagtaacttgtccaagttaacagagctggtgaatggtaaagctgggattcaaatagaggcatctttactacagagcctggatcataattacatgtctcttctctaatctagacatagtttcttaatgcaatttaaattgcttaatgatttattttgttcagtcttcacagggaacaaattagaaactttctcccatttcttttagatatatcaggacagaatgcttagtcatgtttaataaagaatttaacgcaaactttttacattacagattatactactattacttgatttaagggtaatatatgactgtactctacatgggaaaagtggaaaacatagagtaaattagaatccgtttgttcttgccccaagctgcctatcttagagcattaaattacaatgaattaaagatctacttagttccaagcaccattcattcatttagcaaatatttactgaacgcctactatatggtgagctctgttcaaggggctggagatagaaaaatccaagcaaagtccctgcccttaaaaagtctagtgggaagaaacaggcaattaaaaaaaatacattagggggtgataagggttatgtaaacaggtagctgccaccaccacagagactatcagttctggaaatacattattcaagattagtttggctacacataacagaaaagtccaatatagtacagacttatacaatgcagaatttatttctcgtgtaagtcttgagataggtggttatggcaagttagcagattatcagaggcccaggccccttctatagtccacatccttagcaggtggctttaatccttatgttccaggacagatgctggaactccaggaatcctatcatcatctagacagcaggatggagaaacaaagaagggtggaccgtcttccttttaaagagatgtaagaatcggctgggcacggaggctcacgcctgtaatctcagcactttaggaggctgaggtgggtggatcatctgaggtcgggagttcgagaccagcctgaccaacatgcagaaaccccgtctccactaaaaatacaaaattagccaggcgtggtggcgcatgcctgtaatcccagctactcaggaaggctgaggcaggggaattgcttgaacatgggaggtggaggttatggtgagccgagattgcgccattgcactccagcctgggcaataagagtgaaatttcttctcaaaaaataaaaataaaattaatcagaaaaaataagatacatcagtagcaatcacaatgcagttctttatgaccagatagcaa

SEQ ID NO: 1882070 - DNA, 4001 bp, Homo sapiens
aaggatgtgtcttcttaaacactggtttgtttcatagttctaagttttttggagggcctgacttaatccaaaaatactgtggcatgcctacaagagttaacctcttatattttgaagtagaacaaaaagggaacatatattctgacaggagattctatcataatcgctcagaacactgaactttttcaacttgatgaaaggtttctccaagttagaaatactataagtaactctttccaaaagactgctcgtatgtgaagagtgaaaaaacaaactaaacaaaagcaaaaacttaggactaaagactaacaaatgcatatgaagaaggaaagtgcctttgctcaaggtcattgtgctaacagaatgacttgcttagttcacgtgcagatatttgttggcaaatgttaagcgatgcagaaaaaaaggcactacataaatgtgaaaaacaaataagtaaaaccataaacatgaatgttgtaatttgatgattatgtgcaagatcaatcaagtagtgaaagtatgtagtattcaagtgtttaaagtggcggcctgggcatggtggctcatgcctgtaatcccagcactctgagaggctgaggtgagagaaatgcttgaggccaggagttcaggaccagccagggcaacacagtaaaacctcgtttctacaaaaattaaaaaaaaaaaaacgactatgctcaaggtagtgaggaaccacttctactaagccagatggaaattgctaagaacagaaagacgacgatgtcatgacggctggttaactatgggagcagctggggtttgaatttctgttaacagtaggagaaaataaggactggagacagagggggaatctgagaaattctctattttggtggctaagctaacacaatctactcacagctttttttcatttgattaccatttgaaacagattacttctccatttgagggtaatcgtgaagcaagatttcaactcatgctctatcactacccattccaggccacaaattaaaatagcctattactacttttatacacacaataaagagatcttccatcccaatcttctccatgcttttttttttctcagcaaagttcatgtaaaccagtaggtcatagtaaatcctaaaatgtattcccacagtgagatacttggaacattttccttctggattttattaaacataatgttctaagcattatgagtgctctaaggtatttcttgaataataacccaaactgcagagtgaaagtaagtggcaattaaaatcccgagacagacgggaacactgagactaagaaataacagcatctgttcctgacgatggctggactgctgatctagcttggggtcagcaaacttggcctgagggccaaatccagcccactccctgttttcatatggcctgcaagagccaagaatggttttcacagttttaaatggttgggggaaaaaaatcaaaacaatattagcatattaagaacataaaaattagatgaaatacaaatttcaatgtccataaagtttcactgaaacacagcaagattcatttgtttatatattgtctattgcagctgggtatgggagagctgagtagcagggactttgagtatggcctacaaagcctatatttacaatctgaccctttagagaaaaggtttgcagaccatgagcttgatcagaacttcaaataccatctgtggtgaaggagctggtttgttttgagtatttgttttctaacccatcatagatctgagctaagcttttgtagaatacaaaaatcatatactttggatgttgcagagatgtcagattgctataaatttcctaaatgtttactctcaatttctgtatttatcttcttgcatactcaaacagatattttgtggactggcaccagtctgcaggtggttctgtgtaggtattctttgtgttctttagatcacacaaattttctaaaagcactgatctagagaacacaagaataccttcacataactttttggaaaaccttacttactccttccctatatactccttccctatatattttcgatatgatgaccactaaaaatatcagtaaataaatatattgctttgtaaatatattaactagataaaattatagtttttccatgaatctttttcaagcattatgctttatgctttaaaattataaccagtttcttccttaccagctaccacattatatatttttactgttctcttagactttacataaaagaattttttttttttttttttttttttttacattttgtgctttggggaataactcaaattccataaacaaaactattagtacaaatgttttctggacaatctgtgctgtgattttggaaattgtgtgtgaaagaggagagtagctgggcgtggtggctcgcgcctgtaatcccagcactttgggaggccgaggagggtggatcatgaggtcagttcaagaccagcctggccaagatggtgaaaccctgtctctactaaaaataaaaaaaatagccaggcatggtggtgggtgcctgtaatcccagctactcgggaggctaaggcagagaattgcttgaacccgggaggcagaggttggagtgagttgagatcacgccactgcacttcagcctgggcaacagagtgagactctgtctcaaaaataaaaacaaacaaacaaaaaagaagagagtgaaagaatttgagtccttgcacagacaataactgttttttatgtttaaactttttagtttcttatgttaaactttttatgtttaaactttcaaaaggttgaataaatttcatcttatgcttgcattataatagcaaagttccttgatatgtcaaaggccacaaaagtaatttttagcttaggtacaaaacgtgccttgggcctgttttatatgatactccttggttttagcactacattaaaaaaaatgaatgtgaaaaaaatcatttccatgaaagttttttaattggctcaaagttagtagcaatttactttcaaatttcaatctttatctctctagggaaatacttaattctactgcaatttttatttaagaaatgaaataatttctaaacatttttaaactttaagaaagatgaaactctgttattgtgccaatgactttttattattaggtgtcagatgataaaacattcaaataagaaacagcactgggatttcacagtgtcaggagaaaggaaagtctataaaaagaaactcaaggtgtgtttaagtatgtgaaaagagcagataatccctaaacctgttttatttgaaggcaaataggaagatgcttgctttatttgttgttacagaagaatgttgttgctagcaaaggataaaatctcaaagcagagggagagggaatataaaatggctgtagattaaacttctgcaaatgttcactttactacgcagctccactgtcataaaacagtcaaaatagtaagatatactcattcagaacaatgacacaatgtttataaatatttatatgtatgctgaactagaccattactaaaagctgcagctggggtatagaaagaaaactaggatttgattggaggccttattttgcaaattactaggctccatgatcttgtggaacttacttaacctttctgagtctcagtttcttatccataaaataaatgagattctacctacctctgaagaattgaggaggataatatacgtgtcttgtataaagcactatgcaaatgtgaggggttattgttatttagtagggagctcagagaatcttaatatgtattatatttaaattttctataaataagtgaactttttatacagcaaagtagattgagttgtttgtatatgccctttcctaatatcactatttcttgaagcagagaatatattgaggtaaatcctcattagaaaatttattacgcaaaatttaaccaactgtagttgtgatcagtgctactgatggtcagtgtgctatgggtgtgaagcaggaag

SEQ ID NO: 1882071 - DNA, 4001 bp, Homo sapiens
gaggagatggtaccagcaagacaagaaggctgtgtggtgcatagttgatgtgaatcttcttcacaacttctcaaagctttagtacagttcacacatgctatgtgttcttggatcccttgtgaaaaacagctcaattcctctacagctttgcatccagacctgaggcccagcagaaggtaaaaacatataagatggacacagagttctggaggcagagagtggcataaaggtgtcaggtgtggcactaacatagaggtcatggcaaaagttaatcacatttccaagggccaagaaagcactggtcaatagaaatatgacagaaaagaatgaagagggaagctaggtgaaagaggttttcatacatcaacagcaacatcacctggaaacaatttttgattagttaggcacttactaattattccctgcttttctttttttgagatgaagtctcactctgtcgcccaggctggagtgcaatggcacaatctgggctcactgcaagctccccctcccaggttcacgtcattctcctgcctcagcctctcaagcagctgggactacaggtgcccaccaccacacccggctaattttttgtattttttagtagagacggggtttcacaccatattagccaggatggtctcgatctcctgaccttgtgatctgcctgcctcggcctcccaaagtgctgggattacaggtgtgagccactgcgcctggccaattattccctacttttaaaataaattataatcgtgctgagagaataaaaaaattaaaggaaagagttcagtgagccgtgatcatgcaactgcactccagcctgctcaacagacaacaaacaaacaaagttatcattcaaaatgtttcccatggccagatgcagtagctcctacctctaatacctgtaatgcccgcactttgggaggccaaggcaggaagatggcttgagtccaggaatttgtgaccagcctgggcaacatggcgaaacctcatctctacaaaaaatacaaaaattagctgggtgttgtggcacatgcctgtaattccagctacttgagaggctgaggtgggaggatcacctgagccaggagaggtcaaggttgcagtgagccatgatggtgccactgcactccagcctgggcaacagagtgagaccctgtctcaaaaaaaaaaaaaaaaaaaaaaattagaccaaaaaacaaaaacccaaaaagccaaaatgcatccaagtatcataagtgaaaaagtgagcttcttagcagccaatatgcaaagggaacataatctcttacacagtttggaattactcagaaaacgtggaactgtcttcaatcctaaagcgtcacatagaaatgttccctgagtctcactgggacaacacactgagcaatagctttaccagaatgttttgtgaatatggtatgatatcaagagtaataaagttattttggaaaaaaataactttagaataatcacttaaaagtctgctgtttttgaccataattgcacatggatatattgccttatataaactacaaagaattgtctatttcacatcacattttacaacttacattgcaaacctcacttcagccttgaggtacaactatcaataaaagaaacaggtcttatttttaaaactttttattattcatatccttggtgactttcagacaataattaacatgtggttagtatcaccttaatggaggaagtaccttatacttcaaacaacccttaccaaaagaacagataatacatatgtattgatacagcattacaaattgatgataattcaaaaaggcaccatgtagcttgtacttgagaaggaattttccctttgcatattgaagggggttctggtggtgttttctttgtccccagccgacttcacaatgaaatgtttctactttgcaccctttgggttcagttgttcaaccagttacaattagttagattagtaactggttgaacaactgtaatcaaagagcacagattgacttgttgtggtctactagagagagatttgctagtggtgttcagcagggctctgtctgtcctcttcaatgtgtgcatgaatgacttgaagcaacatacatacattcaagaaaaattcattaaacattgaatcatcatctaatatttgcctgctattatgacaggtcctgagggaaccaagaaaatgtcagttacatggctctgatgcaaagctgggaagaaggagaaggagtcagaggtagaggcagagagagtaaaagaaagagggagaaagtgagaaagtgagacagagaaagagagggaggccatgttacacaacaggaaatgtaacacatgacctccagctcgaaaaatttgaataaaaagatatttcaaggagtgcgagggaggtaacccttacaattattagaatgaacatttactcattgtcaacactatggagcacatatttgggaattcacctttatttatgccacacaatattatgtaggtgacaagctaacccgtcgtatttaacaatataaacaaaaacacaaatatcctactttattaaactgaaagcagaggactctcatctccccaaagcccaggccattccctgatattagtaaggatactaggtgaaactccttctttcaacatttattgtaattagtgaaaacatgcttaatgggacaccatcatctacaatgatgacaccatatctcaaatcactaatctttctgccatggacagatttctgtatcaggggacacctttgtcattttgtcatccaaattttgaggattctttttcaattctccagcattgactgagaatttaaatggtgccagcattgtgctggaaactggataaaaactgagataacacacttgagttcctactctcagagaatccacttattggattgctttgctataattcctgaatccagtgagattaactggtattttctgttgttcaaaaaactacttttcccctttttgtacagatcagcaataaacatttacatcgagattgtgtggtgtccatgaacaaggcattcagtagggtccaagtctagacttgaatggcgtctctcacatttttgactaagagacaatgtagacataaaagtatcataatccaacttacatacaaaatggaaaaaatggaaccagaacaccttaaaatgtttcctttgaaatatgtgtgtgtttccatcaggtttattttagttctctaaaactctgtaatactgaatactccaactaccaatattagtcaaagctgtttaaaaccagccttcccttatttacaaaaggcagattttacaagacaactatcagggataaacacaaaaagaaatgaaaactgttccatgtctagcaattcgccagagtaaactggctgtatattgaacacagctgtttctgtgagggatttttctttttttggaatttaatattgactgtgctcttgtggcaagaatatagtaaatgaaagattgttccaggcctgagaagaagagaggccagaaacaattgttcccctaggtcctccccttccttaataaccaaactgttgtctggagcctccttgagttaaaagcctaccatttttcatgtcaattacacacaaacaggacttttcttgtcaccttccctaaactgaggaagacacaaacccagcaggaaggcaattgtaaagataaatttaaaagtaagaaggcaagcctgaaatgcaaacataggaaagagcctcttattccctacacttctcacttttcatggaccattgaaggctgtttcttaccaaattgaattctttgaaaagagaaaccatgacaattttccccaggctacggtaaatatattttcttgcacatttagtttttgtttcataacaatcctaataaaattagatgcttttagcaccttacttaaattaagaagacctttcctgctaatgtgcccagaacctatctgggttactaatattaatagttccattttatcatg

SEQ ID NO: 1882072 - DNA, 4001 bp, Homo sapiens
tacttctgtctgaagaactttctgtcctctggagcatggaagcttgggggtgatttatcccagtcatcattttatctaggcacataggccttttgattccttataggacccagacttttgaaacttacaatccaagaaaagaaagtgccatctcttctttgtgcattgaaaatacaataccaaagctgataacatataaaagttatcagttaaggcttcacactcttatcctaccacataacacaggggctaagagagctcaaagggaaattgtgcctagctcagctggggcacttggggaaggttttaaagagagggcccagccagagttgagtctcctagggtgaatcagagctcagctcaacactcagacaagggggaaggtcattccacacacagggaacaacatgtgcaaagtcacagttagatgagtcaggatttaaacttatctcccacaattgtctaagccacataaatcaggtctcattttgagaatggaataagcacagacataattgttggaactggaagatactttagggatcatctaatctaatccctgcatgtaacagataaggacactgaggtccaaaatgatgaactttaatctaatgttcaaaaacaaattaagactaaattcagactttcacttatacctatggtcaggaactttactctcaatttgccctgccaaactatctccttcaagccaaaatgagcatgaattatatcagtatttgtaataagcttagtagtgagattttgtcaagtttcaagaagaaaaacagttatcatccaatgatagcattaatatttttaaaagagaaagtcctgttttccaggaaagtatcctagtgagataatttatgtagaatgtattatatgtggatatcagcatgatgtacttctgttaggtcctttaatgcccataacacctcttcaaggtatatactattatttatacccattttgcagataagaaaactgaggtacagaaagttgagtaacttgtcctaggttatatggctaataagtcgtaggccagtagcaggcagtcaaacccataataattatgcttttaaccactacaagatcatatttctcttcatgctgttattcaacctatagatatactacaaatatacttacaaaaccacacaaatgcacgaatatgtatatataaggcttttcaggcagtggggtttgctttttaaaagactagaaataacctaaatacctattattagaggactactttaataaattaaggcatatcctcatcatagggccatttaaaagaataggataaagctatttgtgctgatatagaaaaatttctaagaaacaaaacatggttaagttaaaaataataataaccaagatgtatatagtatgttcctaattgattcttaaaggttgctatataaacaatattgaagtttgattacgtagagaatgtttgtggaagggtgctagcaagtaattagtagtggttgcctctgaaggggagacagagagaactagggatgtgaaatgagaaggaaattcatttttcattgtatatcttttttgtaatttacactttttaccatatacaaataagagttattcagactttacaaactacattttttaaattgtcaactaatgcaattttttatcccaagatatctcttcaaccttaagaattagtaaaaaacatacttaaaagtggtttcaaacacccaagttatcatgtttgtatttacctataagagagctctttaaaaagactagccttcctaacccttgccaggatattgaatcattcctgactcacaagagaaaatagccaaatgagtaacaagcctgatgccatttggtaagtgggagctcaggacaaagagtgtgggtagggagtgaaatgaagggggcccaggggaaagtaccaaagaggtaggtcccagtactgctaagatccctgcagtaatgggaccttcctctttggttaatgtgtgagttgtaagatgtaaagaacagccttcctatcatttaaataggtttttttttaactttaagtgcatgggtacatatacaggtttgttacataggtaaacttgtatcatggggttttgttgtacagattatttcatcacccaggtattaagtctagaacccattaattatacttcctgatcctctcctgcctcccacccagcaccctccaaaaggccccagtatgtgttgtttccctctatgtgtccctatgttctcatcattcagctcccacttataagtgagaacatgcaatacttggttttctgttcctgtgttagtttgttaaggataatggtttccagctccatccatgtcactgtgaaatacattcttaaatctcaacacataccacatgccatcatcaatacccacaagacaaattatgcttagtgattgatttaacttgacattaagtgctctaactactttctttccacttgttctttcttggtttgtttcattgtgttctatacctattaattcaatttttaaaagcttgatcaagatggtgaaaccccatctctactaaaatatgaaaaaattagccgggcgtggtggcacattcctgtaatcccagctacttgggaggctgagtcaggagaattgcttgaacctgggaggcggaggttgcagtgagctgagattgcaccattgcactccaggctgggcaacaaaagcaaaactccgtctaaaaaaaaaaaaagcttgatcagatgttcatgaaaatttacccctgtctttaagaatcaccaagtaccccttaattaggaggctgtgtacttgggtagactgaagtggcctgagggagaaggggagtgttaagaactaaatgtttgtgtctctcccaaaattcatatgttgaaaccccaatgtcatggtgtctagagatggggcctctggaaggtatttaggtttagataaggacatgagggtcgggctgtcacgatggaattagtacctttatcataagagacaagagagcttgtgctctctctccctctgccatgtgagggcacagcaagaagcaggataatttctttattataccaatttaatagttacatctgctaaatgtaaaatgtagtgagatggtttcagataaatctcacctaagaaaaaaatgttctaatgttcctggtctgaagattactatagcataggtaatccagctatccagtagtcaaagtgtactgttccttacagaaatagtaaaacagattaaacaagttagttcatcttatgttgaggctggataatttataaagaaaaggggtttatttggcttatggttctgcaggctgtacaggaagcatggcaccagcatctgcttgtggtgagggcatcaagctgcttccactcatggtagaaggagaaggggagccagtgtgtgcagtatcacatggcaagaaaggaagcaggaaagggagaaggaaggtgtcagaccctttaacaaccagttatttcaggaactaatagagggagaacttacaaactccctcccctcatcaggaagggcattaatctatccatgagggatctggccccatgacctaagcagccccacaatttcaacatgaagtttgggtggatcaaatatccagacgataccacagaattcacatgcaaataaatacaactagcaaaaacaataaaatccacaaagaaaaatgtgtatctgcctaataatcaaagaaatgcaaattaaagcaaataaatgataataccaaatatacataaaattgcagagaaagttatacagtcatgctatatacactttaaaaagtatttgtcaataaatagcaagaaccctaaagatgttcgtaatcttaaccattataacatttctgagaatttattcatgaaaaagtaattcaactgaataataaaataaaaaggtatatatgttaagatgtcaatataatgttatttatgatatacatttacatttctaaaatatactttaa

SEQ ID NO: 1882073 - DNA, 4001 bp, Homo sapiens
gccatcccagggaacagatgctgcaggcagagtccacatgtaagaatgcaggtgcctggagtagtcagagtcaacgttcattattgtgtcactccacacaaactagtctggcagctgtccagtgctcagtgctatcaagagccttctcctttcctgtgtccattagccctgaggactcactgttttggtgtctgctgttaactctcacttaaacagacacaaggcagaagcaccccaggaaacataagtacagacttctccagaccagtaaggaattaggaggaagtgatgtaggagtggcccatattaactaacgataaaacagcctgtagttactgaagggttatcaaaagccagaccttgtgctaagtccatgagaggaattattaaatttaatcctcacaaaagttccatgggataagtaccaccattagatacagtttacagccaggaaaactgaggttcaaaaaacatgagggacttgcccaaggtcacacaactattaagttgctccaggatgggtctcatactttgttccttttctctaggataaataggggaatctggaatgggaatatccagatcgactggacttggacctacaacaccaatatcaacctcgctagggaaaggccctgacacatacagggaataatatgggggaatggcatgaaaagtctcgagggagatacatagcaggctaactcttggtgaaaaggtgaatgcggggtgccagccagtaatcaatggcaaaaagaaggtgaaagaataaagtaattgaatgatagtgttattatgattttgacctttttcaatattttgtttgtttgtttgtttgttttcagctgcgtaactctgttctacaggaaatctttggctgaaggacgatgtcaactagaagcagagccgctctaggtaggaatgagggaacatgagcagagctctctgaggcacctctacacagcagtttacaaccctaaaattgtatatatgattaaatggaggcccagggagagcgcgagttatactggggtcatcaaaatggaattaacaatggtgaattttattgtgctcaactaactgtgcaccagactgtttcaccatttcacatgtagacttaatctccaccacagctctatgaagaagacataatcatgtcataaaagctacagataaggaaactgaaacacagagaagttaaataagttgtcgaggcaagtaaaagaaccaagataaaatccagacactttggcctcaaagaccaagtgagtagccaagatgacaactgcataactagagctagaggaagtcagatctagaaccccgatctccgaccagtggtcctgcacgtctccctccatgctgtttctactctcatggggcacaatgacaataggacttagggggagggactgaaaagtgtttacatctgagaaatctggagaagcgaaattgttcatagctaaagtcgtgccttttgtgccaagggcatcatttggggggacactccctgctgtaggtgccaaggtgcctagatcaagacttcaagcagaggaagcagaatatggttgttttgggttcactttaatgacctcaagtgccttctacaagcccaagtcataagactaaagaagaaagttgtctgtcagagagtagaaagccctcagctaggggatgctccttagctccttctctcaggaaccatggtggagctccaggaagacacagagttctaacaagggttaggaatgattccttggagcaatgttcccctatctcccaagcaagcctccccccaccaatctaaccccacatttccccaaagccaccactcatcctgataaacaccacacaagagaacacagggccctaccttgattctcctctgaaaaaaagcaagaaggttgcttcagggagaccaaccagcctggttggcctggaactgacatatcccagcaaattcctcagtcccaggcaaaccataatggctggtcaccctaagtcactctcccatgagttgacaatttcttagagcaacaactctccattgcctcaacttgatgcacacactcacacatgcactcacacacaaatcactctgtaataggtggaggcaggaaactgcctgtttttctccagtaacagcaaccctgacaaaaataggcttgaatgactaaggccaagtttatggccacccataggccacagaggaactcactgcctgaactttcttcctgtcctggggggatctcgggaagaaaggaaggaagggcttagtcacaccctgggagtggcagccaggagcagtgctgctcagctcctgacagagtaaactcaaaggctctttcttcaggaaaaaatagatgcttccaggctttgctccctttttacagagccagcatgacaaacacttacccagggaggaaggagaggcagccagaaagcacaatcatctccccatctttgggagaaaagtttctccaacccagcaggtccctgagcctctactggaccatccactttggccaagccacaggccaagggccccctgggaaactcacctgggccccgggtcagactccgctccctggggatgcagaagcagccacccatgtgtgtaccatcctaccctggccgaggcccttgggaacacaggccagaagagtgctgcaagggacagcctcccaacggtgtccctcctcccgcctcctccctggcacacgagggaccgaggcctgctcaatgcacaatgcagcctttgatatcccggctacagcaggaggcccagggagggtgggaggggcagcccagcccagcctgcaggcccacagctcctgcactgtcaggcctggggaacagggctcctccctgcctctcagcagatcgcttcatgcctatcagcctgcagcacattcctcgcattctaggattgagatacacagtttggttcttgtgagggcagccagggctggggaggagggcagagaacatcccagagatcaagactgctcttcttgctccctccccgactgacttggcccacactgactggcctgccacccctttacagtgatctccacccagtctctctctgcaaaggcctcccttggctctctgataaagttggagctgtgggtgcagcatttcacttggacctagcagcatcaatgagccagctcctcactggggaacatgcaaacccccagctgctggtgtgcaggaaaagaatccaggagatcacctgatgaagcccagcattttacaggtgaggggatggagaaccaaatacatcaaaggatggggagaggttggtcaataggtaaaaggttagagttacataggaggagtaagttctagtgttctattgcacagtagggggactacagttaataacgtattgtatatttcaacatagaagagaggattttgaatgttctcaccacaaaaaaacaatgatgtttgagatgatggatatgataattaccttgatttgttcattacacaatacatagatatattgaaacatcacattctagcccataaatgtgtagaattattatgtgtcaattaaaaataaaactaaaagaaaaaatacagcaagtctacaggtatgcaagcaaaactggtcccacaagactaacctctttcctgtttcagataggcagtggagcaggggaatccagttgacactgtggctaaatttcagaaaacctcccatgagatcttgcaaaggagatggagaaaatatggctgaatgccagcaaggtaggacggaagcatgactgctctaacaaccaagctcaaagagcactgctcacccaatgtttccttcatgactagagcaaagtggtgaaaggaccctggtgagaggcccaaagaacaggaggtgtgagccaagagaaggtcctgccaggcctatgttgcaggctatttggaggctgaacttgaggtcagtatcaccagcatttttaggacggcagtggcctgatcaagtttatatt

SEQ ID NO: 1882074 - DNA, 4001 bp, Homo sapiens
ctgaatgccgcagacagattctaaggtggtccccagtatcaacaccttcccctctccttgagtgggcagaacctagagacctgcttctaacccatgcaacacaaaaaaggtggtcggatgtcacctttgtgacatgttacatgggacggcaatgcccgtcttgctataggactctttctcttgctggctgtgatgaagcaggtggccatgtttgggaggcccacatgccaaggaactggaggcagcctctacccacaaccaaccaagaattcaagacaaccagcaggaacctgaagccttctaatagactgcaaggaactgaattatcccaataaccttgagagcttggaagcaggtccttctccagttgagccttgagatgagatcacaacctcaaccaaacccttgtgtgcagccttatgaaaccctgaagcagagggccgagacaaatggaaggtgctgaatgcctgttgttttaagccacgaagtttgctatcattatatgacaataaaaaacacagggggagataggccaccacaaataaacaaggagactacagactgcaatatgggcatagctaggaaacagtacagggtgaggtgaagagaataaagatatggtgagaggcagtgaaggcactgccctccctagggtgtccaggaagaacctctcttagagagtgagatttggtctgagactagaaggaaaagaaggatccagttgaaggacaggctgaagggagacgtttccaggtggaagaatggaaacaaaaaggtccaggtgacggcagcagagtgacaccaaatgggatcacagaggcaggtggtgtccaggctgtgaggcatctatggggctgacaacatgcttggggactggaaccataaaaggggccgagcaaggaaaccaccaatttaagagccctcagcctcattcccctgccatcaatcctgccagattaatttcccccaaatgtcaatttcattccacagctcaataagaagggggttctcattactgccctcagcttgcctcatttaattctttcttctttatagccacagacatgtattgagcacctatcagatccaggaactgtgctaggcacttcattggcacatatgttcctgctgtctgtatgctggcctcagaagccctcaaagtcctgcgtccatttaaatcctactgctctgttatgggctgaattgtgtgcctcaaaagatatattgaagtcctaaccccagctacctatgagtgtgatcgtatttgaaagtagggtctttgcagatgtaatcaggttaaattgaggtcattagggtggaccctaatccaataggactggtgtccttattagaagaggagacagggctgagcaaagtggctcacacctataatcccagcactttgggaggctgatgcagaaggattacttgaggccagaagggagtttgagaccagcctgggcaacatagcaagaccctatttctacaaaagagaaaaccagccaggcatggtggtacttgcctatagtcccagatactcaggaggctgaggtggcaggattgtttaagcccaggggggcagaggctgcagtgagctatgattgcactgctccagccagagtgacagagcaagaccctgtctctgaaaaataataaaaagacgacgagacagacatgcaggtatagtgccgtgtgacaacagaggcagagactggagtgatgcagttacaaaccaaggaatgccaagggctgctggcaagcccaggagccaggaaggagcaaggaagggccctcccctgcagatttcagaaggagcctggccctgatgacacctcaatttcagattgcgaggctccagaagtctgaaaggatgattgctgttgtaaggcacccagtttgtggtacattgttacagcagccctagcatacagatacgcccaacgttcaggctttctctgggcgtatctgtgtgctagggctgccatagcacagacaccccacactccccctgcagcctcccccagctgctccatctcgtgctggcttctcccttccctgaacttctgaacttctggatcatttaccctctctctgcacaactcattttggtctttcatcacgttgccttgctgctgcctgtttcctgtgtgtctgccttgtctcccaaaggaccttgaagaggatactccccaacttcctccagacaccttggatgaaggcctcatggagacactcagaaaaatgtacactaggtttctcggggtggagaaacggggttttttttttttaaacattttacattttgcttatcagtattatcaatgttttctggagtaaacatgtattattcaatatacctcctaccttccaaaaaaaaccactgaaaaaaggagtccagttaacctaagactctccccatagataaagtgaccatgcagagtttaagccattcaagactctggaattttagccatttagccaaaggaagatgctttttggttttgggggttgttttttgagacagagtctcgctctgtctcccagtctggagtgtagtggtgcaatctcggctcactgcaacctccacctcctgggttcaagggattctcctgcctcagcctcccgagtagctgggattacatgcatgtaccaccatgcctggctaattttagtagagatagggtttcaccatgttggccaggctggtctcaaactcctgacctcaaacccacctcagcctctcaaagtgctggaattacaggcgtgagccaccgtgcctggccggaagatgctttttgatgagcccaagggcagacctctgaaactgctcacatcaggcggtcctaatgggtgtcttcctctgtctcctctccccagtccaaaggacctaatgccacccacccagctaccctgatgaaagagagaaacagcatgtgtttgaaaaccatcaaatcaccttcctaccaggtcaaggagagcagtgtttccctttgggccacccttatagggctcccatctcatgctttacctctccagactcacaccacaggaggcattattaactattctgatttttgcacttcgttctcatctgttacataaccacatgcaagtttaaaaacatacacgcatttgggaaagaaatgagctgaatttgattttaaaaactggcttcacactacctcagttgtttgggaactaagcctctctgggctaaatttttggcttggcaacactctcgcatatataattttacacctgcaaaagcttgcagccagccctgtgcagacagctacctgcagggagaagaatgggccaaacagaggggcaacccgggtggttggatgtggtcatggtgagggcatgtaaagaggagtattgggcatggggtctcttttccttcatcccttgcaccaggaggactccctgcccctgttttgctcagttcagctccatgctcaaaaacaaacaaacaaacaaacaaacaaaacgtacaactagctctttactgggaacagcagagacgaacttgcaaactggtagcccaccggtgagttctggcctgcagacctgcgtagtctggttctcactgtgattttcacatatgcaaattaattgccaatttgggagcatttcaaatacaaatctacaattctggcttgtctccaaaggtcagtccatcaaataacaatggattttagtggccatcataagctggtactaagaggcaattgcccactttgcataaggtacatgcctgcaattcaccagtccacctgatccaattccctcactcaagttacctgcttaatcttttttcgcatcagagtttgagatccctgctgccaaacatagcgcttaaggtggcaggccctagaatcagatagcctgggctcaaatcttagcaaatagagcatgattttaggcaggttatttaactcatccctaagcttctgtttctccatcttaaatggccataatcacagtacctacctcctagg

SEQ ID NO: 1882075 - DNA, 4001 bp, Homo sapiens
ctctgccaaggccaccagggccgtaagcagccccaggccccagcatcacccggcgtttcacaatcagtgctgaactcaaagacacgaggttgccagagaacatgtggtccctctcgtgtgcactcacgccatcgcggtgcccgacaggggtgctgcggtgaggcccaccaggcgcagggatgctgcggcccctccgagcccacttgttggagatgtcacactgcagtgccccagccagtgaaggggctccaatgcacctgcaacgaggcaggggtggaggggaggctgcccaaaggatggcgcccggagactcgaaggccgcgaggccgcgtcatcccgcacaggcggccggggcagatgctcagtgccagccaccccaagctctacggttagcgcggtggaggcagctcacaggaatgctccctcctgaaggtgcatcccaacattgctgctttaattatgtggaaaaaattatcccaactccacaggatatgcgacagtgcgcttgcaaatccacgagagaacgtgcactcctcccacggtgagagggcgagcggcagcacacacaggcgcctgctgtccaaggtctaattttcttttgctttttccttttagagaaagaacaacttttgaaagcacagcagttctctcaggcatcccatcggacggagccggcacttccatcagcaaacaccaccagcccgccctcggcatctgagagctggagggagcttcgggaatcacccactcccgtccagcacccacagacacaaaccgagcaaggcagcagcaggaaacgccctccttttctgtctccccaatcaccaaaacacctttattcatataacatgacttctggtccaaaccaaacgctgccttcaaatatggaatcagcgatcacgcccacaatgaattctcatagttaacgatactaaaagcagacaggaaatgtgaaaaagtggcaccgtgaaccattgccgtgggctctctctgcacacacaaccactcttacctttggagcccgaggcacggcccgcaccccaggcgctacagatcccaggtgaggcctgcaggaggagggatgggctgccaggagcgcaggccacatcacggggacggtttcattgggaggaacattttatgtttactgggtattcccatttctgtttgtgtaattttctcatttatataaatgtatatacatcttgtgccaaatttatggtgggtttctttgtctttttctcacccctgtgaacatccattgtctccctgaccttagatttcagtgaggtcacactctggagcttttcacccccaccccgtgtgactgcaggaggatctgcgcctccccgcaggaacccctctcccccacagcccgtgcttactgctatctataaagctgtttcttcttcgctctcccactcaaatctaaaattaaatatagcttttctaaaactgaactatttctttgcaaaccctcaaccagccgtaccgcctcccgccgctgtcatctctactccaccgtcctcaccagaaccctcggcaccatcacctacccgaggctcttgcctgcgagatgacagtgtgttcagtaattccctttggatttgcaaatcggccccgcagtcccacagcacagtgattctcctagaccactccatttaccattttcaacccactccagtccacgggcgtcttacgaggatgctgcacggtgttgaatgggatcaaagccagtctggtcttggccatgtctaaaccacgacaccctgtgactggggaacccccatcaacacccaaccagctcccctgtgagccagcttccaggatacagggacggccctgggaccgttggcaccagtgtcgtcactgggactggatggtagcatgcaggtagcaccctggggtgacaccaatgccgcctgggccgtggtgctgcatctgtgggacactggaacatgacctggagggcaggcaggcctggaggagcatgtggtgtctctggagcaagggccgctgctggagggcaggcgggcctggaggagtgcagtgtctctggagcaggggccgctctccgcagcgtgggtggaggctgtctcccatggcttctgcaggccctggttagtcctgctttctggaaacagccatgggggagcacaccttcctcctgcggggcgtccccaccagcgtctgaggggcactggctctgagaaaaccctgggcccctaagacggcactgaagccccatatcccagcaagaagagaccagggagtcactgcggttacttgctcatgcccacgcaggcctttctgtggatctccacacacagcacctccgactgcgaccgcacagctcctctcttgcacctgggctcacggttggctctgcggggttgacctccccggcgcgcgctgtttgtgtgtcccagttacctaggttctgtagcagacgtggcatcagagaccacgtggccccaacccctcaggggacaccacctgcacgcctcgctcaccctacgtggggacatcacctgctcacctcgctcaccctacatggggatgcacctgctcacctcgctcaccctacgtggggacgtcacctgctcacctcgctcaccctacttggggatgcacctgctcacctcgctcaccctacgtggggacgtcacctgctcacctcgctcaccctacttggggatgcacctgctcacctcgctcaccctacgtggggatgtcatctgctcaccttgctcaccttacgtggggatgcacctgtacgcctcactcactctgccatcaggacactgcttgaattcctctcttgaacacagagctgcttcctgcagacagggtcagagaacagccagggaatccctgagtgggatcaggccactccagtcttggttggccaggaaccgagcccctccaggagggaggtccatcgagcagcctcatgcatctgcacagcaaagctgtgcatcgtcctctgctcccagatggtggcaccctcctgcttgccactcagccaacaaccccaaggaggcagcctcatggctggggatggctgtgttgagctgcagccccagctgtccctaagctctgtggcttgggaggagcatcacttcccggtctcagcgggtgtctggagggtgggctgggtcctgctgaggccaggcaaggaggctccacctgggcagccccacatcaccaccaggacacagcaggtggcagagggcgtaccacacttagagccctgctcattcgccagtaaagtgagccccacggccacccggacagggcttggcaggcacagtagtctgagctcctgtgtggcgtgcggccccgtgagtcgcagtggggctatgtgctgggtggtgccacacaggcaggccctccatgccccatgtccaatcaggaagatatggagccgctgggccggccacacccgccttcggagtcactgtcagctctgcatcatcatcccacggaggctcacagggtcacaaggccccggcccaagagcagtcccacactagagcctccctctcactatccctgaagcacccagtgtccatgcttcccgtagaatcaagggccatagacccccaacatctggggcaagcaccctgcagtcactggagaagacacagcttgctgaagtgcccacggggggccacatctcagactttcaaccttgtgtactacaaatgcagattcctggacaccttgtgacctttggaatgaggctgtgccctgtgggctgactccctcgggccccctgagctatgtatggcccacgccttcacctggagtcttcctcccatcggggggctctgctgtctggactaagcgttccctgacaccctggctcacacccgtgatgccagcacagggcatggtgctcacacattggtgctgttggaaagtaaccagtaaaaaggtgtgtgaaagaaaacacgcttactcattctgcagacaattcctgagcacctgcaatgtgc

SEQ ID NO: 1882076 - DNA, 4001 bp, Homo sapiens
gcacagtggctcatgcctgtaatcccagcactttgggaggtcgaggcaggcggatcacctgaggttgggggttcaagaccatcctgaccaacatggagaaaccccgtctctgctaaaaagacaaaattagccaggcgtggtggcgcatgcctgtaatctcagctacttgggaggctgaggcaggaaaattgcttgaattcaggaggcagaggttgcgtgagccgagatcgtgccattgcactccagcctggacaacaagagaaactccgtctcagaaaaaaaaaagagttgacatgtcccagcctattaccgcaaagccgtgccgtgcatttagtgagaggagacagtagggacaggagctcaggcaagaggcctcctctcccacagtgcccaggaaatagtcacaaggtgagacgcccgaagcagctgccagccgagtcccagcctggcgtcctgtgctctccctcgggtttccagggaagcaggtgtggcagccccacctctgcccaccctgttctcactccacttccagagaggagggtgcgggtgtgaactctgcagcccgtgtttgcaactctgccaagtaggcgtgaccaaatggcaatttaaaagccactcacctaaagatgtggggtgtctgagccaagcctgagcgcccattctaatcctgtagaaatatttgaaagagaatagtcatcacatctggggggctgggctcaagatttttctagcactgactcactcacagaacttgggcaagtctttacattctccaggtctcaatttctgcatggaagcatggagacagtcattgtagaccagtgtcactttcccttatatgctggggacttgaaagaactattacacactccaaagtgactaatttatagcttaatcacttgtaacatctttctaacctactcacacacgttaccataattatagcagccacctcaaaaacaaggacaccaggataatcatgaaaacactaaaaacagagtgctaaaatatagctgatttcgaaggcattaatcttcctaatccttctgtgtggacaagaggctgcaaatattggtgaaaacatcatcctcatcatcatcacatatctttacaacaccctatatattctttccaaaattggccatgccattttgccatcttttcccgctcctgagataagtagaaaactattcttattttctccaattagcacttcttttaggcattggaaacctagcaagatttggggaggaagatttactggcttgaagagtgtttcccaccccaaaattcatgtccacccagaacctcagaatgtggccctatttggaaacagggctgttgcagatgtcattaagatgagatcataccacagtagggtgagctctaaatccaacgactgctgccctttacgagaggagaggatgcacagtcgtacgcacagagaagaccatgtgaagagggaggcagagattggagtaatgcacccacacgccaaggaatgccagggattgtcagcatcaccagaagctggcagaagcaggaaggacccccacccccagccagagccttagaaggaagtgtggccctgccaatcaagtccgggaagctagaagtccaaaaatttctagcctccaggactgtgagagaataaatctctgttgcggaagcccctgagtttgtgatactttgtcggggcagccccaggaagctaatacagaaagggtactgggaaactgggagccagaggctcagaagggagctcacagaggctgcaggaactcagctaccactcaagtatctggagagggctcaaggtttctctggttgcaccttgatccatcccagtagacacacagtgcagggcccaccacgtgcagtcatgaagccgggaggaccccgggtctctgtccactcccatctgaccagccagaacccaccatctctggctctacccatggaaggagggcaccacctgaccaaagcagagggaatgcgggatgagaaggggcagcaacgagtgtgcctgatgtgctcgctgctgattaaagcttccttcaacagagagttttatcctggaggattttgaatagttttttttctttttttagacagaatctcactctgtcaccaaggctggagtgcagtagtgtgatctttgctcactgcaacctctgcctcccgggctcaagtgattctcctgtctcagcctcccaagtagctgggattataggtgaacgccaccatacccagctaatttttgtatttttagtagagatgagatttcaccatgttgcccaggctggtcttgaactcctgacctcaaatgatccgattgccttggcctcccaaagtgctggaattacagacatgagccactgtgcctggccttatcccagaggattttccagaatattaagcatacatgtcctcttcctgccatcctcacggagcatctgccctcctgtcatcttgctcctaagtttcccgcccttttcctcaggtcctgagagagtcttgatggctgacccaaatccttccttcctgtccatcaacagatgtcagctcagttcctggctggctgcgtgtccttgttccacctgtagtaggaccgctttgctttcttcatctatacagtgtgaataacggtagcaggagctacctatagatgaaggtagcaagtctgtggactagcaagtccgtggaccaggacatggagcgccccacacagtgcccaggtcagtggccctcggtaaatgtgggttaacctctttaacatgttgaaaaaggtcaaggttaactgcatagacccggggtcagcaaacaatggcccacaaggtaaaaatggtttttacacttgtaagtagttgaaaaagttcaaaaagaaaaatattttgtgatgtggaattctatgaacttaattttagtgttcattaataaagttttattggaacacggccacactcactcattttcatattgtctatggctgctctcatgctacacagcagagctgagcagttgcagcagagactgcatgtctgcaaagcccaaaagatttactatatgatgcactacagaaaagggttgcaggtctctgatagactcgagccaaatgatctaacttcaactcccagatccaagacttactagctgtttgactttacacaaattatctgcctccatttcgtctctttaaaatggacatgatagtcctcattttaacatatttttgtgagaattagatacattattatttttaaggtcttagtgccagcatataaaaatacaattgatgggttcgattattttcatgtctttgttttaatgctcattctaactctttaaatatcaccgtccttctacaccagagtaaaatgtaaaaaaattctcaagccttctttccacttgaaacacaagaaaagttctttaaaactgacttatcattttcttcttttcatcgttgttccacatgcaaacagatccagaaaccttagctcagacttctcaaatcccagatggattgtaatttgttatattggagaaaaaaagaaaatctgtgctccctagcagatgcacaaggactgttttgttagtcacatctgccacgttcctacttttcagcactaaaagaacttttttgcaagctcttcagatcttgattctgaaatgcaaaagcagaatgatgaggcacgtatttcccaccttgccagagatgttttccttctttacctaaatggtctggagtttacacgcaatcatgccccgcaacacatagaggggtctggcagagctggaacaggagttggggacattgaaagttgccccctcaacacgctctcacttcttccatgtgatcaagggcatgtggctgctcagctagagactgcatttcgcagcctgctgtgcaattcaatgtggtcacgtggctaagcgcaccgcctgccggcatgtgaggggaggtaatagacaccactcctaagtatgggccttaagacaat

SEQ ID NO: 1882077 - DNA, 4001 bp, Homo sapiens
aatgatatcccgaatgccaggcagctggacccataaagggcaggtcaggccaggccaggcaggagcgctggtgagctgaaggtcatgtcactttcctttagccaaggctcctgagctgctcccttggccttaatgccagggatgctgggtgagtcttggagtgcctgaggagcttagtgaagagttcaggctttagagtgggacacacagatatttgaataacgaggccttcattggaagctgtacaatttcaggcaaactaaatctcatatctcagttccaactgcagatggggctaatgaccctgcttggtagggctgtggtgccgattagtttaggtgacatctacacagagtgtggcgtacagcaggctccctatagcaactgctaccacgggaatgacagtcaccgttgatctggggcttattgtgggccagccatgggttaagtgcttttataactcttacgtaatttcccccccgaacccaactccaggaggcagatgtatttattttgactattttatagatgggaaactaaaaagctcagagggttttaacaatacacccaaagttacacagctagtgactgatggagctagggtttgaacctgagctgtctgagtctaagccttgagcttataaccaccagactatggtaataatagtagcagtattagtaactcacatgtattgaccactttctatatgtcaggcactgttctaagcaagcacttgatacatagtactgatgtaattcctacagcagcccagctcaaaggcacagagaggttaattttcctaaagtcgcctggttagtaaggggtagagctgggattttaacccatgaagactgaagccacagcctatgctcttagccatgatgttaaaccacatattgtagtcttactgttattttctaaatctcgaaagggagctgagaattgggtattattccataactagattttgtgaggccactagccgtcttatggtgattggtggcctttgggcttattaaaacttccctgaactctcccacagagcctcagtggaatctccatgcttagagtcaggcgggctgagcccagcagtgctgctcgtccctagggaagatgtagtacttaccattgcaggagcagctcctctgcaggtggtgccgcggggttaggatgctgagcctggcggtgctgtacgtgggcccaaccttggggtccagatgcactgtgttatggcagatttgaccctggcaggttggcccctggcagggcaccatgggcatagctgaccgcatctgaacccccactgaatgctccatctccttggctgagtgagtgatgatggatgctagctcctgaaactcgtagaaggttccagaatgcccctcaaagaccaggagcacatccacaccagccacggcctctgcaggctggaggctggccaagtgaatgttagcccgtttgatgtccagcttatggctgaggaacctctgcaggttccgccagtggtcactcaccagctcctcgggggtgagctggtagaagcccatccacatggcctgctgcagagcctcctgccccacatgccacacgtacacatggaccccagcagtcgtggtgaaggtcccatcgctgaccgtgacgttgaacgagtagtggccacgaggcaggccctgggcggcgataatcttgccatcaggcgcacccactgagaagtgcctgcccagggtctcctcttctgccaggctataggtcagcgtgtcctgggggtctcggtctgtggcatggatcttacccaccatgccaccctggaactcatcctctccaacagtgatgaagatctccagtgggagagcagaaggtgcatagtggctctgctctgtgacatggacacggacagacgtcaaagacgagaggggagggatgccactgtctgacgcctgtgggcaaaacaaacactgctgtcacccaacagaactgcagtgctcttgcgcccgactgaggctgggcctccttgtggagctacgtttctctgccccacgcccaacttgagggctggctcagcgcattgttgcatttagaaaaaaaaaacctaactccaaaagcactgacagaaaagaaagattttctgaaggttttgtagagattgaaggagggagttacatcctataccatgcagtaaaacaatgcagtttcctcatgtgacatctctctgagcctcttcctaaatctctccagccatagacttgggctaacttcctcatgaagtttctcattctgtccctgtcctcaagggcgccctcagatgtctcagcaattctgatgcaccatgcaccctgctcagcctacgaaaattccccttgggattcccttttgctatgcgattggagtgggagtcgggatttgtccttctagtcagtcaacgaagtcttctgctgtggccaggagaaaagagacaataaataagttaccaaataacttggataaaatgctgggaaggaaataaacagagacctaactttgatcaggtagaagagaaggagtctctgtggagtgacatttgagtcctgagggatgagaagaagaggcgacagacagagggagcagcaagtgtaaggtcctggggtaggaatgaaggcggtgtgttcaacagcacagacggggtcactggtgctggagcaagtgggcagggaagcaggcctgacctcactgatgggctggcacgcgcagggttgcagttaatgtcagaactgtgaaaagccgtgagggtgacaggacctcacttaagtagggaaaagaatgtaaatcataaacgcattttcctttcatgtttcaccacacatccctgcaacttcctgcctgacttagaaaggacaggcttgccttcttctcctcagtgatgttatcacttcctcagctgtcaacgagggtctccacaattttccctgtagtaatatcttgttcacctgcactccaacacttttaatgtacaagaaagttgataagattacacctactgctggaagtcatgcataacaccgaagagatattaatagcaacaataataattaacactactgttaattataatgtatagctaacattagttacaacaatactactactaccgattatatataatacatagctaacattaactgagtacaatgctagtcattatcatagataaactatgataatgctgtaaatacattatcctagtttatccttcttatgagataggtactatcaagtcacccatcctacaaaaaatataactgaggctcaaagaggtgaagtaacttgcccaaggtcatacagcagcagataaggcctgagcagaatctgaatacctatctgtgtctatagcctgtgtttttctttgctggcctatggtgcctcccagtgcatggaagtggaagtacgggaccaatgcaattgatggtgatgatgccagtcattactaagctcctgtctaggcaggacgtgtgcctgggtctgagaatacagaggtcaggaagccattctctctcatctctccctaggcaatcacatccatgctcttggctttgagggccatctaccaatcctctgagctgccaactccaattcccagctacccactggacacctctgcttggatgtctcacaaacaactgggaaataatgtgcaaaacagagcttcggtttagcccataaacctgtcctgccttcccgtctgggcctttccagtctcataaatgcactaccaccgaagtcttcatgggagccaacaatttagaaatcacccctgaatcgtctctgttctttctaactgcacatccactccaccaactcctatcaatttacatacaaaatatgtccgaaatctctccgcttcctgcatcttctccatcactccgtggtctcagccccactatctccagcttggatgacttctcactggtctccctcacccactctatagagcttgaaaaatgagcttcctgagacacaaagagga

SEQ ID NO: 1882078 - DNA, 4001 bp, Homo sapiens
tgggaggtggagatgggtggatcacgaggtcaagagatcaagaacatcctagccaacatggtgaaaccctgtctctactaaaaataccaaaaaaaaattagctgggcatggtggcatgtgcctatagtcccagctagtcaggaggctgaggcagaagaattgcttgaacccggaggcagaggttgcagtgagccgagatcccgccactacactccagcctggtgacagagtgagactcagtctcaaaaaaaaaaaaaaaaaaaaaaaaagtcagtgagtccaggggactaaacccagggctaggagttaggagagcccacctccaggcccaccgtaccatctcttcttattgacagaaaagtattagggcataaaaagtattatcacaataaaagcaccaagtatagtttaaagcttttaaaaagttcacactctcatcggtaatatcacttctaggaacttaccctaaaaaagtaatcagaagtatacaccaagaaatatgtaaaaaggtgctgataattcagaaaaaatcccatatccaatgacttgacccatttgacagtattatcagtatgacagattatcaccatctgacaggtaatcaccatccagccattaaaatcatgttgcagaagaacattgaatggcatataaagaagctgagaaattcacagaattttttcttctgtcacaaatctaccaacagatatgctttgtttgtaaaacatatgaataggaatgaatttagatcagacctatgctccccaacttgccctggccccaccatccagcccacttgacacttgtaaattcattgtccctccaagcaactgagtttgcatgccctggtatgtatgtatagttccattttttaaatgtatatgcataggtagaaaaactacaattttaataatgctcaccactgggcaactggattaagaattataattctcttgtttttgtgttttccgacttttctataaacatgtatcactaaagtataattggaaaaatgtcattagcaaaaaataagaaaagacagacactaaaaaaaagacgctaaaaaaagaactgaacatcattacatgttaaaaaccaaggccagccaacttccaggtccccacagagaagggagagagccatgagaccagcagggtcctgtttccacaatgtacttgcccaccaacacccagacccaagacaggctcagacacaacaacccaggcatgagcacacaaacatatgggctcactcaagcacctgctcaccgtccctcacctgcagctgagtcctgcaggacaaggtcctccagcgcaggccagtctgtgtttagccgcttcaccagtttgtaggcattcacagggtgagccaggtagccctcagcatcagcagctgacttgctagtcaaggcttccattttgttggcccagctgtggaaccagaggaaaaggaagactaatgcgtccacccacataggtcttgacctgtgacaattttcctagtgagaattccctggtgccaggttctggggcccttttcatcaagaggcaatgaaaaatgaatacagtaactccccacagatacttctagccccttaatctagataacagctgggacccccaatgtaagggaaaaggtcttaaatagaaaataaacagtgactccttagcccatgtacttagctcctctcaagcactggcatgaagtaaccaggccagccccacatcaccctctcaaaggtttcctcttataggcaccctggatggcttccttgttccttgaggggcagaagggaaggaaggccaactaaggatggttggggacttaggacacctcttaatcttggaaagcttggcttcctccacaaggatgtactctttcagagactgcaccagctctttctctgcataaatcaggtcagtcatgtgccctgcaagggagagaagaaagacaccagtgagaaacagatgagggatgtccagcctccttccttggggcacagaataccagcacagaagcaagtcccctgggataagaacatgtcagctctctgaggattatggggacttggagttaaagggggcctaggcactcatggggctctatctcgcaacttcaggaagaaagaggcagaggcaccaaggggatgtttgagataagtgcactggatgtcactcaagaagcagccctaaatctcattctccgactgttacatagctggtcatgacactggggcatggatatcctgggggctcaccacaggataaaaagctctgaactttaggtcggaaggataggaaaagcttgatcctcaggatacaaaggatttgctgctcagaaccactctctggtccatgggcaaggtggtcaaaaagaccagagagcccaagtgcagcctgcacttcccaggaagaaagacccaattcagacatctggctccctgaacatccagatcattgggatcttataggggaaaacagcaactctgccagttccactctcctcagaactggccaaaaccagtagttaaggctatcccactctaaatgagaacaggctgcagccagagacatccgtggcatgtgagccaaggtgtcagggagacgacagtcctgttggcacgtaccaatagaggtgaagaattcggcctgcacacagctcaggacaccaaaccaggccatcagcaatgcagacacccagagtttcatggtcacagagggaagtgtctgaaaggcattcaatgacaatcactggatcaacaaagtgaaaaagactaatttaggtgaggagacacataggcatgtacacacatatgcagataatcaaacatatcaaaatcctggcctagcacacagaagctaaaaaggacaaacagcagaaagaacaaagagcgtgcagccagtgatgtgtgctcaattctggtccctgctctgggaagtcacgtgccctgcggagagagcccatcctctcaactcccagcaaccacctgtaccatgagaaggcggaatcgcagtggggtacagtcagctcgggttccaatggtctgtcagtccaagattctggcccactccttcttatttcacagactgctgtttgtttctatcttaccttccaacacatatgccaggacagtgccaggttttggggaaccagtccctgcccacaaggaggcaacagtacatgagagacaataacagaaagataatttgacacaatatcctccagagtaccaacacccaaactaaggtgtacaacagatggccagccagaagaggaataaaactaacccttgtcagtctgcacctgccagagaaagagcagtcagaggagacagtctcctaggtagacagtgttcttcctgtagtaaggctccttggcagacactgttctcactggcccgtcaccattcattcacaaatatttactgaagacctgcagatgccaggcactgatctaggcactcaggatacaaaaatgaatatggcacacatggccaaaacctcaggctgggctgctgacatgggaaaggggccagctactgtcttctcatcagcccagaaataggcacaacctgagacaaaccccactggcagtaaacctcagtccacaacagaagcctccgataccgtctcccagctcagccatgcagcctagactgtgctggaggattagcacccatctgtaccccagctctgccggtcttcttcctgccctgcttttgagcaccccactggagtgctcaaatggaaattcactaagacaaagcaagcaaaacaaaggaaatacaaatgctttcccaaaaaaacataagccttatctgacagaattctaagtctaagataatgccagttcatcagttttttgcccgccatacttgattagacacacagcacacccaccattcctcatcttactctttcagaagaaatcctaatccattgagattccaggttaggctcagagaaggccaaccacaactcccatctgcaaatggatcctct

SEQ ID NO: 1882079 - DNA, 4001 bp, Homo sapiens
cctgcaggaggctggaaagtcaggctagggatatagcagggatggagtagggacatcagggatggggctcaggatacctggttttcactcacctgtcactgttccggaagcatgtgggagcacagaagggaatcagcccagcctctcggactctccccaaactgtccctgctgagctgggcccaccctccccaaccagggctggaccaggcaggggaagcagtcctgggtccacatcagaggatctgtgtccaggggttcaagtactggggatcagcatcagtggggatcacagcctgcagccgggagggagaagtagctcttgcttgggggatgtaggcatcctcaccggcccttggagctccccacgccccacacacggatgtgcaccagaggctggcagtggatcagactgtggtccaggggattcactaggctcatggcatccttcttcaggatcatcagcatgttctggccctgccaaggacagaggtcagcccagagctcagataaaggtcattgccatgagaaataggaaattcagggacagctacctctgctgggccctgggcccaaaccattaaagggcccagccaactcacctcaccccaggcaccatctggaggctggctccggctgcgggtctgggccagctgctggatacagttattgactgcaatactgctcttccccggtgccaggtcctcttcaggtacctctacccagcccagagagcggactgcaaagcactgacaggttgggggaagggacaggaattaataaggatggagtagggtggcaggtgccacaatacatactccctgtcttcacccttgatcacctctgttcagtccaatcccacccttgtctttcccttgggacctcccaatgccctcaggcccaagtcactaccttagcccctggctccatgctctggatgtaggattccccaccataccaggacagagagttactgaaacagagcagagctgttaagaggaccacatttcctacagtagggacactggtgaggcctagacaacttgataagcacaggatgaggggcaagacccagaatatagcaccagaaatataaaaccagagcagggtagagcccaggacatattaacgtaacataaagtgtgactcagaatttgagggaaaattcaggacataggacccagacacaggacatagaataaaagtcacaaggctaggtgcagtggtggctcacgcctgtaatcccaacactttgggaggctgagacgggtggatcatgaggtcaggatatcgagaccatcctggccaacatggtgaaaccccatatctactaaaaatacaaacattagctgggcatggtggcatgtgcctgtagtttcagctactcaggaggctgaggcaggagaatgacttgaacctgggaggcggaggttgcagtgagccaagatcgtgccactgcactccagcctggatgacagagtgagactccatctcaaaaaataaaaaataaaagtcacaaaatagaacagggtccaatatgtggaccagaaccccaaagtgggacaagagaccctagaacagaggacttaatggccaaggtctagaacatgataggttaggaccaagaatatgaaaaacatgtagctacaaacaagagcttagaacaagggataaaactcaaaatactgacagttaagaacctgggacagagccaagaacgtaacagaacccaaaacatgtgacagaatccagaacctgggctggaaagcagaccatgggtccagctgcatttttgaacaccatggaaccccaagcctttcattttgcctgggccacccgttacctccggtccagtgaactctccaggctggagaaggatctccctttggggggccgcagtccccagatcccctccgttccctgtagagtgggagttagtcagtttaacagcagacctaggtccacacatgggctcagacctcctcctcacactctacctaccgtgcctgggtcctctgcatctcctagttcccaggttgggcgctgccactgggtgctaccgctgggtacatgccagtagtaagtacctgcagcatcgtggatcttcctccagccaggaggcaggccagcctccacctccagactgtggtccccccacaagtcatctacaggaacaccggattagagaggagggagcatatgatttgtgagttcagaataacatgctgtcataatcccctctccatccccaaaatgggtcagttcttaggctgaagatccaggctcctcaatcttgaagacatcacatgtaaagaccgggttcattcgccccctggtccctacacagagaggtatcccccaccgtctttgagccccagagtagcctttcggattccctcgtcctccctcagctcctggtcttcccaccgggcccctccgtgcacaccatcgcagttgaccagaatgatggccagcatgtaatccttgcccagcataaccccggctgctccccgccagcctctgccggcccgcactctcagcccagcgcgacctctggagctactgcgcctgcaagcccagcctctctgcgccgcaggctgcggggccagctggcgccgcacaaatacggggcgggacacggggcgggacacgggccggtcccgggggagggcctgagccgcacagcccgcccaggggtggtgcgtgtaaacgggcgtctggatccccgaatggttgcgtgtttccgtgtgtgggtccgggggaggcccacgaacgccagcgaaaccgctgacaccaccgcccaactatgaactcatcaggcgcctgaagaccgacacgccgaacatgcgccgcgcgcactcgcgcacgagtgagatcatcgcgccccggtcgtgagtgcgctcacacgcagcctgagactcgacgggagggggtcacgtggaagtatctgagagaggcgtacttggccactaggaaagcacctccccctttccaaaaatgctccggaagtgccttcgccctccgtaaagatggccggggcagtcggcacgagggaggcggggatgcgcctgcgcaacaagttcggcggggaagatggcggatgacaaggtgagtggccgtgggggtgatctgcagccgggcgtggtcttcactctccttgacctttttagttccggggagaagcgactctggagcggctcaggagtgaggatgtcccttgtttcttctgcggctcctgtcaactgcctcaacagtgtggagtggtgtggggagagcattcggcgaggcgggaggagccgtggatcccccagatgtcccctcctgggaaccatcacgaacccgttactagcacagactcaaaaacattcacccttaaacactcctcactttaccccattccctagctcccgaaattttcttcccagtgacacgatgtttccaatcacacggacactcacaccaccctcattcaaacactcctttgcatacattctgaatttcatacttatatgcgatcaaaatcactcagtccatttacttacacacttgccgacagtcttttttgtcattctcagtcacatccagtcactcacattcagtttgggatgtccttgggaagaaagaggtaaagcccatccaggaaccaagacaataaaattgtccaggaaactgcctcggtccattactcaccattggtctagaagctcagcattacccacacatttactaaatgtcaggcactagaacatagtagccaagacagactggtcacgactttcaaggagctcataatggagtcagtagtggtttcctgatggacctaattaaaggtccctagctgtccctcctgcctttcctacatactgcttgctatataaaattcttgtcaaggttgatgtaagttactggttcagatcccatctgtcagtcccttcctggccctcatttgaattctgtgcttttcaatgcttgtctttctttgccactgccatctcaggaagc

SEQ ID NO: 1882080 - DNA, 4001 bp, Homo sapiens
ctggcaagattattgaaccagggagttggctgaaaattataaagaagaataaaaccaaggacttaaacaaaacccaagaactgaagctcatcaagttacatatgaggaaataatggttgaaagtttgcttctcaaagaagagctgcattctactgatgatttcacaatactaggatactggagatcctgtgtggtaaggatctccaacagcttagaaaccgatgttttaaaaacttacactatttagagggtgtaagtccttcagcaaagaaaagaaggaaccaaataaaggggagaaaaaggctagatcccaaaaaagacactccaattttgattagatcctcttctctgccagtggagttgctatggagacagtcttctccttggctatcatttcaatcatgaagcttcttaggaaacacaggtttggggacagtatttaaaggagtgtgtatggagggtgtgtttgttctttcacaaatatgattactttcaaattgtaaaaccgacacatttataattctaagttgtcaccagcttacctgaagcagcttcctgatgcattcatggtggctgttcttggctgcgagatgtaaggcgctgtgtcctaaatggattttttcaaataataattttttttaaaaaggccacactttaaaaaaaatctctttcttatatatgagaagacagctataaggaaataggttgttatccaaaaaagacggaactgtgtttttttgtttgtttgtttttttgttttttgagacagggtctcactctgtcacccaggctggaatgcagtgacgcgatcatggctctctgcagcctcaacctcccaggctaaagtgatcctcccacctcagcctcccaagttgctgggagtatagcctcccaaatagcatgacaccacacctgggtaatttttgtattttttgtagagatgagatttcgccacgttgcgcaagctgatctcgaactcctgagctcaagcagtcctcctgccttggcctcccaaagtgctgggattacaggcatgagctactgtgcctgggctggaactgttattcttgcgagtgggaagaatcgagcatcccccatgccctatcccacctactggatgacattcacaggttccaactgctgttgtcttggggtgaaaagcagctccaggctagacacttgcggtggattcatgataatgcagctcagcagctctgctttcagctgtcaatatgtttgccaaacatcctgtgtctataagagccatgccaggctatgcccaccacaggctgaggaatccagtgaaggcaacccacaagccagcagaatacatcaaagatccacacacttcagcccctactcttgacatctcatttccctctcctctcaatgtactccagccctgaatggaaattacctggagttttctgattttcaaagttcttatacagaagggagagagttgtaaaattctcaatgaggcctttcctgactttctcgtttcaaattccaatttctccctaattcttttacccccactccctgctttatttctttatccttcatagcacttagcagcttctatcactcccttttacctctttctctatacagacacacacttatatagttaattatttttcccccatgagaatataagcttggtgaggacagacacccctgttgattccctgctgtatctctagtattgacaactctgctgctgcacagtaggctctcaatacatttctgtccatctgaattagagggtatgctaatttcaaatgtctggatggggggacctggggagagggtcagagcagaggacctgaccactaccagacaccccaccacacctagtaaactcttaatcctggatttcccaagctatttgacataatataacacctgtagataactcccatactttaggacatgtttaaagcactttctcccatccaagtactaaccaggcccgaccctgcttagcttccgagatcagacgagatcgggcgtgttcagggtggtatggccgtagatgcactttctcaaccttagcatcattgaccttataagctggataattgctgtggatggttgtcctatgcagtacaggacgttaggcagcatcgctggcctctatccactagaggtccaaatgtgacaatcaaacatgtctctagacattgccaaatgtcccctggggggcaatatcaagcccagttcatcagaaccactgacttcgaggaacaatttcttttcttttttttttctgagcccaggctggaatggagtagcacaagcatggctcactgtagccaagatctcctgatgtcaagtgatcctcccacctcagactccctagtagctgggaccacaggtgtatgccaccacacttggctaaattttggtagagctgggggtcttgctatgttgcccaggctagtctcaaactcctgtcctcaagcaatcctcctgcctcggcctcacaaagtgcagggattacaggcgtgagccaccattcctggccaacaacttctttatatgatggtggcccaggccccaaatacctttttttttttagaaagtcttatctgtcattcaggccggagtgcagtggcaccatctcggctcactgcaacctctgcctcccgggttcaagcgattctcctgcctcagcctcccaagtagctgggattacaggtgcgtgccaccaggcctggctaatttttgtattttagtagagatggggtttcaccatgttggccaggctggtctcgaactcctgatctcaggtgatccacccaccttggcctcccaaagtgtggattacaggcatgagccactgcgcccggccccatttttctttctaaatcagtcttcagtctgtaacactgaccagaaattcactaattagagaatcatatagctaggaaacactgtatttaaaaactagtgggccatagggctatggtgaatggcataaaaatgtgtaaagtcaaatgatccgattccttctattttgaattcagctgtacggagagatttttagggtaggtgtgggggagagttgtttcatcagcataggatactgagagacaggaatccctctgtcccctcccaaaaggaggaggatgaacaaaatttaaaaatgaaggaagagagattcttggaagtaagaagacaaagattttctcttcctcctcctcctgttatattatatgagatccctccttccagagtgtatgaagcataactgtgtatgagtttagttacatgatgcattaaataggctttggtggagtagcttggccctccaaccatcacttataccactgtttctgtggacaagcacattctgagttttaaacaaatgccttacaaatgaaggtttggaacacatcctgattgtaagatggagaccgtttatgtcgtgtacgcaatgcattaacttgtccctgctgtgaacaaaagctgttctgcataagcaacacccactggaaaaagacctggttctccaaagacaagatggttgggagatgtaaacaacttactataaaataacaggttttctttttactttgagtaagtgttctagtcatacctggaagtgccgggtttctatagaagcaaaaattcttttattccccagccctgtgatgtttttctaacgagcagcagaaaagtatttttcactaaaaatagtctcaaaatccgaatgacgcatcattccctgaacactataacactgaagtaagatgtctctcattgctactattaacaccaaattctctctccaaatgcaaaattttctggacgaaatactattttagtgacagaatccaactatgatgagacaatgcatctctgactcccatatagctgtggatctgtctagagtatcaggaagcaatttccctgtgggcaaataacaagggcaatcctaagtgccttccagcagaattccacctgcaaataaaagactagtgatatttataaat

SEQ ID NO: 1882081 - DNA, 4001 bp, Homo sapiens
ttccctcaacaactttttctttacatgcacaacttggttaactggtgcaagaggcctagctttcagcttttgacctgccatcctcactaagcttaatcatttccagcttttgatttaaagtgagagacatgcaactcttcctttcactttaacacatagaggccattgcagggttattaatttgcctaacttcaatattgttgtatctcagggaataaggaggcccaaggagaagggagatgggggaatggctagtcagtggaatagtcagaacacatacaacctgtgttgattaagtttgccatcttatatgggtgccgtttggggtgccccaaaacaattacaatagtaacatcaatgatcacagatcaccatcatagatcatgaaaaagtttgaagtattgtgagaattaccaaaatgtgatacagacacatgaaatgagtacatgctgttggaaaaatggtgctagtatgcttgctcaatgcaaaggtgccacaaatcttcaacatatttaaaaaaaaaaaaaccagtaactcaaagcacaacaaagcaaagtgcaataaaacaagctgtgccggtatttcttacagttctggaggctcagaagtcccaaatcaaggcctcagcaccttcggtgtctgctgagggctgttctctgcttccagggtggtatcacaaacaccgtatcctcccaggtggaagagatagaagggcaaaaggagtaaactctcccccaagccctttaaaatgtcactaatcaggccaggtgtggtggctcatgcctgtaatcccagcactttgggaggccaaggcaggtggatgacctgaggtccagagttcaagaccagcctgaccaacatcatgaaacccccgtctctactaaaaatacaaaaaattagctgggcatggtggcgcatgcctgtaatcccagctacttgggaggctgaggcaggaaaatcacttgaacccgggagacggaggttgcagtgagccaagatcatgccatcgtactccagcatgggcaacaagagcaaaactctgtttcaaaaaaaaaaatggcactaatctcacctatgaggtcagagccctgagggcctgatcactttccaagggacccaccttttaatatccccatcttgggtgttaagttccaacatatgaattttggaaagacacacacattcaaaccctaccaatctcctaattttctctaagatataagtttgttttaggtttggagaccatgctgggcaaggagataggaagagggagaataagaagaaaaggtagttaaggactatttcagagcctttggcctcaaacaccaaaagaataaaccaactgtttagattactgtttcgttgttgttgttgttgctgctgctgctgttgctgttgttgtttgttggagatgggctcctgctctgtcacccaagctggagtgcagtggcacaatcgtagctcactgcagcctcaaactcctgggctcaagtgatcctcccaccttagcctcccgagtagctgggactacagatacgcaccaccatacccagctatttttttttttaatttttagtagatacagggtctcaccatgttgcccacactggtctcaaacttctgacctcaagtggtccacccgcctcggcctcccaaagtgctgggattacaagcatgagccaccacacctggccaggaatgtgtttctaatcagcttaaaatcaccactctccctgatttaccactcagtcccaccacgtgcattcattccgcaaatagtaagtgaccacctaccatgtgtttatctctcctaggagctgagggagagcccagtaagtacaaaaggggtacctatcctcaagaaccacactgagggtgcaacctgaagctctgtaactccacagccactgcatgagcaaagtctcaaggatgcatccagacaatccacgaacaggaataggccaggaggcacagctcctagaggctggatgctcagagaaggcttcagaggaggtaagtgaattagggtttgccagagaaacagaaccagtaatacagttgacctttgaacaacacaggtttgaagtacataagcctacttatacctgacatttttcagtaaatgtattggaaaattttttgaatttgaaattctcactaactgtgtagcctagaaataccaaaaaaacaaaaaaggtgtgtcatgaatgcataaaacatgtagatagtagtctatttaatcacttattaccataaaatatacacaatctattataaaaagttaaaatttctcaaaacttacacatacaaaatcgaccacaggcacattcacattctagagaaatgtaaacaaatgtaaagatgtaatattaaataattgcataaaattgactgtagtacatcctgtactgctgtgataattatatagacatcttctgtcttctgcaatgagctcaagtgtttcgagtatccacttaaaatgctgtgtgactgtgacaccaatcgtccacgtgtgagcagttcatccctccagtaaattgcatattgcagtaaaaagtgatctcttgtggtacctgtgtatttttcactgtgtttagtgcaaccttaaataacaccatggggcccatacgaggtgccactgatgatgctggaagtgctccccagaagcagagaaaagccatgacatcacaagaaaaagccgacttgcttgagatgtactgtagattgaggtctgcagctacagctgcctgacatttcagatagacaattcatcttgcaaacagatggtaagaacttacttacggtattggtaaatacagtacagtcctgtacatgtattttctctttcttataattttcctaatattttcttttttcacactatctcagaagaatcaaatttcattgtctctagcttactttattgtcagaatacagtatattttacagtatataatattgtaggaatacagtatataacatacaaaatgtatgttaatggactgttggtgttatcagtgaggcttctggtcaacagtaggctattagtagttatgtttctgaggcgttgatatggtttgactctgtgttcccaatcaaatctcatgtcaaattataattcccaacgttgggggagaggcctcgtgggaggtgattggatcatgggggcagatttccccttgctgttcatgacagtgagtgagttcttacgatatctggttgtttaaaagtgtgtagcacttcccccttcactccccttctgcttggccatggtaaggtgtgcttgcttcctctttgccttctgccatgattgtaagtttcctgaggccacctaatgatgcttcctgtacagcctgcagaactgtgagtcaattaaagctcttttcttcatatattgcccagtctcaggtagttctttatagcggtatgagaacagactaatacaggagtcaagagttatacttggattttcagctgcaggaagggtgggcacccctaatcccgagttgttcaagggccaactgcatatgtgcggggcagtgggggtagtgtggagagagagagggatttcttgtaaggaactggctcacacgatggtagaagctggaaagtctggcctgctaggacaagccagtaggctgaaaactcggacagaagttgaggctgcagccttaaggcagagtttctctaaggagacctcgcttttgctcttaaggccttctgctgaatagatgggtccacccacatcatcgaggttatcttctctacttaaagtcaactgattgcagctgttaaccacgtcaataaaataccttcacagcaacacctagactagtgtttgatgaaataactgggtaaacaacctagccaagttgacacataaaactaaccatcacaggaggcctcccaataaggaacaagaaaaggcagcatgagggtgtgcagcctgggcctagacaaatggtaggtcagagggctgatggccacgggatgaaaacagg

SEQ ID NO: 1882082 - DNA, 4001 bp, Homo sapiens
cctctttttctccattcttgctttgctgaaagttggagaaaaggacatgtgtagagaaaatgggatgcttcagggtggctcagaggacaccaatccatagtgattcgcctgagtttgtcaggtggaagcagtgatttttaagagtcactgattaaaaacaaacagtcctaagtgtattagggagatgccatttatttgtgaatcaaaaacttttctcagtctcttaaattatggttttcctgtaataagaatgatttatatttttagtgaaaagttgttttcctttcaaatacagactttttaaaaagacttagtttgagtaagtaccttttcatttgatgcttttcttgtgcctaaccttaggaaatccagaatagtatttgacagaaattatgttttcaacttgcctttgacatctgtcccactgcattttgctttaaaattctttatttaacaataaattatctaaaaaaataacagtagcaaagcaaaaagtactcatctttaaagacagactcgacggagggaccggaaatcagaaaaacatcagggttgtttaggaattgcaggtgcaggaggagagaacaggagtggggcgggctgggggcaatgagagagcaagaagaaaagaaaaataaaaagagaaggagaagaaagaaatgggcttttgctgggtgcaggcagtgacatttctcaggaccccttatttctccctgtgccttccggagggagcagcccaaggctcctgggaggacaagcagcacgtgcccgccggcagagctcagctccagctggaggacccctttgtggtccttgcgcacactgggttttccttcttccccaaatatccgacgcgtccagtcccttactccttccccaggcaaaacctcctcaccaggaacaacctgaaatcaatttacactgtaatcaaaatagcagagggtggaaagtgtttccttcgaggaggggacttacgcttcaagtaaggattgagcaccctggatccttaactgaagagtgaggtcagaaagggcggacgcacagcagcaaacggggaggagggtgctgtccaggagccgctgacttttcccttcaggaagctgccagaccatctctctctgctaaaggctttcaagatgatacccttgagtgttgggagcaaagggaccaggtacctgttcctcctggctcagaagatgctcttgacaaagtcttagggagacctcagctttaagttgttttatctggcagcgggattttaaattttgtattcattagttggctggttggctggttttgtggctggcaccgtgtgagccggtcgcttcttcagtgcctctgtgtgatggcaggttagggtgagtgtttggtctgtggccagctggttcctgagacggtcatggttttgggtaacaggagtgacggaagggtgtacccagacacacgacgtagctggtgaggaatctgaattcgagaagtgcagagcgaggctctggaaccagacagtgggtggaaccccaccccaccactcacccactgtgtgcaggagcaagtcactcagctcctgggcctccgtttccttatctataatttggacctattagtaataataataataaaaataataatactgaggtatagataagtgtttgatagataggaagtacccaatgcatgttagttttattactgtcagcacgtgtgtgtgtgtgtatgtgtctgtgtgtgtgcatctgtgtgtgtgtctatgtgtgtgtctgtgtgtgtgtgcatgggtgtgtctgtgtgtgtgtgcatgtgtgtgtgtctgtgtgtgtgtgtgtgtgtctacaatcctcctcccctgaagattccatgatgggaatcacacgggtgtatcacaacagagaactgaggtccctctagcacttccacggttctggaacatcctgccccaatcccctgtccccaggaggtggcagcctgcccccagtccagggaaattggagtgagtgctccttctgtgagaaggccagctgtgggacctgtctcgcgccccattaccaccttatgagcagacctgtgtcacaacctaacacaacctcgactaattccccagaacccaacccatctgaatggatgcataaacacaccctgagcccctcttggttttggaagttactagctgaacactgacgtgcccctcctggttttgctgtcatggagctctaacctgtgtctagaatccagaagaaaagactgaagtataaaggaaaagagaagggaacagaagagagggtgagaaggtgcacaaccagtgtagacccctttgctggaacccttccttgccagcttccccacctgtcgcagagaggcttccaccagtagccacagagggtgagagtctggactgtccagccagggcctggaccctgcccgaggcctctgcccatgctggttattgtgtgaatcgtgttccaataactgagaggtgtcaacacggccccgcttcggggggaccccacctcctgtccttgaaccttcttgaaacacacctggagctgtcccaacctgtcctctgtttgtcccctcaattttagctctaggagacagggccatcagcccatgcgcctcacaggccacccctcttcccttgtattcctgcctgtctgggtgcctcctagcctaagggtccctggggagcctctaccacctcattaactcaccctgcacacctcctctgatccttctgcctctgcatggcccagcagctttgaaagtccttccttcacacctgctgatggtgttgctgacagtgtggccagtgccctgtggccacaggacaccggaaacacctgccatgccaaggtctcggaagaaaagccaagccgtgggggccgacggggagacagagagggttggagagaggagcccaccgtggccttccaacaagggcactgtgatgaagtgaaaggcaaggggtgcagtcccaggacgaagacagtgcgtgggcgttgggaaggcagggggaagggaggtgctgactttgatttcaagagctcctagcaacccatgggagtgggcattggtttcttccatggttcaggcagagatttcggtccagccaatgacagaatctgcctaaaatcttgcagaactaaatgcaagagaaatatggagagttttgtgtatctccagagactcattggcagcagcacactctctggccgtgagtcattagtgggtcccaagggagcagagcatcaggagtgagggggtagcccttgtctgggccaggtctgggcctcctgggtcatagatgaggaaggggtggctagatgggatgactccatcactgtagccccgaagatgctatcgacacagagacagttaccagctggcctcctgaaggcacaacttgaggtcccaggcctggaggagagtgtcctaggatgtcgttggggctggcaggcagccacctgcatgcactccacttctgagagagcagaactctgtgtttgttcctctgttttgcggactcgatgttccagaccaaagggaagtgggacgaaggttgggttggtggtggtgaggcaggaagaatgaaaatgcatctgagatcttcagagattgccctttgtttgaggaaagtcgctaagcccagaaaagggggggcgctgagcccccacacattgtgtggctctattcctggctctaaacaataagcagcacagaagctgcttcctctgggatccttcagcctcgtccccttgcagctctgtgaacctgggcaaggccacggatgccattaacagtgtcccctgggaaaattagaagcagctctcccctctggccatggaagaagccaagcgctgaggcttgtaaggaatttgagaactagacaaaaataactgaggccacaacagacttcaggtctgatggagtgagttccagctccccctacctttgcacgtcgctccagcacccctttgtccctctccaggtggcccccactgctgacg

SEQ ID NO: 1882083 - DNA, 4001 bp, Homo sapiens
ttgaagaggacacaaataaatggaaagatattccatgatcatggaaagaattaataatgttaaaatgctcatactacctaaagcaatctaaagattcaatgtaatccttatcaaactaccaatgacattcttcacaaaaataagaaaaaaaaaaatctaaaactcatatgggaatagccaaacaatctagagcaaaaggaacaaagctgggggcatcatgctacctgacttcaaaatatacagcaaagctagagtaactaaaacagcatggtactggcataaaaacagacacatagaccaatggaatctaaaattagagaacctagaaataaatccacacatttacagccaactgattttcgacaaacatgccaaaagcacacatttgacaaggtgttaatacccagaatatataaggaactcaaacaactaaataacagaaaaacagataatctgattcaaaaatgggcaaaaagatctaaacaggtatttctctaaaaaagatatatgaatgaccaacaagtatatgaaaaaaaatgctcaacatcactatttatctgggaaatgcaaatgaaaatcacaacgagatatcacctcaccccaattagaaggtctactgcagaaaagacaaaagataactgctggcaaggatgtggagaaagaggaactcttataccctgctggtgggaaagtaaattagtacagcccagtatggtcaaaagaaatccaatttttatggtaggtgttgcaagaagcactcatacatggagcactacacccactactgtgttgatcatgcagagtaaaaagaataaatttcctatcatgagtgctaatggatagttgtttccatggatacctgatgttagcaagcagttaggcaaatacgagtatttcccacagtctacatgtatcacatctctgaaatcacaaacttctagctacttaagaagaccacaagatgttagaggaagagacttgaaccattctctcctatatgccctcattttatattccagaaacacccaggcccagggagttcaacaagcatgtttctttctttccccaacactcctaaaccccaatatacttaagattaatatgcctttattagaaattactcaatcaaatcagcttatttaatgatcactatttttaacatttatctttcaaggtaaccctgagtaagaactatcagtcacgtaggaatcacaaactaaagaactggctctaggtgaacaattatgctagactgaacataatttaatcactctcgtgaactgcagcatacttaggagtttggcagggtgcctcaaagttctgatcccaagtctcaactgtcactgtgttgaaggctgcagaagttctggtgaatggaggttctctggttgacagaatatgagtgagctgaactccactgtagcagagatggttattagatacctcccaaggaaaacactgtcattttgaaaagtcaaatagccatttattttaggaagattagtgagcccaagcaaaagactacctgattccttaggaaggaaattttactcccagcataacatttttaaaaataaatatataatgctctcttgtttacatagatgattctgattctaccagcgtgactgtgggattgaaggcatgttggtccctcctcaccgaaatcacaaccaccctgtgtctgagagccattaggtgccagggactagccagggaaagggacaatccatgaagagaatagagatttccagcctacgtgtagatcaagaccctagccctggcctcaggactacataggtcattcaaatttctactcaggtgagaggaacaatctgggctctacacacttttttcatcgggcaagagtagaatgcatgtccaaactctcttctgtgaccggtgagctgggcagaaggcaggcccagccagtcggtccctcgggccagggcaggaagcgagagtctctcttaccctggtgcgtggggccgcagggctaacaccaacaattcatccgatggagcatgtcgaggtcgagccagaagacttgtccaagcaggttcctgagcaacagttgctctaggcaagtactgatagcaaggtgcagagaaaatgggggtctgagaaccaggtaatatgagggcaaggcccggggggagagaagaggagtggaaaaaatgggctttggaatcagacacatctgggcccaaatatagtatcagcccagtcactatatagctgtgtggctatgagcaagacattgaaccttgctaagcctcattttcataacttgtaatatcaggataataggatgcttcccatatgggtgtcaggaggcttaaatgatatgaagcacttagcacaatgcttgataaatagtaaacactaaatgttatctgattaacactagtgtcattattagcttctaaggcaggtgctaaaaaacagattcccaatgaaaggtagaaaaggatactatgaacctgtgagggagggtaagtaccactaattctaggggtgattatggggctttttcaggaccccagggtgcttgtcagggtgtggaccaaggtggaagggggcagtgcccatccaggggcctgggccaaatgagaggtcatcccatccaccctgtcaacagcttcttcaaataccatctactgaaagcaggacagcccaactcaggagcaagccacccacttccagcccaaatggcgtttcagtagcatttttaaagagctgaatagagatgccaactgaactggaatgacagtgaaaagtgccaggttcagtacatttccaaaaggttcatttgcatcttcctgaaacctcatttccttgctgccatctgtggaacagggtaacgtaggagacttctgagtggctgggagacagcctcgggttgtccatggcaacccagcctcaggaaaagtgctgggcggtgaatgtgtgggagccaagatgatgctgttagctgttccggctgggatgtgtcagtatgctctgtgcatatatggctcaggaaaaacacctttattagcctctgcagctatctcaaggcagagtcctgttcctctcagggaaaggacttggctggcaaacagagttactgctgagaattactgaatatagtgcaggtctctctccaccatgttgtttttcaaagtttgctctgccagaaagcctatctggactgaatttatgaaagcacaaaccagcctgcccttggaattcctatgcctgcttctccaactagtccaattatctcctgatttttcttctttctctacttatttggttgttcatatatgtctatcttactttctcagagagacttcttaaaattaaaagtccccaaagggcaggaatcaggtttctttcaacacagcattcggctataatgcttttgtgacatttggaagcaatataataaaacagttcagagcacagggcctcgggccagtcatcctaggcttaaacctcaactcagccatttactaattgtgctttaaagatgggtcacaaattctgtgatactactacactcagacgtggaacttaatacctctccccttaagtgtgggctagacttagtgacttgtatctagcaaataaaagacagaagtgatgggacatggattttgacattaggttataaaaacactacagcttctgtgttagatgtgtgctctcattttcttgctctagaatcaccctctctggaagaaagccagcatgtcatgaggacactcaagcagcttatggagaggcccacatggcaagaaacaggcctgccagcaaccacatgagtgagcttagaatcagatcctccccaaacaagcctgaaataactgcaccccgaccaacagcttgactgtatgagagaccctgggtcaaaaggacccagctaagccactccaggattcctgcccacagaaactgtgagatgatagatgtttattgtgttaagccatcgtagggtaatttgtaatgcagaaata

SEQ ID NO: 1882084 - DNA, 4001 bp, Homo sapiens
aagaaagccgggttggtgtgctcgatgacgcagcgcttgcagtggcgtttgacaaagcgcagggcctccacggagacctcgcagtcctggacattcagcgtctggaggtcaaagcagttggcggccacgatctgcaagccctggccggtgatgctctcgcaggacttgaggctgagccgcttgaggttgaagcagttcagggccaggcactccaggcccgtgtcggataccaaagggcatttgccgatatccagggatttgagtttggtgcagttcttggcgaggtactccacaccgtggtccgtgatgccctcgcagcccctcgcgttgaggtagcgcagcttgctgcagtacttggccacgtagcggatgcccacgtcggtgacccggccgcagtgcgcgatgctcaggtaccgcaggcgggactccagcttggcgatctcccgcaggccgaagtcgctgacgaagcggcagtcgctgacgctcagctccttgatggaggcgcagtagatcaccaggtagcgcaggccttcgtcggtcaggcggacgcagcggcgcaggtagaggtgggtgagctgcgtgcagtgcgccgcgatggtgtgcaggccttcgtcctccagcacgaagcagtccgtcatgtccaggtagcggatggaaatctgtttgccatgcaagggtgacagtttaatggaggcctcccgggtcaagctgatgcaggtcactttggagcatcctgcacaaagagacagaacacaggctcagagcaacctgccagcaggggagccacgcctggggatgccctggggcattcctgaccctcgcccaagtctgggtccgaggctgatgttaccctttcctgtcttggtctctatagagaggaaatgcaagaatgggttccccatatttatctgattatttaactacattatttctattatctgggcttaagaggattggatcagaaaaaccatggttccaattcctgatctgtcatctgtccctacttgcctgacatttagcaaatcaatccttctgagtatttcctttgtcttaaaatagggaggatcccattccctgggaggcagctgggatggagtaatgagaggatgtgtgtaaatatcttgccttggccctggaaagttccaggagctcagtaaaagtgagttcttgagctgccctggtttggaagctccctggtccaaagtaagatatgaaagacaaagctcgggcatgtaccttggtttagcagaaagaacactgggttaggagtcacacctggttcaggcaggaggcttaacgttgctgcttctcagaactgtcctttatgcaatgggaatgaataggtggtgagccgacacttcagatataatgaggatgcaatgagagaacagatatgcatgtgctctgaaaacgctatgggaagtgaatatattagtctagcaaggtgaccttctgtcaattgaacagaccttctgagtcaatccaactctctttagttgaggaagaacaactgtgttatctggattgttgctgtagcccttgaacaagactcccttccctgcccttagctcctacagtcgattccccacacccctatttgccagaggcgtcttggaaaacggaactcgaagcttgcccctgtgcaaagcctcgggatgacgcccgttcactccaggtgtccttgaatcagactcccttccctgcccttagctcctacagtcgattccccacacccctatctgcccgaggtgtcttggaaaacggaactcgaagcttgcccctgtgcaaagcctcgggatgacgcccgttcactccaggtgtccttgaatcagactcccttccctgcccttagctcctacagtcgattccccacacccctatctgcccgaggtgtcttggaaaacggaactcgaagcttgcccctgtgcaaagcctcgggatggcgcccgttcactccaagtgtaaaatccagagtctaacagggctcccaaggatctgcaccccggggctctctgacggcatcttttacctcattcctccaacgccactggcctgcttgtcatttcccgcacaccacaaatgctctccagcctctgagcactggaaatggcttcccttagccctccagactttcccaggtctcagagccaatctgtttatagaaaaatttgtccccaaccatgcttgtataaactagcatcccctgctttcctcccctttattttcaggagtctttatccctgggtggcattatatatttatttattcacttatttatttgctgtctcctcactctggaatgtaagttttgagaaaagggacttggggctgttcactgctgtctcatttctggttcatagctggtgctaagtatctgttgaatgaatgagcggtttatagagggaaaagagtcttccataagaggatcagatgagatcatccaacttccaacagtcttcaggaccttggctgaagtatacctacattgaaaaacagttgtctgttttatagttaatgataatgtcttttatttgtgttgaatcacgaagtttacaaagggcttttataaacattttcttacctgattgttagaacaatattaatgctcaggaaggtatctttagatgcctctctaaacatcgtttctaatctcctaaaaaatatgtatgcataagttatatatatacacactatataatttatatatttatatataggaaacacttatttcatggtatatttaagttctctatatattactctataaaaacacgtacagtatacttatggtatattaatgtaactaatatccatagtctataaatattaggttagtgcaaaagtaactgtaatttttgcaattaaaatggcaaaaaccgactgggtgtgttggctcacgcctgcaatcccagcactttgggaggcccaggcgggtggattgcttgagcccaggagttcaagactagcctgggcaacatggcaaaaccccgtctctactaaaaacacaaaaattagccaggtatggtggtgcatgcctgtaatcccagctatttgggaggctgaggcacgagaattgcttgaacttgggaggcggaggttgcagaaaatctggagcgcaccactgcactccagcctaggtgacagggcaagacttgatctcaaaatagataaataaagacaaaaaccgcaattacttttgcaccaacctaatattttataaataaatgtatatttttatgtatttcattctactaccgaggctgtatatatatttttcattttctctctgctcttctcaaatctctcgggcagttctacagctaggcgcctcacttcggacacttctgcaccttggctgtttcacgcaatatccaaggcttcccagcagcctcacaaaagtgctaacgaggaccttcctcccacctcctggtaggctgcccaggaaactcttagacactcaggccctgggaataatgaggttcaaaaaccacgtgctactaagtcaaagaatttcaggaaggagtgaagcacacactccaaaaatggagaacaaaaacagcttgtcagaggcaggtcacactgttccagtgggctttgtggttttgcaaaaggtgattagtcccttttagctttgaaatttccctttgttttgagtttctttcttgaggctgactgtaatcctgcttgcactgaatttgtttttctatggtagtgattggccatctgtgacgcctataaagacactttgtttttcaagatcatatgataacctttgctcttaaactcttggttctagtttcctttctttagaaacaaaattagcaaaatctgctacactctaggaaagataatatatttggtccaggaaaatgtatactttgcttttgaaactgaattccaaatttaatgaaatacttgtttagttcagttttggtaaagagactattttataggcttgtattattttagatcaataattttagattttaggttttgcccaa

SEQ ID NO: 1882085 - DNA, 4001 bp, Homo sapiens
ttctaactgaaactaacagtggtttaacaggcttctccagtctgaagtcatataaggaattgaagctacaaaggaaattgtactacttttaaagaaaaattgtatatttgggattgtcaataatctaggccacgtggaagataacaggctattttggatattttctaattgcaatggttatatttctgtgtaaatgcctatacaaatgtttgcttggtgacatatggaaaacttaaggacttttatgaaaaggcgacaatggggacctccaaagcgccaaagtttctgctaggcatagtgttatttttagattacattaaaatggctatttagacccatctagctgagactattccaaaacaaactttttatcatattgttatcataatcaactttctacaggctaatgactttatagttttacttctagtgtatatctactagcacaattagaccaagttcctagatgtatcatgttaagaggtaaaaagcctcatgaaattataataacgactgttatatagagatatgtattttatctctatacacatttgcccacccaaaacaaaagcaaaaatgtggtcacaaggccataatctcatggactgagattttgacattaggggcaggcagtcatgggactttcttggaattgctttctactagcttgccttgaattctgaaaatctcaaacaacgaagaaagccaaacttaattatggccagattaaacagtggttaaaaaattaacagaagcagactatgtagcagctacagaccagttggtgctgccatttgggaagctgcagatggctgtgggtgggaaatgcctttactttcttaagcgatggagatgagtatggtgtgtgcacttgatgtttttttcatacccccaccccccaacagggctgtctgtcataggctgcccggccccgctttatcacttgcccccgagcgtgggaatcggagcgtcctgccgttcacatctcctgcattccgtttagcggaatcaattaggcaagacagaccctcagattccccaccccctttccatttttgtcaggtctatatacgtcctaattatttcagtttgggatgccagagctgtttcctggatagacctgatcatccttaaacaaaaagagaggaggcgcacacgtgggttgtggcgtaaatgtcactttcatttccaatgctaggcgcagagtaagacagaacatttttttaacactttgacaagaggggaggcgatctcgtctccatcatgtctttctgcttcagtagcttcctcaaggaaaccctcttggaacagagaagcatctgtccttgtattttgaatagaagaataaaaatcagcccttgcttttttttttttttttttcattttgcctgctagctctaagtcctcagtagatacaaattattaaccttccagtataaacttttctgaaagtctaatttcgtacaaattgacatacagcccaaatacatgtaaagtaatttccaagcacaatcttcaaattttgagagggaggtgcctcccaaaggaactgcccaagtctacatattatggaatcatttttaaactaggtaccagacatctctgcaacacctttctaagaaaaaaatccctgatataacttttgccttaaaatagaacaaactgcacatgcatctttactcattatcactatacacttctcctttgcagctgcaacaacccctctcaagacatatctggaaccttgatattttagcatgtgtgtgtcatttaattttctctcatcccacctttaatcataaggaaaaaaacaaaacaaaaacaaagttagattcaataagtattcctgacctttctggtttttactgtctctcggctgtagtctttcattctcacacgctccccggcgatcttgaaggagtttttactttcggttatctagctttatgaagaccaatacactcatacagctagataaccaaagataacaactcgcttcccacacaggcctctgtcttcctcttgccagactccaggtcctgatcctttctggcagtaccgaagagtggtcgtccaggatacttgccgcgcttaagattcctccttttatgtaaatatgacctggtttctgtttgtgtgtgtgcgcggctaaaacatccaaacgagatctgttgccttcagagtttattccgaacttttctttttcctttcagcaagtaatctccggcagcgttagccaacaattcatctattaatatcagaaaataaaaccagctattaaggtgcagcaagctgttacgagtgagcagcagcatccgtcccttcacaggcctctatttgcattgtaaattgcttctttctcacgcaagactctttagcctctctctatagagatgtataaagccaacggcaatttccagcgcaggttaaggaggaaggaaaaaaaaatcccattctatagaagtgacagctgattcaaggatctgttcctgatcctttttggttaggcaccatggctttttaccaagcggtggcagcttgattgcacatatcttgtgtgtatgtgttttagggggaagatcctcgatttcacagggcttctaggctgggaaggagaagatgccgtcttgctggcctgctgctgcccccggtctgaaagaaggagaaaagggccatcattggaggggctttcactgccaaattgtggaccagcccggcaaggtcaaaggttcgagaccgcgggagaccaaggtaatgatgatgtcatgagaaatctcaagtacatggttattgatatgcatcagtgatcagccaactgccccacgcctgctgcccgagcagcggcagcgacagcagcagtagcggcagcattgcaacaatccctattttctcaatcaacatctcttccgctagcactaccgactgctcctggaaaagcaacccgcggccttttacctcctccgtgctagtgtagatcgttctagtatccaaagactggaagaaatctctctctaaggacagataaaagcatttcagatctggggaacgtctttgcctgcatttttcttctggcagattgcataggcagacagatggaaggcactttgctattgcttaaagcagggcctcgttttctggggctgggaatcagatctgtattacgcagtgagtcgatgtgtgattacattgacaatttgctctggtggtgtgtttttaatggcttcacagctcagtcatgttttgtatctatgtaccatggcgatagggcagcatattttgttctgtaagttcgaactgaatgctctaagcaagcggacttcatcgtggtttttaaaaaatgactacatatgtagggtgtgtgcgttagaatgcagcacaggtaaaccttgcagcaatagtttctaatgctgtacacaactctgctgtaatgaaaatcctgagcctttgtctattgttttaaacatcaattttcatacaaaaggataatgtaatagtcttgcttctgaaactatgaaaaaaaacgttgttacctcgtgaagaacacatataaaacacctggatgttaagagcataactctgccctaccttccccttctccaacccccacctttcttctatctagaggggaatgttgttttattaattaattagcctcattccttttcttagaacttttcaaagtgtgaatatgatcacttcaaagagtccttttcttcttctctctccttagtaatgagtaatctatgtctaactcatctataatacatgcagttgtaatattcaaatgtccctcaacagaacatctaagatagtctacattaaattcatatttaccaagggtgaaccttatgaactgcttttcaaaatttcaagttatgtttggtcatattgctattctttaaaatatatgctattagagtaatcttaatattcattgcacacatgactactttatcacaatactctcaattctatagattattttccccaacaactaaaac

SEQ ID NO: 1882086 - DNA, 4001 bp, Homo sapiens
agggacagattaaatcaaaagaatctctaatgctacatggaaacattggcagagtctatgatgtctttgtactctttgtactcttcacactctgagaaaagacagacacgcctgcctcagtggaaggtgggacatgctgctggggtcactgcctatagggcaggcggcaccatccatcccaaggacgaaagcagctccagtaccaggctccaggcaggcatttccacatctttatttatcaacctcccaactttctggcatctgatactccccaactcagggatagggagaaagaaacgcaagggcacatcaagtaacttgacaagatgattcacctggaagaaggtggagtcagaattcacagcacctgaggtctgactctgaatcctgggccactttcccaagccttgcagcctctcctgtaaaacactggactggtgcatgaagtagtgattttctatacagtcaggaaggccctaggactatgggacccaaagtttcccttgtactgggaatttcaagtgcaaatatgtcaaacatttaaaaaatcatatctggatatgattgcataaaatatgaggcacaagaccgtgaggctgtaatagaaatatgcccaaatactaataaagtttgaattaagttagaaatagtagaatgaagagctaatagatagtgtttactctgttccaagaactgttctaggaaatttacaagaaataggtcatgtaattcattgcagtaatttacagaggtaggtattattatagtactcaatgagcagatgaggaaactgaggcacagagaagataggcaacttggatggagcccaggagactggcccagggtccttgctctgcacactacactgctacctccacaatgtcttatgtgccatctttcttcctcttcaggaataagagcctgtgccccaggaagcagcacttccctctcaccgggacactccctgctttgaagggtgtcacagatatcacagtttctgttaggagcagtctcctctttaagctccttagagtgggtactctgtacagttgccatttttcccccagggtcccctggatggagctttgcctattgggcctcaaagaagcttgaactgaatggaagttcattagtcccagacatttagaccaacagactagatgttacttgtctgtagaatcttacatggtacagagaggattctcataaacatgatttagcctcttactaaggaaaacaggtggttctgtgcctgtgtcagaagacaataagtaggattttaactctagtcccacctcacaccagactgccaatgtggaaaagttgctaaatactttgtgcctctgttttccatgtttaacaaaatgaggttaaaacatccacttctattttcctagaagtatgggaaggatgaaattaatttcgatgaaaagaccgttcagtttctcagaacacaggtgatcattcatcacattcatcattgtgaatctatagaacttactgtatttcttcagctggttggccagggagtaggcagtagcttgagatataaggaatttctctttgaggtctcggaactgctgattgctctctgccagctgggagcgcaattcctggttgatttctaggatgttcatctctgccctctcgctggacaaagggtcggcagataccaccatgctgacgtttgtggcagaagaggtagagccagggactggggagaagaaacccaaacacatgatgggtcaaaaactagtgaaatcaattaggtttaatcaggactgagagatgacaattactggaattgttaacttatggttgagaaaaacttgatgaacacgtcacaacactttagagtccttaactgcaaaaacagggaccggtatgcctgagctcagagctgaaggcactgactgtagctccgactctgacaagagtgagcgaggtagcagccagcatgccaggtaacggtctgcagttgcaataacagaattagaaggtgggggtgtcatggaatcttaggatccttgcattccaattgcccaggctgtgctgaaacactaggccccctggtctcacctgagggtcactgatggggaccatttcttcagcagtcactctcagtatttgtgcacccttgtgacaatgctacaggcccacctctttctcaatacatataagcatattcctcattgttcatctcttgtgtgtataaaatcatcaaggtagggatagttttccagaaggttatattttcttagtggtagtcatgaagtcacctcaccttctttttaaggtaaaatgatcttaatgcttttccacaagtgaaagatagaaaacttttagtctgctatgatatccctctgggtcttctgcagttttttctgtatcgactgaaaatgaaggaataattcacttttaaaaaatattttctaccctgtctcagtattcttgctgcatcccattgttatgttgatttcttttctcttactggggcagcatcttggcttttcattacacttaagaccagtttcacatccctacgtccaaagctcttcctctatgtgtgggttggtttgcttttttaatgtcactgaacactcatttcatacttgtcacttacgaatatcattctggtcccaaaatagctcttttcaaggtatcaagtgatcaaaatcatttgtatatatcccctgaaaacatgtgtgaccatgtatcttgggaaatcttgtaaacctgatggtattttgttgtttttagttttcccgtatattgaaaagaacagggcattgaacgcttctcagggaatattgttggagatatatatatattgagttgctctaacactgttgatgtgtggttgcattccactaacaaaacctggcaagatcaagctcatggtcaggggtggttggtgatcctcagtgttcctgtgcagtagaaggtgagtttgagatgagagggatgagtaggggagcgtgctccctcaaaccacctcctcactttcgcagcttccatcttcaactaggttttgtgaggctaggacttgggagattgtcctgtagcccaggtctcctaagtgtggctgctggacttgcctgagttgagggtgtgatgagtgtgaccacgggctacgcagcattcatgtggaagtgaaggaggaggactggatcaatcccagtggaaagtgcacctctcagcatcccgcaccatcctccaccaacactgtataatgacagtgctttgagaagtagtaaaggctataaatttatctattctctggtgtctcagagacctgatattctgtgtcagaatgaaaatctgtctagtttcttcattttaaaaatgataaaactgtaggttcacaaagttactggtttacttgaggtcacacagggatgcattttgagcactgccaataaaaggaatcacaataattattcagtaattatttatagaatccatgtaattcagtaaatagtcacataattatttattgaccaattcatactaggcattttgttcaaaactgtacacatacttggatatcatattttcatcataatccttaaggcaatgttattatccataagaaacaggtaagaaacctgaagaagagggatagcaaatcatgtatttggctatatttctattttttggtttctgtgatgctggaagaatgaccagaatgagtcatgggaagagcattcattcctgtgtcattttccaggacagaggtgtgccctccttcagcactgggaccgaaattcagaagtgtctgcaaccttgctttaacagtgtgggaaataacctctattacctggaatttcactgaaactttggaatatacaagagaaatatgagacttgggtcttcccttggctgtatttaattcactattctattgagtaccaatgattctcattaagacttttgccttgttataacttttcattctgacacagaatgtcaggtctctgagacaacagagaatagataaa

SEQ ID NO: 1882087 - DNA, 4001 bp, Homo sapiens
gttcttcattcactattaaactatttttcattattcctaagacgtcattgattttacaatttatcattttaacccattaccacaagccagaaaaaaatgtgacataccaatgattgtaagaaacactccaatttcagggttatgaagaaaaggcattttagaatcaatgaaacacagtggaaaatataaacacatatgacaaaatttctgatagttgaaggatatgaaatgaaaaataaattaccttctgcctcccctcccctagttgccatctgaccactaagtttcccctccttccttccttccttccttccttccttccttccttccttcctccctccctctcttccttccttccttcctctcttccttccttcctctctctctctctctgtctttcttattttctttctttcttttttttcctgaggcggagtttcactcttgttgcccaggctggagtgcaatggcgcggactcggctcacagcaacctccgtctcctgggttcaagcgattctcctgcctcagcctcccgagtacttgggattacaggcgcctaccaccgcgcctggctaattttttgtatttttagtagagactgggtttcaccatattggccaggttggcctcaaactcctgaactcaggtgatccacccgccttagcctcccaaagtgctgggattacaggcatgagccaccgcatccagctacctgaccactaagtttctgttcaccattcaaaaaatcatatccacatacaaattgcatatatgtatatccttaaaataagaatggaataataccaccacattttaaaattttatctgtgtcattggtggaaaatgttatttttaaccattttacaaaacgataaagcttaaaaggatgctttggggtcttagttgttagaacaaaatgtacctctagtgacaaaaagacgtacaatgaaggctgggtgcagtggctcacacctgtaatcccagcactttgagaaactgaggcggtcaaatcacttgaggtcaggagttagagaccagcctggccagcatagagaaactccgtctctactaaaaatacaaaaattagccgggcttggtggtgtgcacctgtaatcccagttacttgggaggctgacgcaggagaatcacttgaacctgggaggcagagtttgctgtgagccaaaattgcaccactgcactccagtctgggcaacagagcaagactctgtctcaaaaaaacaaaaacaaaagcaaaaaaaaaaaaaaaaacaaaaataatgaaatgcttaaatgctttgtgcatattgactaaaggattccttctaggaatatttctgccagttgtattttttgaggcttgtttggtacatgtttatctaattctttttaaatagtatactattcccttgtatacatataataaattttagtcttctaaaactattttatctgtagtgttgtccccatttatattcctaacatagctaattttttgcttttttccctttatctgaccagaggtcagaaatgactattttctaatgcccgtctttttgctccgttacttttatttttatttataaacacagatttttaattcattcttttcctctactttctttgagtttactctttagcataattttttttttttttttttttgagacggagtctcgctgtatcgcccaggctggagtgcagtggcgcgatctcggctcactgcaacctccgcctcctgggtttacgccattctactgcctcagcctcctgagtagctgggactacaggcgcctgccaccacgcccggctaatttttctgtatttttagtagagacggggtttcaccgtgttagccaggttggtctcgatctcctgacctcatgatccgcccgccatggcctcccgaagtgctgggattacaggcgtgagccaccgcgcccggcctctttagtataattttttgaactgattattttttacctcttctccttcaaaagaccacatcagctacattttgcaagttttgatatgtgcatatataaaattcaggtctaaatattttgtcaatttcattcaatcttcaaccataaattcttggatattttgactggctttttgtgactgatttctaattttatggtctgttagtgatgttgttttttgttttgtccttagacttcacaaagttcctatgtttatgtgctcttaagagcttttttttttttttttttgagacggagttttgcacttgttgcccaggctggagtgcaacggccggatcttggctcaccacaacctccgcctcctgggttggagcgattctcctgcctcagcctcccaagtagctgggattcaggcatgtgccaccatgcccggctaatttttgtattttttttagtagagactgggtttctccatgttggtcaggctgatctcgaactcccgactgccgagaccagctcggtggtggagaccctaacctagcggtgctagaggaattaaagacacacacacagaaatatagattgtggagtgggaaatcagggatctcacagccttcagagctgagagcctcgaacagagatttacccacatatttattgacagcaagccagtcataacatttactaaaagtattacttatgggaaataaagggatgggccaaaacaaagggatggctcttgctagttatctgcagcaggaacatgtccaggcacagatcactcatgctactgtttgtggtttaagaatgccttaagcggttttctgccctgggtgggccaggtgttccttgcgctcattccagtaaacccacagccttccagcgtgagcgtcatggccatcacgaacatgtcacagtgctgcagagattttgtttatggccagtttttgggccagtttatggccagatttggcgccctgttcctaaaacccgacctcaggtgatctgcccgccttggcctcccaaagtgctgggattacaggcgtgagccaccgtacccggcctcttaagagctttttgaagaagataacccactacttcatttgttccacgccactcctaccaaaacccctttgtcagttttaaagcaaacatctgtaggtttctgagagtagaaaatctacttaaccagagatgataaacatgttgaaaatctgcctaaccagagttgctaaaaatatttcttggaaatgaaatcttgactttgcagcatcattcatattggaaccacttgatattagtttccggttttcattttctctgttttaacttgcctggtaccaaatagtatgagtcattagccatcctcccataatgtttatggtatttagtagtgttttcaaacaaatgtggcatcaacgtggtaaacattttaataactagatgatacgaaagcagtttcatgtaagccatcagatgatctacctgcttcaggtattctggttaccactcttctatttgaagtgttccaaagacaatagtatattctaagaacttgcatagtaatttccttttggaagctaaatgatggggataccagagctcatatgaaagtattcaaagtaggttgaggcactaccagattctgtgtatatattgccacattttttttaaagcaaacagaaggtttgtaatcaggttacaagccaaccaacagatgacctgtttctgtctttcgctgttataaacccgtactgtcagcttagatttggaagtttatctctcataatggatcaacaactatatttctaccatcgatagaatggtaggctatccctatgacttagggtgctaaacaaaggtcaaattcagtatctattaaaagacgacaaaaaccaaaaactttcattccagttaagtaaggtgaacacattatctcctagttctccctcttcattgatttccctttcaatatattttagctaaaagattttatactctaaggaaaacagtgaggcaacatagtaaatctgtataagatattttatttggagatt

SEQ ID NO: 1882088 - DNA, 4001 bp, Homo sapiens; identical to SEQ ID NO: 318232

SEQ ID NO: 1882089 - DNA, 4001 bp, Homo sapiens
gctgaggcaggaagatcccttgagcccaggagtttgagacatgcctgggcaacatggcgagacccagtctctaaaaacgaaaagaaaataaaacaaaactgtaagtctgagggcttcaagctgtctaatcacatgctatcaatgttagaatttgaagctcagaaatcgtggatgtgtaatgaattacggttctttaaagaaaccaacatttgctgataaaagtatttgaaatggtaccactgcttgccccaaattaaaccttttcaactaaaaacctagggttaaaccaagaatataaagggctctataacctatctgtagttattactggggaattcagatttcatataaacctgtctttattttaaatgtagttagaaaaaaagcacacacctcaaaccaaatatccaatccacattttttcctaacacagaaggaggcttctctgaaggtttttccaggcttaccatttaacagtggtccagctaaaaataaacccatgagggtttactaggcaaattcaatggcacaccaaacaccagtccatggggagttggattcagctttttccccactagcctctcgcaggaatccccccctacattctcccatctcctaattagaaagctaattaggcttccaaatgtaaatgctaaatggcgagggcgatctgggctcaggccaggattcgtggaacatctaacaccctcctctgtcctctgttcgtgcagtgagctgtgggaagagagctgggcagcatgactatttggggccatttaacttgctggagggcagtgtttactctcatttgtctgagcggaaagctgtgttgcatggactgcaaactctgaaaaaataaaataaaaaaaacaacaacatgccttgggattttagtactttaagggaaaaagtaagtacattttcataaactcaattattaccatggtgacaacgagggtacaagagaaggtcctctggagaacagttcctgcttctaactagacagcctctcaatagagcagggcgacttcttcagtaaccatgacaaccagaattagaagtgctgttgcaacactaacagaaaccatcttttgaagcggttctgtgaatcacattgaatactgatgatgcaagctagtgtgatacatacttttcaaacattaaaaaaaatcttattaccataaacaaatattcaccttagatttccatttgaaatcttgacttggaatcactttttttcatctggtttcgtttgtttcccttttggattcccgcggcctcaattgcaaacgcgatttgtgtaatttccaaacttgtcagaactgcacgggtaagagcttagaatgtgattcattcgctcttattttgaaacgggatgaggaatggggtgggggagggggggtagacagagagccctcttgtctactgtactcaggaggacgaaaacaggggagggaaggggaaaagagaggagaaagggagaaagggagggagggaggaggagaagagaaggggagaggaggaggaggaaaggagggagggagaagagggaaaaggagggaaggagggaaggaaaaaacagaaaggaaagaagtgctatagcagaatctttgctgcccatgttatctattgccttgacttctccatctgccaagatgtgtcaagcacgcagaagctggctggaatcgatattttaaagacccggttgcgatcttttcctggtcgtatcaaggagtcctggagcttctaatattcctggagggatatccaggaagaggaaaagaggctcttccttacttcgtgcggtcttccaaaagaagcacctttcgctggggagagtcgcggcgtggggtgcaatggaaggttttgttctcctgggccacatgcgttagatgtcagttctctccaccagcagcaccggccggcgcgcgtggggagatcacgccggtcttctgcccttgtaacaaacgctccagatttggtctggtgccttagggctctggtccagcgcacccgctgtgcgcaacgctaggcgctaagctgcgctcctcggctcacgtgtggacgcgcacgcagacacgagtgtccacaccatacagagacatgggtgcacacacgcgcgcacatagacatgggcgccgcacatgacacgggcaccacacatgacacgggcacacacgcgcgagcacgctctcgccctggctctaatgccccctcctctcgcttgcggatcggcctgggcaggtgtgggggtacgccccagaaagcgcctaaccttcttctgaccccacttcgcagacaccccgtggcagggcttcctttcttccttgggtcgcggggaggagaggcgcctcctcctcagccacccaggtctgcagcctagcagaggaagggtggcggggtgggggtgctggcggcgagtcccccagcccctcgcttaccttcgtggcgaggccagctcttgggcttcgctgcacggcgccaggctaggcgcgctgggttgttgcctctggagcaggagcggtcggtgtgtggatgtcccgaggtgagggcgccgctgtcgcgcttgaggctcccggagctgtcaggggcggccgacctgaccggcagcggcccagggcaaaccccgccctccggcctaggccggctccgcagcggggaccgagacgccccacagcgtttcctgaaggaccaatccggagcgaggggctggcgtggggaaggagggacggggggcctgtagtgcacccggacgccggcctggaccttgtaagctggtttctatggcagccaggagggaggggcgagagggaggggacgcgcggcgcagggacacccagtgcagtcgctcggggaggggggtgattgggcctgacgcaaagaggaccccttctagagtctggatgggagcagctacacggccgaaagcgggctgacacagctcccaccgacgtacgcctcgtgccgagcggttccagcgcttcagcaagggtttccatgtccttgggaaaccgtgacccagtaatcctcccaacagaaagggggtttccagcaaaccaccgtgacagctcctccgggtgagtcgggcagggtttaggttctgcagaaagaagtgctaatgtcaccctctgtctggattcctggcatacatcggttcccctggtgccactttgtcactggctccctaatctcctgctagggagatactctcggctgtgaccctcagatgccaaagattatttttctagtttataaactagaaataccgtcactggattgaacgtagagttggaaatgggattcgcaaaatactaaataaaacataccggttatttactgaagtttaagcccttccttttacagagagagaaaaaaaaaactgagttcagaggggtcagttaacttagcaagggtcacacaactgattaatggcagagccaggactagacaccctaagtcatagttctgcgagcattctttctacttcctcctgctctccatcctgtattgattgccagagcaatatttacaagagcaaaactgttaagtagcaacataacccatgtctacaattcttttatggtagaaactagggaaccccaaaattccttttttgctatttgccaggcattgtaataaactcttttacaaagagtaactgattaaatcctcatgataatctatgggttaggtactgttactgtcatccttgttttgatagatgaagaaactgaagcccagagaggttacaggatttgatcgagatcacacaactgttgaatgctggctctgggactctaacccagtttgtttgactccagagttggtgttcttcattactttgtctctgctgcctgtttgtgtgatgattaaaggggtcaggaacgggaagggcaagaaataaaaaccttggacagctccgtgcactgacggttgagattggaaagaaaattgaaagaacctgaaacaactgcttccttggcttctgagagtggtcatct

SEQ ID NO: 1882090 - DNA, 4001 bp, Homo sapiens
tggtacccatttgtgcccaataaatacttgctgaatgaacttttccaatagtgctggatttgctctgagccaaccaaattctcacttttaatgtattttgaaagacagaggacgacaagatgaagaatgcagtttgagactcagaagagcaaacataatcggcccagtatggatatgatcatttgatgcactgtcctcgggcatgctcatttacagaagcctaaaaacaaattttatccctcatttgtgggtttctggtgttgtggagggctttccaatgtttagaagcaatatatttttatagaattctgtaataaacgtgttttaaatcttttataaagctctctgtagcatataagtacatattaaagacagaaatgggggagcatcaaggcccttataatcgcattcattccttaaccacatactacgcatctactgtgtggcattctaggcgggggccgtaacaccagtgcagaaaaacacaacctcttgtcctcttagagcttacattgcactggggaaggagagataagaagataaacaagtatggatatgtagactgtccaaaggataaaatgagaagggggctagggaactttcagtttaaaagtagccgcggaagcaccgagtgacacgagcaaaatcctgaaggtgaaggagcaagccctgtggacgacgctcagggaagagtcctactcgcaaggatgccagggcaggcccgcccccaccctcaacggcgcgcggggacttctgccgcagtcaaggctttggctcactcccctcaagacgggaagccattcgcagggcctagagaaaaggagtgacaggatcttggccccctgagtggcctgaggcaaaaggaataatctaagcaagttttcctacttacttttagcgcactggtacacacacaaatacacaatacaattcatataacacgaatttcgtcccggttgagtaaaattccgcttacctactgcactttttaccgaaaatagcccctttttaatttacacaaacttaatagagaacggtggaacaatggttacttcttgttttacaatttaaaaactacaacaaccatagtactgtacgtataatcacatattgtattccagccttgtccagcgcctcagttttccgaacctaaagaggaaaacgatgtttgaaatcagctggccgcaggcccgcgggtcgcccgcagtcaccggtggctgagtcggggccggcggttctccccgcgcgctcggctccacccacacctagaggggggcgcccgggcagccgcgggcgagcttctcgctcgcgcagcgtcgcctacaggcctttatcctgaccgttagagaagaacccaaacctctgccgacaaaaagcaaaagcagcggagaccgcgtatttccagaaataaacgcatcatcacaaacacgattccaattcaatccagccgacagtcgtcttcacctccaaaggttgcgttcttattcgcagaaataacacgcagtcgggcgtaaggtcccggctctcaaaaggcaaggtgtacgatccatccatccacccggctgcagggacaccatttaaaacgggcatcatcgccatcgaatcgcgggcgtcctctgtggggccgcccggagatcggctccctaaagctaacgacgacctgggacagccagcgcggcctccagccgccgccgtcggcgacctgagagcccgtccgggcctgagtgccccccacgctcacgaccaccaccgaactcgggccccgctcctgtcggcctccaggaaaataaagacagaggagagccggcccgcctgtgtcgcagggcaaacgtcgctctgaagcatcgacaatactggcaacatccacagccgccctgaggggacgggcgtagaggagagctgccgcctcccggctgctgggcccgggtgccgcgcggcgcggccgaggacgcgagcccaagtggcggcagcggcggctgcggcggtggcggaagtggagtggggaagagggggtggttgttagtgtttggcgccggcggagggagtcattcctgcagctgcacttccggtcggcattttgttctgagagggagagacggaacgagagagagacacacacagggctccttccccccgccctcccccccctccctccgtcggtaccgactcacccgacaccaccaagccgcagggagggacgcccccgccgacaggagaattggttcccgggcccgcggcgatgcccccccggtagctcgggcccgtggtcgggtgtttgtgagtgtttctatgtgggagaaggaggaggaggaggaagaagaagcaacgatttgtcttctcggctggtctccccccggctctacatgttccccgcactgaggagacggaagaggagccgtagccaccccccctcccggcccggattatagtctctcgccacagcggcctcggcctccccttggattcagacgccgattcgcccaggtaaattcctgctctttatttcggcggcggcggcggcggcgccggcgccaggtcctcagcgtctctcctcctcgctcccctccccgccgtttccttagcggccccaggtctcttccacaggcgagtctagagttcgctcctctctggtggcagccgccttgggtagcggtggttttgtaccctctcccggccggctccggtggcggggactgggctcctgctgggcggccggggaggcgtaggcccggcggagagtgcaggccgcgggccagcggaatctacttgagctcggggattaggagagctccgggctgagcggagcgactgctggtcggtgacaggcctcgcccgggagtggagccgtagctagtggggaggcggaaacaatacaactaacagcaaatgtgccctgatcgtccccatatttacaactttcccggtccgggagtggggaacgtcccagtgaaacaaacaacctcccttcttccccctgtgaccccatgaagggaggaagtagtttcagttagtgagacaaacgtaaatactcagacgcggatccagtggtaattctttctctttctaaaacttgtttggacgttggaaagttcataaagactcattttcttttttaaagaattaaatcgtccacatgaatatttaatacagaaaaacatactgtggtagacactgcacatctccccctccccaagagcttttatcttgttgttttgacagtgtgttgttgcacatggactttttattcaaagacaagtataaagtacttgacaggtttactctgccactttctatttgtatgcgttatgtaagggcagttttaagcgactatacgtaaaacactcaggtacttcctgaccaaaacgtgtaggagcatacaaagaattttaagtgttctgagaattgtgctgagatacgggtaaaaccacttttcttttctttttccaaaaaagaaattaagttatacttaaaatccttgggaggttaaaaaattgtagaaggtgccatccttttatgtcagggcagttcttcttgaggtcccaggattgtcattggctgtttgtgccatgatgtttgactgtgtaatgagagaggtgtcattttaataggttaaatgtatctgtaaatgctggagaaaaatatcagttctaacttgacaagttctagttcatgagtaagttaagtgtttcgagcttgtttatggaggcgttcataatgtaggttggtataagggggaaacaccaatttaaaattcctcagtcaggcaaattgctagaaaagtgtacctgggttacacgttttgatattttgtttcatattcgctgaaggaaaactttcattggttaaaatgaagcagcactgctcagcgaaatcccttgttttactagtgtttgttacattggttcatattttttgtgtcattaaattattgtcactgtagaataagttattttgtggaggttatttttgagtttagcgtcctgattacaataaattgtttc

SEQ ID NO: 1882091 - DNA, 4001 bp, Homo sapiens
attagtcagggaggaaagagtagaagtcagagtgggaaaggcccttaaaacttaatagggaatatcaaatctctacaaaaattttattcaagacagtgtctaagacttagaagcaactaacttaaaagcaaacttttggaacttaatcctattttcattggggactccgtttatgaataatatgctgtaattatacgtagaagcttaaggactgaaacagagcattccaaatgacaaatgttttctcctgaagaaatggcacccaaattatgttgtacaagtaagcggaataaaataatcatatgcttgttattaaaattatcatatgcctaacattcatgattttcaaaagtgaaaaacagtatgttatctttgagtttgttttcatgtgatataaatttataagcaagtcaaaattaaataatgtactgagcattaatttaagccaggatttttcagcctcagcactattgacatttggggctggataatgcttcgtcgtgaggggctgtgtagtgtgaggtgttcagtaatatccctggccccaacccattagataggtcccctctccaattgtgacaaccaaaatgtctctagacattgccaaatatccctcggaactaaattgtccccagttgggaaccacgaattattaatccctaaaagacaaagcagcaactcctgacccctacaaaaagttttaaatcaataacttagtttaaaatccttactaagtgggatcattactaatctcacttcattgtaccttcagtatctggaaaccgtccctatggtcacacttaccacggctcattattattttaaaacatggggctgtgtcatttcctgtctgtgagtttggactgcagtgggaatccattagttgaatgaccttctgtgtaggttaatcacaagacaagttctcaaactaagggtttccctgcggctcatttctttttaaagttatggaatacctgttctgcttataccttttagattcataattatttttcttgtatcaaaatttcaattaatagaaataaatgacgttactgacacttcatgatgattaagttttgggcaagtgaaccattttacactctattttttattcctcccacttttagtcagaatacacctgcagaataagtaacagaactgtgtgaaaagaacgactaggtcattacggttaatagttttagaaaaacagccgaggcctggtctggaaagctcacaacctccacccagatgctttccagcctcggggatattcgtactagcagtgacactagccagcttcctctaggctggctctgatgttggaagacaagcacgcagatgtgtgttacttttcaagcctggacatcgtttctgaggaatttaactccacctctcctgccagaatggaaaatcaacgccccccattcccgcccttcaccaacccctctccgcctgcccctttcccttgggtcctctctgttacagaagttctgatttttcctagcgagctggaggaaaggcaggtacccggagtggagttatattacctgtttctttgttctgatgggaccccagagaggacatcacgctttgtaactggttcttcaaggggagaagcaaatgtgtccctgaaaacttcagctgccgcgtttggcaccaggtttgattgacaaggactggcggagggaaagcgcggaggctgggctgggggccgcaggccgaggcagagacaaagaggtttcgcctgtccccgagagtggaagggcccctgggggtaactagcctttgagctcaaaggggcatttcgtgaggtcgccttttggttcggagagcgcgcggcgatcgggtggagggggcctggcgggaagaaagctggggcggggaaggggcgcgggccgaggtgggagcggagctgcagtcacgtggccgcccgccgccgcggagttggggctgttcttccgggttggaggcgcagcgccgcggggcccaagcccgggtctgccagcgcgacgtcctctcgcggccctcagggcacagcccaaggctgtcagcctcccggcccaggtgagcgcgacggcactggcgggtgcgggcagccggggcgcgcgcctagggcgcagctgggaaaggggctcgggcctttcctgaagaccacggccctcgccgggagagagacctgtcaaagagcaaagcggggcggggtcggcggtgtcccgggcgcagggtgcattggggtgtccgcaggccgcaggcttaggtggggaagaagcaccgtgcctcttggtgtccctttctcgtctcctgctggggcgatgtcgaagggagtgggctggtggatttgggaactgggtccccgaagagggcagggaatgaggcggcagctgtgcaggtgcagatatttgcagctttgggggacagcgagagtcgtacggggtcatttcggccctcaagatcgggggtggtggagagggaggtcatagaggactttcgatgggcggttcatccagagaggtggcagctggatgcccttgaggtatgcttgacccttgagggagttcggagagggtgtccggctggggacataggagattgcgagcacaaattgtgagtgtgagttggggcggtctggcggtggtgggtacaagtttctggggcctaggctggtgaggaggaagagacagcggagagggcgacctgggcagagctagttcaaactcaacagccggaatgactatttgcagccgtggccaatcggcttcctagggaggttataaatagcggtctcgtgcagatgccagcgggtggcagttagttgccgagcaagggacggcaccggtggcagtagccgtgacaccagtggctttgggtgaggtcacggcgcctgccagccgaagctggctcagtagggtattgtgtccttgctggtatgtctcgcttttaaaagcgtgacttgtttatggttgccggtgtcctttattcaccctgtggcgccggccagtccttaggtggtctgtttgtcaggagtcttgtaggacagacttattcggagaagcgcgtggggcttaggtgcctacctactcttcttatttaaagtgtgccccttttcttcattgcaccccttttatttgtaaaccttgactttttattaacagacagtttaggattgccttctttccagcaggtgcgcttaggctgcttaccttggtgatagaatcagttttccacaaggctacacaaacatttccttttcaaaggaaattttccgaaaatccttggaaaatgtgctcaataggtacttaggcttaaggtcacctagccctattcattcagtcaaaaatactgacttcctctgtgttgtgcaaagcactgggggagagtaataccaaagtgaatataacagctgataaggatattctcagtcctggcaacaaccctgagaggtaggtgctgttattttattttttcaagtctcgctctgttgtccaagctggagtacagtggcacaatcacggcttactgcagcctggaactcctgggctcaagtgattctcccacctcagactcccaagtagctgggacttcaggcttgcaccaccatgccctgctaattaattttttttttttagcaatgggggtctcactgtgttggccaggctagtcttgaattcttggcctcaagcagtcctccccactagcctcccaaagagatggcattataggcgtgagccaccaccctgggtgggtgctattattccccattttaaagatgaggaaattaagtacagggaagttaagtgacttcccaaggtcacacagccaataagttgcagagtggggcttccaatccgcagatccagagctgactctcttaaatatctgtggtatcctccctctttaggttgggtgctttccctcaaggattttaatatctaataggggaaataacccatataagttacattaaacatacatatgaaagcaatgcttaaaaagttgtgctt

SEQ ID NO: 1882092 - DNA, 4001 bp, Homo sapiens
tattctttactcttgttttacccctttcccttaattgtccatggcatagaaaaattatattttacattatttgttctatttcatttggggctatggtgctttgatctgaaagagactataaaggtcctctaatatattcctttcatttgacagatattgcagcattgcagttaaatattagcagaacagggaccagagcccaagtcttctggcttccagagagttccgtgttctttccacaattttctattgcctcctgttttatatttcttatatcaagttctgtatttcctgtcgttaattttaaaagcaaagaagtagaatattttctattcgttctatatgaacaaaattctgttatgtaacttcagagagttgtggcttcagagagtttgtacatctcccaacccccaagtatatatgtgaggagcccaaaatggggtaggaccacactgtgagcatctcccatagaattctctctcctttttcttaaatctctaagagtacagattctatggttgtgctgatgcagataacgtctcatagtcttcagggcttaatgatttttaaagtactgcattgttcattaattaattcatcaataattcatgtgctgacaaggcttgctatcttacttgatctctacagcagccctgtactctagataggaatgatactttatttctgatttacaaacatggaaactaagatccagtgactgactcatggttgtgtagttagctgcagagccaggaacagacgtctacttcctaaatcgtatacaaggcaatatttctagtttatttggtcatttcattttttaaaagatcagtcaaataaatcatttgtgttccatgaaaacaaatagactagaatctctgtaaaggtacatcttagagcttaccctaagaacaaagtactacattaagtaactgcactaagcatcaagaaacaaatgcctaatctcttacagcgttattaaaaaagtataattggcctggttattcaacatcatgcaaacctccttaagttattcaactgttcacccattccaaaaatcaaatttcatatctatctgttgcagaagtgtgtgctgtcttttaagacttgaggattacatttgacccaaccattcttttattacatgtactttgatttttctctgctgaaaatggtttatatgttttctttccttgaatttgaccattgcctgaatccatataaagtggtagtggaaaatatatatgcttctcaaagctactgttttaaaaacaagccaacacagcttgtctgaattgacttttattttctttgaaggttaataaccgaacttatcattttaggaatgtgggggttttcagttctttaaaataataaaacattgagtgcattaagaaaggagatctcaactctgccaatgaaaataagtataccagatttttaagattatttactaaaagataaagtaattaaaaccccattgtgccaatactagcttttggtggtttctttttataattttcttacagtagtgcattctgaaactgtagggttgtttttcaaatcatatatgtaaaaaggcatctagtacaatttagcctaaaagcactatatttccaatttttaatgatcttcatttactttttaaaactggattattctaacatgaaatacacattggataaacacatttgcaatatttttcttaagcattttagaggtttgtttcccattttcttacctgtcggaaatgtctagctcttttgctattctcatcttctgttgttttctttcttcatttccattattataattttttaaagtttatctgtcaaggatgacatgttagccttctctcaaaaagtcataacatcccccgttccttcttggattatttatccaccagacaatctgtagcttcacttcagacactgatccctggagttggaatcattgcacagaggattgagctttggaatccagtgggcactgaaggtcactgaagagccggaagggaggagtcagaaatctcagcagcagtgacatgaggtggagctgtttaaaagatattttcaaaatgtcactttcagtcatcttgtagagatgataataagagtgcctcttgaaaatctgtggcattttctggcatatatatatgtatatatatatatatatattttttttttaaattagcacggccaaaatcagacatttaacttaaatattcctggaaaattattagtaaacattaatggttgttcttagagcatttactgttagttaagagatggacacatagagggcagcagcacacactggggcctttcagagggtagtgggtaggaggagggacaggatcaggaaaaataactaatgggtactaggcttaatatctgggtgatgaaataatctgtacaaaaaacgcccatgacaccagtttacctatgtaacaaacctgcacttgcacccctgaacttaaaagtttaaaaaaagagatggtgctattccagattttgcagtaatttataagattaatgaagatacttttgaaattgaaattaatgccaagtttctgagcaagtatgtattataaatataagatttttatcaactactttggagctgacaacagctgagctgcttatagactatagatgaaagtggggactaaaaagcgcttttcctgtatttgaaaaattattacaagaaggggcctacttctcatttataaaagactcaaaaagtaagatttatattaaatataagaaatatttccttatagtgagtgtttgaagactttagaaaacaaggttgtagaagattgagtatggttgaaaatatttgtggcatggtctagtggatgagcacacaacattttcaaatactacatttcctaagccaaggactcagtgatagaaccctacattttagggccaggctgtgtgattcaatcctgtttccctacccaaatacatcaaactaccctaaagaaactcaaaatttccaggcagtcaacaacattgacattgtgtgtctgtgttttatagaatcctgctgggtcactggctggggggacttgcaggtagagtaggagtgggatgtgtactatggacgtgaagccaatctcctcctctgtaagaacctgaagagcagatactatcaaagcagttcagtggcttgtatttctttccccagtcaacttttagcaatgtcccattacttatttacctgtttgtatttaaaatacagagagtagcaaactttggaagattgtagggctattggaaagtaccttttccatatatagagtattggcaaaagctagtggtgccacaggtttggtggatattaagagatcattttagttatctgtgatcatgatgattttgagagtcagcttgagtgggagagagctaggtctgaatttggattctccagcattacctagctgggtgatcttgagcttctctctaagcttttatttttattttattttattttttgccatccagttctaccccaaaaggaggaagcaatagatcttcctttaataacttcccaaagtgttacaaataataaaaacaagcataaagcatcgctggggtggctgaacgcggagcagggaaggatttgctcctctgctctctaagcttttgattcctttcctataaggtgaatatagccacctatcctgcaggattattttgaagattaatgatagaacatagtagatattcaatagatagtagttattactgttgctgttgtttagaatttcgcttagtagaaacataaaatttgagttaataacagagtttattgtttattattctaaaggaagtctgtaatgagtgtgggaaattgagaaatgacaaaaccagagtcatttttaaaaaaacttttaaggggatgtttggtgtaaatctgtgttctgaggtgaggggtccactgttgttaacatttttgctcacctaggtacacatagagagctattataatct

SEQ ID NO: 1882093 - DNA, 4001 bp, Homo sapiens
ttaaaaaaatccacaaaagttgctgaaacaaacacttggggactattagaaagctttttgcactgctgcactaccctgctcctgggcttatctccccaacctggacacctgggaagcatgctgtgcttcagcgtttccctgactttgaagaaatggagcgctggtggtgctgctgcggaggtcagtaaaactatgctaattggtgaacctaattgcttcaagcagtcctgcctctaaacatggagagagtacagttgatggagtcagtctgttcctgataaaatgaagaaccactgaattaaattcccaaggaaggcactataaaagtttccacagtgtaaccaaatgacttcacctatgttattacctctaagatgacatctttgaaagaaagcagaccccagtcgggctccatattcataaattggctgagcttaggccagtgaatctggatttatttaaaaaggttttttcatctttccaatcaaatgaagtcatttttaattagatgctttctgttaacaatgtcactcttctccacattacctgctcacacttgcagcgcctctagtgcaacatctggagcacgagtcctctgcaagcagtcctcccaacagattggctggaggatggtagtatttccgtttctcagtccctgtctgaaggaagatcccattcagcgggctgatggcgcgggacatatcaactctctaaactgagagattacaaaacaatctctagaaaaactcttaagataacagtctcccaatatcctttttatgaactacatagcactttctccgctgttcccgccttgcagatgggtgttttaaaaagtgccaagggccacaaaaggaaactcccactgactctacagctttttgaaacccagttcctccttaaaacagaaaatcaggtgtgagggtccccaactgtgccccaggccttgcttcctacccctaccagcagcccaccacctgaagaggactggctgtccaaggcagggcaaatcgttaggcaccccaggaggatggcaaggttcagcgctttagccagcggcgggggaggaaagaggctaaatggggaagttgtaaaagcggcttcgttcgacggtggatctctgaaccttaaaagattggcggggacccactcacactccctggggaccattactaagaggtctgctgtgccgacccgagggggcgccaactgcccgcgcggaaccgggccgtgggcctggggttcgggaagcgtgcgccacccccggtcgggcctggcttccttcttgaatgcccccggcgcaggcccggtgctttgtccctccggccttctcaaggagtggtggccttctgcgggggcgagagcacggcctctagccttccgccgacgtctcagtgcgcagataccgcggcccgggcccctccgccgcgcgggggaccgcactagcgtcgacctcccggcagccaaccccgcgcgcaaggctccgcggccggatatgggcctagcttccgggatccgctccctgcggggccgcgcttagggtcggagttcgctagtccagggaaaggggtgggaggggccctcggaggggcccctacaagggatcccagtccgcagaattaaaaattcgttcgcaagggagcgcccttccggggtcagggtcgtgaagagacactcgagaattagggtcctggactgcagtggggccgggcctggacttcgggcaggtgtttcctggccgccctggggccctgcagcaccgagggccgcgctgatctcagggctcaggcggacgaggggccgccacaggcaccttaggaccctggcggcctgaaggcctggggccttcaggaaagcctcgggcactcccagcgggggacctagcgccaggtcacgattccattcggggcggggagcttctaagcaggagttgctgaccaaggaaagagtctggacccgggacctcatccctgaggaccagaccacgaccttggagctcagctctcagtccttcccggctagggatgcggaggggtcgggagctcgacggctaagcggcagggaatcctgagttcctagagatctacagaaagcagaagaacgacactagatgagactagacagtgacggcggaaggacggaaccacatggagactgacacactttgcgagttgggactcaattgcatttctttaagtccttgattccgaagtttccccgccctcctatgcaagagcgtttggggaaactaagttccttagactctttcatccttgttatgtgagctcagggaggaaggcagacaatagctgcagcctaaacacctgctatctctcaatgcaataagatatagacggtgattggagtcgtttctctttttgcttccagagggagctcaaacctgaagcatcaaggttatctttttccaaaggtaaaacaagagacttgcaaaacctgctagggacaccacagctcacatctggagggggttcccctttgcaaacggaaaaggcaatatgattttttttttcattttaggatttgtgtgaacctaagttcggtacctgcgacgagtaaaaacacttatttgaccctctagagactcagctagaactgactgagcaaagggaaatcgggcaaaagaaagggaaggtactgaggagaaaacggtaagcggaggtctggggtgggatagtgcgcaggggttcctctgaccgggcggcgggacccagctgccgcgcaggtaaatcccaatacgcctggcactggggttctggacagacttggtctaaatacagccacgtgctcggggctgctgtgctccagctgtgcgtttcggagcggtttgcgcgcacgcgcacgtacacacactcacacgggcgcgtgcctctgtcctggcgctggggcctgaggttgtccaagcagcggaacccccctgttcccgccggccacttgatgatgtcgctcaaactagatacggggtctctctagtcaaggagggcgggcagacagaggcgcccggcttgtgggtatccagccccacgtaggggaagggctcatagaggggcagagcccagggagaagcgacatgcccccggctccgtgctcctcttcgcctatcggccgggtcacctgtcagccggtgctctctcggctggctccccgtccctcctcgctccccgcagccacgcaacaacgcgctgtcagcccgagctgggcgccttggcctctttctggtgccccagccctgcgagccagggctcaccccacactgacgcttccaggtacaaacaccaccagcgccgttattccagactccagatccctgccttttccccccaccgagcaaagacaggccggtgtttgggggtggttgttgttcttttaaaagtatattaaaggatcattggcgtctccctgtcaagtcattacgcctttatccccatcaattaaccacacctcagagggctgctattaagagctcaaatgagctgcaaaagtaggtatcccgtttcaggcagatgttgttatctcccgctgagaggcgcggccggcggggccggatcctccgcttcccgcgactgccggagtcgcgctggactaggctgaccgcgcagggcggcgaggctggaagggaggtctccgcccgacaatgcgcaggtgccagaggagccaggaggagtgagaagcgccctagacccgcggcctcaagcgccatgcacgtcaaggggaagtgactccggagttgtgccaggaagaacaccaagaacgagctgtgcgtttttgcgcagagaagtagtcttcgcaagaccgcagctccctgccgaaggcccagaaagggagtgcgggggagagggcaaactagtgagtttggctggcagtgctcccccgacacaccccactttcttttcctgccactccagactccttcccggcagcgggcctccagaaccccttgttggtaaaggcgaggtgctgtggggatgcaggatatggaatta

SEQ ID NO: 1882094 - DNA, 4001 bp, Homo sapiens
cttcaccctcctccttccttccggaggagcccgcggcttcgcctgaggcctcgcgggcccaacttctccccaccgctagggtcacgccgggtcccaggggcctctttcaagtttgaaagctctgtgggggcacggagagcccacagtaaggatgggtgggcgcctctgctcccgggcaggctcagctgtcatcccgtctcgccttggccctcacctacagggcctgaccccgggccagcccagctaggcaaggcctcctcgcttccgagaccccccagcccccgggtgcagtccccagcatcggctgcccccgccccccgcgcgccctctgacgcaaacgcacgcccctgccccgcacggaggaaagcgctcttgttggttttaattgagcctcttcctttcaacacaccccctctgtccccacccctgggaggcgaccccctccccgcccccagccggctggcagcggcgcagggagtctggctcggctgctaggctgcgaatcccggtgctctctcgccgccgccgcaggttgtctgctcgggagagcggctcgatgtcccttttaatccgctgacactatcgcccacatcagacaggcagccatcgatcgcgttacattaggggatggcgttacaaacggcgtccgcaggtgggcggctgcagccaagctcgccaggttcaggccgtaaccaggcaaggcgcgggcacaagggccagccgggccggactctgcagccggctccaccgcgggtcgcgctcggcaccagcaggaacagccgggccggtgttaaacgtgcgggtccccgtcctccgcccgggcatccgtttcccgcctaggagagagagggaatagcgggtgggggtgggagcagcctgttttgaatgtggattgctgctcgcctggcacgatcctcccctccaaggaggcgcggcggccgcgatcctcgccttagcgctacggcgagacagaggccgagcgagggcaactcccgagcaggccccgaagaaagttctcctcgtcccgccctggctgcctagactctgctctcggcctgcggaggccgtgcgagccaagactgcctcccggccctgcccgttaccaaccccaagttcaagagaaacgacaaccattatgttacttgcctggtgaggcaggatttggccgagtctcgtttctggtgcccacgacgcacggtccagggtccgagggcggctgggccggcggactgggcatccagtgtgcctgcggtgccctggcgctcgctgtcgctggtctcccactcccttcgtctctctccgcgttctccttccctcgccctatctccctctctccgcctgctgcctctgccctcgactccctgcctctgactgtatggggagtacgatttagaatctgtacatagaaaggttttcttttctttcttttcttttggtctattttaatcgtgttcgtttcaccttttaactgaccagaagacgggagcgcgtttgcgcgtttatttgggcatagggacgagggcaaggagcccctgctacccccagtcgcctcctcgccatcagctgcgtacaatgggccaccgctcgcggagtgcattgacagttctccattattcgagctggaggggctgtggggcaggcacgggaaaaccttttattctgctctttaaaatcatcgctcgtcactaagcggtcgccgactcccgacttgtaggctggagagaccaggaagcgcaaaacgtcccccaaacacgcagtgcttcccaaacccctccctggtgagacttaaagtgagaacgagtattaaaaaacaaaccctacctctgtcaatacagcgtggccatttacttccacctttacctgagggcgtgttggcgctaggaatgctcgagctgagacaaacttttacgccctcgcgagtcgaggggcgggcgggcgagcgcggctcccacccccggcggcggcagcggcggctttgtcactccgcgcggctccgcgcccgcctgagcctgcctaggggagcgatctcaaaacgaggggggtgcgagtatgcgattggagaatatgtaactaatagaagtatcattttcccccagtacgatctttcaaggaaaaaaaaatccattgaaagaattttcaaagtgctgtcttcgtttggagaaaaggcacaggctgcctgcggggaggggaggagggactcggctgtgtgccgcccgggagcggctcccgtccgctaggtggcagccggagccagcgattcctgcaagccccgccgcgggacccgctcctcccgcctgcccctcctcccgcgaccaatcaccttcaggattcaggaatcggggtctcggtctctctctctctctctctctctctctctctctctctctctctctctctctctctctctctctctccccctctccctctccctctccctctcctctctccctctccctctccctctccctctccctctccctctccctctccctctcgtctctctctctctctctctcctctctctctctctctcctctctctctctctcctctctcctctctctctcggtctctctctctctctctgggtctctctctctctctctctctctgggtctctctctctctcctctctctctgggtctctctctctctcctctctctctctctcccctctcctctcttctctctctctctctctcaatatctcgcgcgctctcctctctcctctctttcctttcctctcctctctctctgtctctctctctcctcctcccccttttctctctccctctccgcctccccccctctccatcttctcgtttgtttgctcttttcccgggactgacttggccacactaatctccccccaccctgcaacaatatggggacttactactgttttattaataatgattgaagcattgttggagtttggaacagccaggtgataaaaaaaaaaaaaaagaagaaggaaaaattggattgattggaaagtttatttttaaaatcatctttgggataaataggaacccttgattccgatcgaatttgtggcaatagctgcaaattccaggagtgtgctttgtcatcattaaaccttttaaaccaaggtatactttggattaaaaaatagggagatcctaccctgtttctacttgtttctaaaaaggatataaaatgagcagaatccagacttggattgtgcttatatgtgagagaagaaaacaatccaaatccagtatatttcacaaatcattaaaatggtgggggtttcattcccattaaaaatttttccaaacattttcaatgacactctcttcacgctcataaaatctaattttaaaaacttttcagaagaaatcaaaataatttccctctaattctccttttgcccatcgctaggcgttctccccctcgtcatcccttccccctctggggtgtgagcgtaagtgtgtgtgtgtgtatgtgtgtgtgtgtgtgaccatagacgacccatactaatcaggtctcagagtaaatagcagcgcagggcgatctcaatgtaaattgcgcttgtcagaaacacacccccctccctcactttctctcctcctccccacaccatcccagtctgtaggtagctaagcgggggggggagaaagaaagcaaaagaggaggggggaggggctctccaaccaatggcgtgcaggaggcttggctaaccttagcctcccattttctctccccccgattcagggctctgaccagtcagtcgcctttgattatcagttgccagcagcccttctcttggctccttgacacgagctccatataaggcagcgatctccatagaaacgtgtcagtttcaatagtagtgtcaaagttcactatatacagacattcgcgcagatccccctttcggaaacattgctctgcgagtcctcccgtttaaacgcattcaatttttgggtctctctctctctctctctctctcttcttctcttctctctctctctctct

SEQ ID NO: 1882095 - DNA, 4001 bp, Homo sapiens
cttagaactttccaaaagaggcaaaggcagaggagaacaaaggaaggaggaagtaacttgtggaatgctgagaaaggtaagaacaccttcaaataaggaagtggaacaggctatgacctaatgcttgcttggaccagtataagcatgtgagggcaaatatttagggtaaaatgtgggagctaagaacacaaagtacattgattctctattatggctagcagatatctaagaatgttagcataggtctttgaataaattttgcttctaagagaagttactgtttattcctaattggacagggaggagtctctttgaagaggaacctctacttcactttttacaagctaaagacctactggacattcttagatggatctttacagtgatctatggacctaaagtaagaatttatccatagcttggtgccaacttttgcctctggctgccattactattacaaagttttatctactaaattgactcatatctaaaagtaccagcagccaccaaataattttgcatttagatgcgtaaggatggttgcttccactttattccctaaatcaagcttggcatgcttttagtttttaaagtaaatctgtagtttgacttgaataccctcatccatcattaggtaacttttaaaagctgatgttatttcagggtggaattctcttctacttctcttatcctctcatacccttagttttttgtagtaatagcctcatccctataatcaaatccagagacggggagaaggtagagctgggaattcatttttctccctacaaatcttaattattcctcaaaatatttgtgaagtaggaaagcatgttttcagcacccattcctcactatcatcctcttacccaattgtctgattagttcctccttttatcttttgttactgtctcatctgggcatttagcctcctcattttactcttcagtcacttaggaccctgaactatgaactcacatccctgttaatctgggaagatgtctatcctttgaatcttttcaacttccttttctcacatcaaaatatagtgatgctgggttccatttattcaaggtcattctttttcttctgctaggaaacagctagattatcttgcaacctagtctgctgtaatggattaatgaaaggcaatgtgctagttccttatctcctgaaaaacacctgaaaaattttagaaggatattttataagaccgcttttaaaatgaagtagtgcaaaatagcagaaagagtaaaagaatttagaatttgaaattagagtgacatgggatccatgactcctattcatttcctaagaaatcttctacaaattacttaacctctctgaaccttctatcctgcctttactgtaaaaaatggatactaacacttaccttcaacttttgttgtgctgtaaaatgaaaaattgtaaaagtactcaagatattggctgctgtacagtaggtgtcttacacattgtagctaataagtaaacaatattgtaagccaaataagtgactcaaaatcaattactggtcaatgctaataatcttaatgaacaaatatttcttaaacactttgtgtaggaagaaaaaaatacaagtggtacctatgaaataatattctactttacctaggcacgatgccagttcttctccagctattcatcaaacaaccaactattccttcatttattgattaacttattcatgtacctattaagtgcagaaggctggactgggtaatatgaagaatacaaagatgtatacataatcctgtattgacttactgttgaatgtgacagaatattcaggtattttggataggttagaaagatatcttgatcctgtcttcagttattagcctaataagaatggaaacagcttgcaaaagtaagacgcaagtagggtagcagcaggctcatctggggaattactggtctgaagtttgggcacaaattattggagccaaagaagagagaaatctatatcctttaggaaagttgaagtaaagatcattttcagagatacagatagaatagattatgactcaagcttcagtggcaaggtgtgtatacagtcacaatatatagaaaacagactagtagtcaagggcaccaggggacagggcaggcaaggtgcagggtggatgaagtgaggagggtcaagaagtaattcagatctgtctgaattatagcagggcagaccctagctcattttgccagggtgggttttagtcacttacggaagccacaccattctggatgagggaattggggagaagagcatgatgaaaaaagggtgcaaggaaaatactggagaatgttaccatacgaatgtgtgcacaagatgaaagaaaaattaaactggccaacaaaagttcaaggaatgctctaatttaaatattagatattctagcataaaatttgcaattcaagagaagctggttctcctaaatttacatctttataaggtagacagacaggaatttatattttgtctttggcacttatcaatcgtgtaccattagacaaattatttagcctccccacaacttagttatcccatctgtaaaatggggtgaagactagtacttgcttataggatggtggtgggcactacctgaaatgctgtgtgtatatggctcagcacagtgctaggtacatagtaggtaggcaatgagtataaattattttcggtttggattctatgtctatgcagaggtctcctcaagcttttgcaacttgtcatataattggtgtctatttttatgtcttttagatggtcaaaaaaatagaccctctcaccaaagtcaaaaagaggtcagattgagcctgaataatagtagcacacttatgagtcatttaatttctttgacatctccttttctcatctagttgtgaattatttatgacatctgtgctcttgggaagaagtccaagcatataacatatctccagctcactcctggagggtctttccaaggcccagggtttctgccacttagtatgtgcttactcaatattgtcttgattaatggcattggaagtagagataatagcagtgcagaattaatgggctagatactttgttattgaacacaattgtgtagggttgaactaacaaataggtaatgcttctgcaaagtgtgtaagtaaaaaatataaaataagtaaatagattatatattcatcagtctatttagaaaaacttactgagtagctactatgtgtcagacactgttctatgcactggtaatatccagaactctggatgcagatatgatatcaagaacattgggtacaggggtgatatccagattgctgggtgccggggtgatatccagaacactgggtgcaggggtgatatccagattgctgggtgcagaggtgatatccaaaacactgggtgcaggagtgttattgagatcactgggtacagggtgatagccaggatacttgacaaccagtgtccctagagcattagtcagaactgacagtggtggtgctcaaacagtatcctggaggtgctcttctctgccaggtatgagccttctgccaggtgatgcctctctgaagcttctagtaccaagaaggggctggagcagtaggagatcatttggaggagtcacaatagcagctatccatgaactagtcagaaataacttaatattttgaaacttttgctttaataagctgagcaaactctcgcttctggctgtgaccaagatagataaggtcccttatcacagggcttccttttggaggtaaacttggtggcatcagagggtttctgtcctgggggagctttgagtttgttccagtctcagaagccaagttcctcagctccacagcctggtgctttgatagtgcccaaatcttcatgcctaaacccatactcggcaagcattttttatccttagcacctttcagacttttttgaatcttatatttacatacaatatataattttccataagtttcttctcaggaagaaaaccatt

SEQ ID NO: 1882096 - DNA, 4001 bp, Homo sapiens; identical to SEQ ID NO: 318267

SEQ ID NO: 1882097 - DNA, 4001 bp, Homo sapiens; identical to SEQ ID NO: 318270

SEQ ID NO: 1882098 - DNA, 4001 bp, Homo sapiens
tggtggtggtcagcaaccttgccattccttggcttgagtcagcataagcaggatctgtctcagtggtcacacagtgttctttctgggtgtctgtgtccaaattccccccttttcagaagtacagcagacactggattaatcttatatgacctcaggttaacttgattaaagctgcaaaaacattatttccaaataaactgatatttggaggttttgggtggatctgactttatggacccagtgcacccactgttaagggtataatcgcgaatttatatggtgctactgcatctagattctagaataacgtataaatttaagaaattagaatggtgcaaaaacagataaattatatgtgggcaccaaatttttacacttcagtctccttcaattgcaataggagcccaaaataagcctcactttttagaaattcatactgggctgaatatttttatttgacatctcatttgctagaagagagatcccttttaactgtttctataaagaataattttttttctcagtaaaatataaaatcataaagactttccaactcttgggcttggcagtttccataaccatgcagatggctaaactaatggactctttaaaactcttcaagtaatgagaggtgtggcaaaggaccatacatttattgagacaaaaatacattttattatcatcaaatatttactatgcatcatggtctttgtggccccattaggtattaagtgtattagggcctttaggcctttgttttaggaaaaataaaaaaacaaaaggactctcagctttccttgggatgacattggggaggagccagatatgtgaacaaacacaaaagtaacattttaaaataattctgacattattttgagtcatccagtcaattcaatataggattctaagatatgtttatggtcgatacttgttgatcactcttggttccctcccccacccccctcctacaaccttgcttttgtgatactttccagggtccccaaactcaaaccaaactaggctcagctgatctggagcaaggccccttgcctgctgatttgtcaggcatccagacaggcgaggctatgggagctcccggtccgaggctgcctcggaaggctcctgttatcctctaagagaggtgaaatgcacctttcaaaggcccagacacggtaaagattggatggcatttttggccgggcgcagtggctgacgcctgtaatcccagcactttgggaggctgaggcgggcggatcacgaggtcaggagatcgagaccatcctggctaacacggtgaaaccccgtctctactaaacatagaaaaattagccaggcgtggtggcggtcgtctgtagtcccagctactagggaggctgaggcaggagaatggtgtgaacccgggaggcggagcttacagtgagccgagatcgcgccactgcactccagcctgggtgacacagtgagatgccgtctcaaaaaaaaaaaaaaaaaaaggttgaagattggatggcatttttaaggggaaaagtaaaccatgtgtagcatgtcgtagcattgggaaataaaggtttcgggactgttgtagccgaagaaactttgtcggacagggcgtttctggatagaacgcgagtaggggaaaaatggggaccgtttgattcggttcaaacacgttttcgttgctctggacgccaaatggaaacacggccaaaatttagttaaaggacttctcttgcctgaagattttcggacggggatctcacgggtttggcctctgggttgggatgacaagtgcccctgtgggatacacagccccaggcctcatcggtcactcggcttacctctggttccgccggctggcccgtgcgtccttggccggggcaggagcagcgctgcgcgcggggcacggagcctcggccgccgagttttcggtttccaagtttccttcccaggcctctcccacttcctcttctcaccagtgcccgcccgcccgcaaagtccgggttgtgaggctgcgcctcccccaggatcgcggccgcctccccccgggactgaagggagggaattcctgtgggtcccaggagtgccaagagtgcgcagcaagacgggaaattgcaaaagacctcacccctctgccctcccccgcggttttccagtaactcccgcccctccgcgcttgccccgcagctgattcatagccccggcccgggccgcctctgcacgtccgccccggagcccgcacccgcgccccacgcgccgccgaggactcggcccggctcgtggagcccttcgcccgcggcgtgagtacccccgacccgcccgtccccgctctgctcgcgccctgccgctgcgccgccctcggtggcttttccgacgggcgagccccgtgctgtgcgggaaagaatccgacaacttcgcagcccatcccggctggacgcgaccgggagtgcagcagcccgttcccctcctcggtgccgcctctgcccagcgtttgcttggctgggctaccacctgcgctcggacggcgctcggagggtcctcgcccccggcctgcctacctggtgggtgaaaactaaatgattcattccttacaggccgcacagtgccgagtcgcccatttctcagactgtttgaaattcaccatcccagcgcctttttctcaaatgatggtggaatgtttgttgagtggaaaattcccacttgaatccctctttcctctctcccaacacatcgtgtggaggagttcattgcttcccctacctctcctctcgtaacccttgactcccacctgagagagccatttttctgggaatccgtgtatctctcccacctggtccctagcgtagaagcgggaggagctcaagcacaggtggagagaggaatccccgggcgactctgcaatagcgtccgtccggggcgcttaccttcttctccagccacttgagtggaagtggccctctacattctggaaacctaggcacggaggggttcagtaacttgtccaaggccatatggctagctgtgagggcactgaaatccgagcccggctctcgcaggccagggctttacccctgacaccgcgattcctttctcgatagttcttcatctgcccttcatccacctacccatgcatgcctgcatccgtccatccatcctgcctgccttgctgcgggaggcacagtgctaggtgctgctgatggagtggcttggtaacagacctgccttgaaaacactttgggaacaagatattcaagagaagtaaatggaagggtctatgaaggcagagaagatagaattgaatgtaggatacttagtttgagctagaaggaattctgatggaggagaaagaaatttttaggttttattcccaagattaaaactgactttggaacatgggtcaaactacttatcacctcttagtttccttgtctgcaaataataatggttcatacttactgtgaaccagcccctattctaagcacttgacatatgctagctcatttaagcttcacgggtgaggcgggtactagttttttattatattttattgaggaaactgaggcccaaagaggttttgtaacttttctagggttacacagctagcaggtgacagtatcaggatttgggtttggagtctgctcatgatcaccgtgctgtagctcaaactctaagactgggtggggtgtttcattatggtcttgctttgtctctctcctgggctgctttaaaatgcactcagagcccttgatgtccccaaactccgctgtgtctgagaatcatttcttgagctttcaaagcatcaaactccaaacacagccttctattcagaatcttcaggaaatactcagtttgttttccccgtagcatttgttcagtgcctccagtggcaggaagctcaccacctcacattttattgtaggaagagctagttctctgctgtaaattgcctccttgtgacttacatcttggtcccagttcccgtttgtcccagcaggtgtggctaa

SEQ ID NO: 1882099 - DNA, 4001 bp, Homo sapiens
caagagtcagtcatatgaccaccggcaaagttgccaatgcagtttttccatttcatgtgccctgtggaagggcaaaagtggaaaagcagacccaatcgcaatgggcaaaagtggaaaagcagactcaattggaatgctagtttttttcacattgtgtaagttaaaggtacaacagctgctatatgctaaattatcactagttatgggactttagttacagtacttgaatttccccccaatccaacttcttaaaatgtgttgaaataccaactagcaataagttaatttctccagtgtaattgaatagtctaacttggtatcttactccttaactgattttgactaaaattataatatttacaggaaaaaaaaaagttcagagttaaaagaataccatgaaagggcaaatgattttatggacaaactttgaactgcatcttcactgttcattaccttactgtatttgctaaggaagctaagatctcatttaatttttgtgtgctttgctttggttcaaaactaacatcacattctcagaacttggtcaggccttaatcaaataaaatgctattgagcttccacttggtctttccactctgctaagtgcaaagacagttctggagaaatcagtcgtggctcatgtcctcaaggagttggtcaaaagacaaggcttggcgaatatgtacgtgccatgtcaatgaactgctacaatggaataaacttataataatgcctaacatttattgactcctcataataaggccataaactttgcatgaattaactcatagaaacgttatgacgttgtatcacaagcaatcctaatttgcagatgaggacactgaggcttagggaagttatctaacttgcctaaggttaaagcaatatactgcttttatggttgcatctttagtaatctctggggttgctgggactccagtgcgagaaagagcccgaaattcgcaaacttggatgatggggaagaaaaggtgtgctaaactcaggtcacagaggtccagtcttaatcttgttcctctgcaagccttgttgctcacacctcttgaccgacagttcgaggcaagtgctcacagcaaacttactctatgtaagccaaggccagatgtggggagaaggggctgagaaatgttagaaacgtgaacgcagtccaggcgggagaagagaagggggcctcgaggggtgcccctatgcagcccacacacacgccaggcactaacttggaaaagcaacaagcttggcgggagatcctcccgcggccggagggccctgaaccctaggccaagactcatccacaacctagggggaggcggccaccagcgccccatcgaagctaaagggctgacagaagggctgtagcggcaagtgtgcgccaacacagctgcacacgcccagacacctgaggcgctgagaggaacttccccgcgatccgccccggctgcacagagcctcttctccccgccggggccccgcccagcctcacttcttttaaaagcagcagccagcagcgcgccggtggcgtgcggctcgaaaggccgggaggacgtcatcgacgcgctgtcgagcctccagcccgcccgggtttccttcgcagtcgcgcaccgacgctcaaacgcgcgctccaacccgcagcctcctcctgcctcaccgcccgaagatggcggctctcaaactcctctcctccgggcttcggctctgcgcctctgcccgcggatctggggcaacctggtacaaggtaaagtgcgggggaagaggaaggccatgggcaggaagaacgtggaccaaaccctgagtggtgcccgcgttttcttctctgcccctacccgctctctccagcctgggatctggcatccgtggcgcggtgccctggtcacggacacgcggcgacgcgttcctggcctcgccggcccctcggatgaccgcctttgcttggttctgcagtcgcttccctgatggagcgagacgcgataaagaagcgcgcggagaggctgagaaggggcgggaggactcctggcagcgctcccgagccctttggcgctcgtcggcttccctcctggcacccgcccttggatagggactctgagggtctgaacggggggaggagggcgccagtatatggaggtttaggagtgaggcaacagcgggtaggtttgcgcccccgatgttggatctctgggcagaggaacctctagaggcccagaacctgaggctgggttagccatggctctgctcgagttcaccggggctggatgccgggtgcggcgggtgtggaatgccgctcccatcctctcctccctatttggctctgctgccccgtagactggagcgctcgccagggcgtcttgccggccaagctgggaaaccatccgaggtgtgtccctggcccgcgcctgggctgcaggggaggacaaacctttctctcgaggcccctcgtatccgggttaggggctttcggttttcagagccctttgaaatcctttttgtgccccactgccgactctccaccgagtggtatccggaggcattcccaccgtggactgacttgtggttttgccttatgcactgtcctcgcttgtaagcccacccctgtctggagccctaggagcgaattacaggaccagagcgccaggtccaggagggtggctttatccccgccgtctcaatcgcgggagcctcttccttggtattcagtaataggtctgagcttgacagcgtgccatgcacacggtgcttactcctgaagcgtgcctgcctggccccattgctctttcctgcatccaatccctgaccgctgagaacacagaggagccactgagctccttcggtaggtgctagggaatggttcagaactggaccattttactcttaaatgcctcttaggaagcatttttataactgcagatagacttggatatataaagcattattaaaagggaacttgaccttcagtgagattgcagcggtgctgaagctaatacaaaccagagcacagcgatacccttgggccgaggtcaggaacgttccttcttttgacagttactgatttgcccaactgtaatttactcacttcaagtcttttccatcttgagtatatcattaaaccatttccgaagctcagcaaacctcatcttagagggacgagatgcaaataaggggttctgctatatctcattaaaagttcatacagagttcaaacttagccctgtcaggcttgattatcataggtctaactcctgccttccactattcccctagcttgtggctcttagtgcccttattgtttttttttttttgagacggagtctcgctctgtcgcccaggctggagtgcagtggcgggatctcggctcactgcaagctccgcctcccgggttcacgccattctcctgcctcagcctcccaagtagctgggactacaggcgcccgccactacgcccggctaattttttgtatttttagtagagacggggtttcaccgttttagctgggatggtctcgatctcctgacctcgtgatccgcccgcctcggcctcccaaagtgctgggattacagcccttattgtttagcactttaaatcctcacctgctgcttctgttgaactgtaccacttatctacttgtttaacttttcagatgtgtatattgtctcctcaaccagatgacagttccccgatggcagagaccatatttatgccttacacttagtctccctcaacaaacacactactctgcatagatcagatattctacacatgtttaaagtacggatgagagaaccctccaggcaaacagaaaccttgagtttttccactaaacataactaacagctaaaacgagatagttattttcttaaatgtttaacatttttataatgggcaggcccagtgtctcgcagacctgagagtgcatcagcattacctggaggttttctaaaacagattgctgtacccacccccagaatttctaatttaataggtcctgggtggg

SEQ ID NO: 1882100 - DNA, 4001 bp, Homo sapiens
tataaaatgctgttccttgatttttccacttcagaaatttgagagatgatcatttagtttatattcactatctcccatggtacctccccctgcctttgccattttttgatagttatattttgtatagtcctctcttgtttgcctggcaacataaatttttttgtttggttaaaactaagatggtgagatgaagatctaaactagaattttaccaaacaaatgatcactattgtctagccaagttgacacatagaattaagtatcatatacccttttgtctcccaactgccggtcagttatgctttggacattattttagtagccatagtaagttgcttctaaaagtgaaaaacacaaatgttatgtttcttaatttcgttgaattagtcactataatgttgatgtagctaatcataaaaaggaatttgtgtcttatttgtctaatagaattcaaaatgaatttataatgtatataatttgatagggctacaataacaaaataccacacactgggtggatcaaacaaaaggaatttgttttcttactgttccagaggctagaagtctaggatcaaggtgtcaacaggttgtgtttcttctgaggcctcactgcctggcttggtctgtgtgttgtctatgtcacctcttggtctatgtgttgtctatgtcatatcggattaaagcctgcacatatgaactcattttactttaattatgtctttaatgccctgttgccaaatacagtcacatattgggttaggactttagcatatgaattttgggagaacacataaaactactaggaaatcatgttagatctgatatactattgagactaaagcaaaatacttttccttactctttgtacatcagatatagcccatcatgaacaaatgtatctgattattaagtatgtttgcataagaataatgtcataacactagaagttttttattttgagaaaagagatataggctcttatgaaattattaataaattgaaaaaagatattgacataaaatatctttgaggccatggatataattggacaaatacagcaggtgtgtatataagggtggaaaagccattattttcccccaaaatggttatgccaaataagttcataatctgtgcaaaaatgctgcttctatgaattaaaatataacctttttagtgtgtacaaatgatacataatcttttatgaattcattgagcagtggaatgttatgcttgttctaaaaactacattaaaaacaaatcctgagaggcatcaaagtcaaatatgatcaaggtactttacacaaagatgtttgtcaaatattaaaagaacataaaatgacaaaatacaatatcctgaaataggaaccatctttgtgtgaacagattacaaattttcatgtaacttgtctatgtggcatggcattttgaactaaatatagtagaaaaaggtttatgaaaaaaaagactatatacaaagctgcatgcttaagaaaaggcctattcgtttgcttataacaaatgagagaaagtaacttaaagttatgtttcgttaatgtaaaactttaaaagagatataaatatacttaaagaaaaatcagaaatatacaaattactgaatgagtatatcaattattgtgggaaaagtgttcgtcgaatagaaattaaagagattacagatgtcctagagatggagatatgaaaaatcaaatgaagtatttttgtatttttacttggagaaattttctacgaatacatctgattaacaaaaagcagccatggccttgacttacctcttaaatagtccaatgatttatatcctgtggcaatttcatctgaaatagtggtaaatagcatgcaatatcaatagtttgcatgaacaaatgtgaccctgaaagagccagtccttcaagatggatcttaagtggctgagtgggcctaaatttaaagcagagccaagaagccatttggtgactagaggccacacacctattttgagttccctgaaaacccacacctctttaactttggaactttcagagctcacctgaaccagccaatcagagcccacctcccttgctgctcagttgtatcaaccaatcagaactgtgtttccatctcatttgtatcagtgcacctgattgggaaccagggcaggaacttttgctataaagctagaacccttcctttgttctttggaccgcaccttccttttacattgaaggctgtgttggactccctagtttgcaaactattcactggaataaagtctctttcttccagggaacttttgttcacatttgtaatataaaatcatgatgtttgtatcctctaaaacggatttgcaaatttttcttcgggcagccttacccaaatttcaaaatggtcctgataatttttttaaaacaataccagtcacagtgtgatatagtttggatctgtgtccccaccaaatctcatgtcaaattgtaatcttcagtgttggtcatgggcctggtagtcggtgattagatcatataatggaggcggtccttcatgaatggtttagcaccattcccttggtgctgttctcttgatagtgagttattgtgagatccggttgtttaaaagtgtgtatacactttgggaggctgaggcgggcggattgctttgagctcaggagttcaagaccagcctaggcaatatggtgaaacctcatccctacaaaaactacaaaaattaactgggcatagtggctcactcctgtagtcccagctactcaggaggctgaggttggagaattgcctgagcccgggaagtggaggctgcagtgagccaagactgtgtcactgcacaccagcctgggtgacagagacctgtctcaaaaagaaaatgtagcacctcctctctctctctctctctgtctctctcactgtctcgttctcttgctcttgctccttctccagccatgtaagatgtgcttgcttcccctttgcctttagccatgattcatagtttcctgaggcctctccagaaatggaagccactacacttcctgtacagcctgtagaaccatgagccaataaacctcttttctttataaattacccattttcaggtatttctttatggcaatgcaagaacagaccaatgcaccatggtatcctgcaaaatcctgaagttaattaagaattatttaagaggcgcggtggctcacgcctgtaatcccagcactttgggagggtgaggtgggcggatcaggaggtcaggagattgagaccatcctggctaacgcggtgaaaccccgtctctactgaaaatacaaaaaattagccgggcgtagtggcgggcgcctgtagtcccagctgcttgggaggctgaggcaggagaatggcgtgaacccgggaggtggagcttgcagtgagccgagattgcgccactgcactccagcctgggcgacagagcgagactccgtctaaaaaaaagaacattatttaagatcgtcacttaagaagagtagattttgacaattttattgatcagtttacttccattaaagtcattggtataaaatatttaaacttaatatgagttttaatataccaactttcaatattgtcaaccaatttaatgtgtaaaaattaacaaaaacacgaaaacgtacgtaagaagcatacgtttttcattttgcctcaggcttcaatatagtttggcacagcactgctcttaagtttccaaacttggcattttgactccaatattagatttgccagattcagcaaatgaaaatacaagtaacacccagtttaactttagataaataacacataatttttgcataggatatatgcatactaaaaagtttgttgcttatctgaaatttaactgggcattttgtataatatctggtaattctaaaaataattatcttacatggttgaaaaagctgcctgcttcttagtacaatgtaactgttgcaccaacaccgtcttgcctgtttgattgctggttatgtggatgactgaa

SEQ ID NO: 1882101 - DNA, 4001 bp, Homo sapiens; identical to SEQ ID NO: 318293

SEQ ID NO: 1882102 - DNA, 4001 bp, Homo sapiens; identical to SEQ ID NO: 318294

SEQ ID NO: 1882103 - DNA, 4001 bp, Homo sapiens
acctggcttccttagaagtttccattctcatatagtcaccgaaggcagcagcactgtcaaataaacaaaggtttaattaaataaaaactatttaaacagagcagaaatattcttccctggctagtcacagattggacaattcaaagaacaaaccctggggggaaattgccaatggattactttttctgttttctgtctattgcaacgtttttctttctggtgtcaaatctcaagttgaattcagtcaattatctacagccaaaaaaagtgcataaatgtctcttctgttactgtttatatgtcaccactaaataaagcaaaattttcttctcagcttcttgccttaggattttataagtccaacaaaacaaataaaatattatgtatattctatcgtcactatgaaagcataaggattgatttagttatgtacaagtttattgccaaagtttttcttcgttgctaatgttacacttgctacaaaatgtattaaagaaacagacaatttgctaaggatttggaaggatttgtcattgggttaagtacattaagtatctaaggggtgtggtgttctggttatgtgtatgtcagtttcacatatttttttgctttcttattttagttgcctctataatcattttgactttaaaatgttttctgcagatcctttaataactgcaaatgtagaagtatggtgtaacaagtaattggtatgactaacactaaaatgtaatgggaaataaggatactattgtaaagaaaacaagaaaaacctggggtaggggagcagtattgattctctcttaggattcctaagattctctgtcccaacccttctaccatggaacattcttatgtggtctaagtgtcaaagaccagaggaactgggcagtaacttatcttctcaattttctctctgaacatagatattttctttaagatacgaaaaacttttaattgtgctcctgaaacccatccctgtcctgtctcagccccgttgactcttctttctgtgggtgggtgaaaagcctacccatctgcaaaggtagctctgaaactgttctggaaaatcctgtattttcctccacaaatgatcgttttagtttcaagtttatttcaggtacattaattctccccctcctcagacttcataacaaatgatcctgcacacgattagaataggaaaatgtaaaataaaatcgaagcatatctagttgcctcagcgactttatgcttatcactttcagtctgcattattctactaaaaataaaaagaaagatgaaaattacctcaggcgtttgctgccgtgcctgccctttggtttctgggacggctcgggtcccgtagcgccggcacagctgagattgccaagccgggaagagaccttgctccaggtgtagctgcgttttccccagatcacctgtccttttcccctccgacaaggaagctgtgatttttctctggcctttagaggcaaagtgattccagataagtagattaatgtgtagaatatctcatctgtgttgttccagtgcagccctttcagctttccagagccagttagacttgttatgaggagctaagtgattggctggctctggagctcagtttcatagattatagcccagcgtacgagaagcacgagtcctatagttggcgtaccctgaggcctgccagttcctgccttaatgcatatgtagtcgtaattgagttctgacacggccttggatgtttctgtcctaaatagctgacattgcatcttcaagactgtgtgagtaatcctgatattttttttttaagctcagtaaattaattacatgccctgggagggagtgattgtaagtagaaaatactgaactagcagatgattcgtttttaaggtgctatactatgtgtatcaagttcaagacgatgaatcttaaagcttctaagaactggcagggttattccagctttgtgccatgaatcacagtcaagctgcattttgaaggaggctgtttgatgcatttgctagctctgtttgttttatggggtcagtaaagtggcagaggtccaacaggagcaggttaaagcaggatgctgggatcaaagcttagagagcacttgagtcaggcaagttttaagttttcccacccccaagcatctcagtccaaaactgagagcaagcagcaaatattataataaatgctttggggacaggggtacacagcagatagggcacagtaacaggagaaatgtaaaatgatggcagcaatacttttgttcactgtaatctgcagccaattgaagacatacactatgaataactaaaacatttttatatgaacaaaaatgctcttcagtggttctgtttatgtggtagagggctgaatgaaaaaccatgcgcttgttgtaaaaaagccttataaaaagtacattaaacacatacagacacaaccataacagaagaaagtatgtggattggaatttgtgattggagcagatcaaattaagccagggaagccgttattaggtttgtatgattgctggggggtaacttctgttgctgacaaggtttaggataaagctggagcagattgaagtggaaaaccagaaaacatcagcatttcattaccttctatagcatacactgcagggtagaattaatactgagtatagactggtaaatgtgagcagtttactgtttgcttttaaatcattattgatttcccctagcctatcataaaaaataatagggcttttgcctatgaaattagtgcttagaaatatttttcttcctcccaaataatttttatactttttctcaatacagcacaaaggtaggtcattaaaaataaaggggttccttttcaagttgctttttgtctaatttttcctctttagacctgtagatacaaatgtatgtatttgtgctatgtataactctcaagcataaatcatttgaacagtatttaaaatcacaggctcctgtggcaaatataaacttttaatagctatagttggcaattacttgccaattcctataaaaataacattagtggcttatttttgattgcacctaaacaactggcatgatttagccagtaggagagaaatattagttgtgttttgcataattttgtgtttagatcacactggaaatacaaagttttgttgttaaaaatatttttgctttctgaaatattatcccctttcagatcacaccaatgaatgaagtttgtagaaagaaagaaaagtagccaacgtagactccttttctgtatcaatcaaatatatgcaaaatacatagatttttaaaaatgtaattttaatacattcctttagaaacacatttacttcatgaagaaacagtataatgagttcatttattgacccagaatagtgagttgatttattgagtttctgtagccatagacacgaatagtaatggttggctcattcttagctatacattcctaactgactgtattagtgggagaaaggagtgcatctataaaataaatataatcccatccctcaaggtggtctggagcccatctaagagtaagaagtagtagagttgaagctgctttatctgaatcagctcctgacttcaactcagctcctctttttccttaggtccatgtggcccacttggtgtagtattcacatctccttccacctttttatgccttcattgtttacattaccttgcttgggctcttattgagatgaatcacataaaaatgcttaattatcaaacattaatcagctgcctatataattcagaggatgtttaaaaccaaggctcaaggaaattctggtgggtgtatactaggagtatttacgtcttgcatcggtactttcctctgggacttccatcacttcagttcttcctgagatgccagagtcatatctcttacttgtgaaagaacagagctttaagaaatggagtctagaggtgccaggtgcccagtggacagtgggctgggggcaaggcatggtggggaaagcaaaaaaa

SEQ ID NO: 1882104 - DNA, 4001 bp, Homo sapiens
caaatgaaatgacttgcaggcctcagtttagagtattgttggctttgtctgtcaacaaatggagatttgaacatgggagttcaaggggattttaatgaaattttattaaggagatgagaagcagggagtctgtgttgaaaattcaataaagggcttgttttccatctcagcctggataatctatgttatctctgagtaaagggggtaacaattctaacaacctggcttccttagaagtttccattctcatatagtcaccgaaggcagcagcactgtcaaataaacaaaggtttaattaaataaaaactatttaaacagagcagaaatattcttccctggctagtcacagattggacaattcaaagaacaaaccctggggggaaattgccaatggattactttttctgttttctgtctattgcaacgtttttctttctggtgtcaaatctcaagttgaattcagtcaattatctacagccaaaaaaagtgcataaatgtctcttctgttactgtttatatgtcaccactaaataaagcaaaattttcttctcagcttcttgccttaggattttataagtccaacaaaacaaataaaatattatgtatattctatcgtcactatgaaagcataaggattgatttagttatgtacaagtttattgccaaagtttttcttcgttgctaatgttacacttgctacaaaatgtattaaagaaacagacaatttgctaaggatttggaaggatttgtcattgggttaagtacattaagtatctaaggggtgtggtgttctggttatgtgtatgtcagtttcacatatttttttgctttcttattttagttgcctctataatcattttgactttaaaatgttttctgcagatcctttaataactgcaaatgtagaagtatggtgtaacaagtaattggtatgactaacactaaaatgtaatgggaaataaggatactattgtaaagaaaacaagaaaaacctggggtaggggagcagtattgattctctcttaggattcctaagattctctgtcccaacccttctaccatggaacattcttatgtggtctaagtgtcaaagaccagaggaactgggcagtaacttatcttctcaattttctctctgaacatagatattttctttaagatacgaaaaacttttaattgtgctcctgaaacccatccctgtcctgtctcagccccgttgactcttctttctgtgggtgggtgaaaagcctacccatctgcaaaggtagctctgaaactgttctggaaaatcctgtattttcctccacaaatgatcgttttagtttcaagtttatttcaggtacattaattctccccctcctcagacttcataacaaatgatcctgcacacgattagaataggaaaatgtaaaataaaatcgaagcatatctagttgcctcagcgactttatgcttatcactttcagtctgcattattctactaaaaataaaaagaaagatgaaaattacctcaggcgtttgctgccgtgcctgccctttggtttctgggacggctcgggtcccgtagcgccggcacagctgagattgccaagccgggaagagaccttgctccaggtgtagctgcgttttccccagatcacctgtccttttcccctccgacaaggaagctgtgatttttctctggcctttagaggcaaagtgattccagataagtagattaatgtgtagaatatctcatctgtgttgttccagtgcagccctttcagctttccagagccagttagacttgttatgaggagctaagtgattggctggctctggagctcagtttcatagattatagcccagcgtacgagaagcacgagtcctatagttggcgtaccctgaggcctgccagttcctgccttaatgcatatgtagtcgtaattgagttctgacacggccttggatgtttctgtcctaaatagctgacattgcatcttcaagactgtgtgagtaatcctgatattttttttttaagctcagtaaattaattacatgccctgggagggagtgattgtaagtagaaaatactgaactagcagatgattcgtttttaaggtgctatactatgtgtatcaagttcaagacgatgaatcttaaagcttctaagaactggcagggttattccagctttgtgccatgaatcacagtcaagctgcattttgaaggaggctgtttgatgcatttgctagctctgtttgttttatggggtcagtaaagtggcagaggtccaacaggagcaggttaaagcaggatgctgggatcaaagcttagagagcacttgagtcaggcaagttttaagttttcccacccccaagcatctcagtccaaaactgagagcaagcagcaaatattataataaatgctttggggacaggggtacacagcagatagggcacagtaacaggagaaatgtaaaatgatggcagcaatacttttgttcactgtaatctgcagccaattgaagacatacactatgaataactaaaacatttttatatgaacaaaaatgctcttcagtggttctgtttatgtggtagagggctgaatgaaaaaccatgcgcttgttgtaaaaaagccttataaaaagtacattaaacacatacagacacaaccataacagaagaaagtatgtggattggaatttgtgattggagcagatcaaattaagccagggaagccgttattaggtttgtatgattgctggggggtaacttctgttgctgacaaggtttaggataaagctggagcagattgaagtggaaaaccagaaaacatcagcatttcattaccttctatagcatacactgcagggtagaattaatactgagtatagactggtaaatgtgagcagtttactgtttgcttttaaatcattattgatttcccctagcctatcataaaaaataatagggcttttgcctatgaaattagtgcttagaaatatttttcttcctcccaaataatttttatactttttctcaatacagcacaaaggtaggtcattaaaaataaaggggttccttttcaagttgctttttgtctaatttttcctctttagacctgtagatacaaatgtatgtatttgtgctatgtataactctcaagcataaatcatttgaacagtatttaaaatcacaggctcctgtggcaaatataaacttttaatagctatagttggcaattacttgccaattcctataaaaataacattagtggcttatttttgattgcacctaaacaactggcatgatttagccagtaggagagaaatattagttgtgttttgcataattttgtgtttagatcacactggaaatacaaagttttgttgttaaaaatatttttgctttctgaaatattatcccctttcagatcacaccaatgaatgaagtttgtagaaagaaagaaaagtagccaacgtagactccttttctgtatcaatcaaatatatgcaaaatacatagatttttaaaaatgtaattttaatacattcctttagaaacacatttacttcatgaagaaacagtataatgagttcatttattgacccagaatagtgagttgatttattgagtttctgtagccatagacacgaatagtaatggttggctcattcttagctatacattcctaactgactgtattagtgggagaaaggagtgcatctataaaataaatataatcccatccctcaaggtggtctggagcccatctaagagtaagaagtagtagagttgaagctgctttatctgaatcagctcctgacttcaactcagctcctctttttccttaggtccatgtggcccacttggtgtagtattcacatctccttccacctttttatgccttcattgtttacattaccttgcttgggctcttattgagatgaatcacataaaaatgcttaattatcaaacattaatcagctgcctatataattcagaggatgtttaaaa

SEQ ID NO: 1882105 - DNA, 4001 bp, Homo sapiens
agaagccgtccaccaggagcacgtgcagcgtggcggtggccgagcgcggaggctcgccattgtccttgaccagcaccaccagcctgtgcttggccgcgtcgcgctcgctcagcagcctggcggtgcgcacctcgccattgtgcgcccacacgccgaatagcccgggctccgtggccttgagcagctggtacgacagccaggcgttctggcccgagtcaccgtccaccgccaccaccttggtcaccaggtagcccggctcggccgcccggggcaccagctcggtgcagggcgcggagccgttctgcagcgggtacagcacgaagggcgagttgtcgttggcgtccagcacaccagcacgcgcaccagcgcctcgctgctcaaagccggagaaccgcggtctgaggcgcccacgcggaactcgaactcctgcagggcctcgtagtccagcgacctgagggcaaacaggtggccgttgtctgtgttgatggagaccagggaggcgaggggcaggtgcgggttctggggcggcagcagcgagtaggtgacctgagcgttggtgcctgagtctctgtctgtggcgctgacactgccgatgtgcagggcggggctgttgttctcgcggacgaacagggtgtaggaggtttgggtgaaggcgggggcgttgtcattgacgtcggagacccgcagggttatgttgtactcggttttcagcctgggtgtccccaagtctgtgacagtaatggtgatgttgtactcggccctgctctctctgtctagcgctccttctgttaacaaagtgtagaaattttctaaggtaggttttagaaggaaagggagatggtcttggatggaacacatcatttttccattgttcccggagtccggatccgaaattccgaaaacagcgaccactgtttctggggagttttctaggatatcactgataagtaaggacatagtaagttccggtgcgttgtcgtttatatccattacctctatggctacggtgcattttcctgaaagacccccaccgtctgaggcctcaacttccatgtgataagattgaatttcctcaaaatccaacgcctttttaaatctaatttctcccgtgattgagtttatttcaaaggcctgaatgatttgattggagtattgaaaaaatgaataggagagctccccgtgggtcccagcatctaaatccctggcagagacggtgatgacaagggaacctataggggtgttctctgggacctgcacctcgtagcgccgctgagcaaattcagggacgttgtcattgatatctacaatcactatgagaacctgggaagtcccagttctgggcggtgacccaccatccagcgctgtgagggttaacctgagctggggctgctcctcgcggtccagcgcttgatccagcacgagctctgggtatttcttgccgtcgctgtgattgcgagtgaaaaggtggaaataggagttggtgctaattgagtagttctgaactgtgttgctacctacgtccaaatcttgagctattttcaaaggaaatgaagtccctggatggctgccttcggagattttcaggaggatttcattttccaagaattctggggcatggtcatttacatcttggagctgtagttcaccttgaataaactgcaccggatttttcagtaacatctggaaatgtagtatacatggatctatgtcaccgcacaactcttcccggtccaatttttcttttaggagcaaattcccactcttccgttcgagctgcaaatactgtttgttccctttggaaagaatccgggcgcctctcgcggccagttcccctacacccagccccagatcttttgctaagttggccacaaaagagccgctgtccctctcttctagaactgaatacttaatcgtagcgctgcccgcctcccacagtagtaataagaaaataatggcggtcacttgccttttctctggtgctttggggagcggcgtctccatcattcctcagggtccaaaagatgcagtatttaatcacaaaataattgctttacagccaactcagctatcttgatttaaatatcttgagttagttctttttaacattgaccgacatgggatggctgcctctctgaaacctatccccagtagtgaaaaagtgtttccttttggagctgccagaaaacccgcacagcttttaaggagacactgattctgcagtttttcactcagcctgcagcgccaccaagcgttctgctttacaacttcagataattttcatttcaaagcacactgtatactgtaatagctaaaacatatagcaggccttttaggtcatagcctgttatatactcccttttcccccggctattatgaggccttgttcaggtagctaagaatggttgttacagcaaaagtaatgtctgtatctatattcatcttccttataaaggtgcaggttcagtacacaaaactctgctccaggcaaattcatttattaacaagtatttacctgtagggacattcatgtagcttcctgggataatacagtaaatgaaacataaaaattcttgctcttggggaatttacattctattacaaaaatgctaatttgttctattgtactggaagaaatcatgaactttcaaaatctagtttcattctcatattgtaatgtgcctgtaactcccgaaagaaaataaaaatattgtttcttgttagtctctggtctacataaccattgggaattttttgttttttttttttgagacgtggtctcactctgttgcccaggctggagtgcagtggcctcaatcttggcccactgcaacctctacctcccaggttcaagcgattctcctgactcagcctcctgagaagctaggactacaggtgcgtgctaccacaccaggctaatttttgtagttttagtagacatgacatttcaccatattggccaggatggtcttgaactcctggcctcaagtgatctgcctgcctcggcctcccaaagtgctgggattacaggcttgagctaccatacctggccaccatttaggactttttttccttcataaatttattatgtgcaatgcccagtgaaatttagagaaaatggtggtttgtcttattaaaaatcaatataggccaggtgtggtggctcacgcctgtaatcccagcactttgggaggctgaggtgggtggatcactggaggccaagagtttgagaccagcctggccaatatggtgaaacctcgtttctactaaaaatataaaaattaattgggtgtggtggtgcacacctgtagtcccagctactcaggaggctgaggcagaagaatcacttgaacctgggaggtggatgttgcagtgagctgagattgtgccactgcatttcagcccgggtgacagagcaagactctgtctcaaaaaaaaaaaaaaaaaatcaatataagctcagaatctaggcaatgtcttttctacagatgtaaagaagacaacaaagttgacaaagtcaaaaatacactgtctggggaagggtattgacctgtctgcattggacagtatactaccccagtgtacattctctaggattagggggatggggatattgaaaaacactactgctccaactaaagccaagtgactggagtgagaacaatggaagaaggaatctcaccaaggaagaatgctgttctaaggagaatagggtatatatctgagaacacaaaatagtaaatgttccccacactcatttaatcagttggtaatcatccatgacagtcagttcacttatctggacacaaaacacagtcaaatgtaatttagttcagcccagttccacttcaattaaggataaaaataaaatagtcagccaggtgtggtggctcacacctgtaatcccagcgctttgggaggctgaggcgggtggatcatgaggtcaggaattcgagaccagcctggtcaagatggtgaaaccctgtctctcctaaaaatacaaa

SEQ ID NO: 1882106 - DNA, 4001 bp, Homo sapiens
gtacgacagccaggcgttctggcccgagtcgccgtccaccgccaccaccttggtcaccaggtagcccggctcggccgcccgaggtaccagctcggtgcagggcgccgagccgttctgcagcgggtacagcacgaagggcgagttgtcgttggcgtccagcaccagcacgcgcaccagcacctcgctgctcagcgccggggagccgtggtctgcggcgcccacgcgaaacccgaactcctgcagggcctcgtagtccaaagacctgagggcgaataggtggccgttgtccgcgttgatggagaccagggaggtgaggggcaggtgcgggtcctggggcggcagcagcgagtaggtgacctgggcgttggtgcctgagtctctgtctgtagcgctgacgctgccgatgtgcagggcggggctgttgttctcgcggacgaacagggtgtaggaggtttgggtgaagatgggggcgttgtcattgacgtcggagaccagcacggttatgttgtgctcggttttcagcctgggtgtccccaagtcggtcacggtgatggtgatgttatattcatttctgacctctctgtccagtgggtgctctgttaccagagcgtaaaaattcttgaaggtaggcttcaagacaaaggggaggttgtcctgaattgagcaaactgttctcccattgtctccagcgtcttggtctcgtatgctgaaaacagcgaccaccatctcaggtgaagagttttccggtatggggctggtaagagatgtcatggctatttctggcgggttgtcattcacatctacaacccgaactaaaatgcttgattttccagaaaggctcccaccttcaatggcctgaatatttatgatataagattgaataatctcgaaatctagaggggcttttaaatagacttcgccagaaattggatggatttcaaatgttttccgtacatctctggagacgtgggaaaatgaataagacagttctccatttattcctgcatctaaatctgtagcagacgctttgatgatcaaggagtccagagggctgctctcaggtacaagaacttcatagactggcttctcaaattcaggggcattgtcactgatgtccaggaccacaacgttaatcagtgtagtcccagacctgggcggagacccgccatccacggctgttagcgttaaactaaactcagacaccttttctcgatccagggattggtccagtaccaactctggatattttctgccctcatcgctatcccgtaatttaaggtggaaatggggattgggacttattgtatagttttgaacaccattctttcccacatccaagtcctgcgcactatctatttggaataaggttcctagagtagcaccttcggagatttttagaagcatatgattgtttaggaacgtgggagtgtgatcatttatgtctttgaccaaaagctcagcacgaaaaaattgcaacggattttcaaataacacctggaaatgcaatatacatggctctgtgagatcacaaagtgcctcccggtccagctgctcgtttaagagcaagtcgccattctgtggatccaatcgcaaataaggtttatagtcgtcaaagatgactctggcccccccttgcagccaggtcttccacatccaaacccatgtctttcaccacgttggctataaaggtaccgacctccatttcctctgctatggaatagctcccggtctcagaacacaccaaagaccctcccaggaaaacaaagaaaagcagcacttgccttgtccgctgagctcttccctttcccggctccatagctccttagccaaacgtctttctggcgtaaacgtttcaactcagtctctagcagctcttaaagttgctcctctcacctatcagcctggacctttgggaatctagaaactcttaatcctgtcgcgaaggtgttgatggtgccctaccttttgaaagactattttctcctggtattccagcgctttcagttcccatggttaaggaaaaccagagcatctgcggttacaaaaatttcaccgtcttatcctgcagcgccaccatgcgactctgcagatattcaggttttagataaattccaatacgtttcagacaaaatattaatttttcttgtgtgtttgtctataaatttaaattatatgctccttctatatgcctattttccgagttgcatttttgtgatatgtgatgccattacctttccatcatcagccacaatctgctatagctgtagtagatataagaagcatatttaagatgtagcccctgcctcaaacgagttatgatctctctgtgaagacaatatattaaacaactaaagatagtgaagaatactcttacatgtaattgacttagtaggcaacagatttttagtaaaattggaaatgagaattagaggtcttagctctctccacaactactcttcgaaaagaggaatgacatcatgtacttgaaaatgaacctggtatatgaaaacagttgctttggaaaggttggacattttgagctgcataaatggtacgatttatttagggatactcagtaggagacttagctggcaggagtagaaaataaatgctcagaagtagtgagtaaaataaaacatttctggttttcaatctaaaagcaagtccagttaaacattttttaaaatgtgaacaaattagacctcagtttagttgtgaaactgaatttcatcatttgcagacccaggctttccagaggcacaattttaaatatgtttatatatctattaattaattagcttagcagatagttattgagaatatactttgtgcaaggaatggtcataagtgttagggatagaatggtaaacagacatagttcctgccatgcaagagggagacagaaaaatgaccatgtattttaaatagagcacaatgaatgtcatgataaaggaagttcatgctactacaagggcatagatgatggtcatctaaccagaatttggaaatacaagacagatttttctggagaaagtattctctaagttgatacattaaaaattaataggagtactttaaacaaaaattgggtatggggtaaaattgttcaggaaaactaaaaacaagattgtgcaaatgcaaataaagagaagtatttggaggaaataaaatcaatatggctaagacatagagcaagaggagagaagtggtaagagttgaaattggaaagataagcatatattttttaactatgtcaaagtatttggactttatgccagtagaaatgcagggttattaaagggattataattaaaacaggaaagtggcatgattatgtttctactttttaaaaagattatcctgtttcagagttgagaataaattagagaggaataagattaaaggtgagagattgattacaaatggttgcaataatacaagtaagaggaaacattggcctcaactagaaatgcagtgaaggggttgtattagaatgataaaacaataggggtgtggtgatcaacatagaaggagtggggtagaaaggcatgaaggtaaatgtactttgtcttcaggcttagggaactgagtgactgttggttctattaactgataaacacaggaagagcagaagaaagaggaatagatatggagctggttggtgaaggtatatttagttttgaggaagggaacagttttaattttaaacggatgagtttgagcatccatatagacagttatataaattagcttctattacataaatgcagttgaggaaagacgtttgggctatagagtcacatttggcataaatggtgattaaagctcttcaggaaagataataagttgcagattaaaagaagtatatttgaatttgtgacttcagacttgatgtagttttcagagattaccatctccagagagaggccatggttataggtgactaagctagagtagaagtgaatgtcattagagatgaagaaggctagaaacagagatag

SEQ ID NO: 1882107 - DNA, 4001 bp, Homo sapiens
ccaccagatgcctggaaaggggtcctcgggcaccgagcagcgacccaatgaggcctccctgctcctcctgcacagccgcaccgccacgaacaggagcaccgagaagaggaagaacgacgacaccaaggccaacgccaccaccaggtagacggtgagcaagtcggcctgggcctgggccggggccgcttcagggaacggcaagtagggcagggagaagccatccaccaggagcacgtgcagcgtggcggtggccgagcgcggaggctcgccattgtccttgaccaggaccatcagcctgtgcttggctgtgtcacgctcgctcagcagcctgtcagtgcattgtgcgcccacacgccgaacagccctggctccgtggccttgagcaactgctacgacagccaggcgttctggcccgagtcaccgtccaccgccaccaccttggtcaccaggtagcccggctcggcggcccgcccggggcatcagctcggtgcagggcgcggagccgttctgcagcgggaacagcacgaagagtgagctgtcgttggcgtccagcaccagcacgcgcaccagcgcctcgctgctcagcgccgtggagccgcggtctgaagcgcccacgcggaactcgaactcctgcagggcctcgtagtccagcgacctgagggcgaacaggtggccgttgtctgtgttgatggagaccagggaggcgaggggcaggtgcgggttccggggcggcagcagcgagtaggtgacctggatgttggtgcccgagtctctgcggtgctgacgctgccaatatgcagggcggggctgttgttctcgcggacgaacagggtgtaggaggtttaggtgaaggtgggggctttgtcattgacgtaggagaccagcaccgttatgttgtactcggttttcagcctaggagtccccaagtccgtggctgtgttggtgatgttgtactcggctctaatctctttgtccagtggtccttctgttaacagccagtataaattctcaacggaaggtttcggcatgaacggaacatcattttgaattgatcaaactattcttccatttttcccagaatcgcggtcttgaatgctgaaaagagctgcaacggtctcaggagaattttcgcggatggggcttgtgaatgaagccatggtcagttccggagcgttatcgttgatatctaccacctgtattatgacagtgcattttccagaaagacctgccccatcagaggctttaatatccacctgatatgacacaattttttcaaaatctagttttctgattattttaatttctccccttcgttcattaagtgcaaatgtcttagaaatctcttcatcaccataaaaaatgagtagaatatctcaccattaattcccatgtctgaatctctagcggaaacagtggcaacaagggaatccagggggctgttttctgatatctgcacctgatagagtggctacacaaactcaggtgcattgtcattgatgtccaagatttcaatgaggaccagagcagtcccagttctgggaggagtcccgccatctactgccatgagagttaacctgatctcagcctgctcctcccgatccagggctttgtccagaaccagctctgggtattttctgccttcactgccattttgggtgagagcgtggacatgggagtaggggtagatggtgtagttttggatgttattgatggccacatccaaatcttgtgtatttttcagaggaaacacagttcctggaggagtattttccatgatttcaaaataatttctgcttctgggaatacaggggaattgtgtttatgtcactgaccaaaagtttaaacctccaaaggttcttccagtaacacttggaattgcagcacacaaggctcagtgattctacacaattcttcccggtccaatgtctcatttacttgcaggtctccggtctgaagtttcagctgaaaatattttttgttattgttaaaaatgacccgaggcctccactggtatattactcttacttctagccctgggtcctttgttagattggccacaaaagaaccactttctgtttcttctgctacagtatattccactccgcacagtatattccactccgcacaagtctgagacagcataacaaagagaagcagcacttgccttattctaggaaagtgctccttttcagcctccatttctccaacaccaacagcattcagggtccggatgcctatgttgcgttggtaggcaatctgctctgggaatcaatccttgcagcaacgcaattttcggttaagaaagcctcttctctttgatggatcgaatgagtgctagcacagtagttgaagagattcattctaacatttcaggagtgtaaacttaagtgatatactagctaaatctggtttattatgcaaactcaataggtagcctaagagttgtggataacttatttgtgaatattgcctaaggactgtgagcttgttatgttgacttgttacagtatctaaaataatttataaagagcatcaccatctattgttaatactgagatacacacatgttgaagctgagagtcactgagaccttgaagagggagccagccaagatcatggatataaaggctgaagttaaagtaaaaagtaaaatgcagaagaaaatatgttaagttcacctgaaatagcaggttaagcatattcccaactggagaagatctcaactcatttttagtaagcaattatgtatctcttgtggattcattggaatactgaaaccctagcatggaactgaaatttttacttctgaggaaagagaaaacattttgggggaggagacttgggggtcttcccaactgtgccaactttagccaatgttttactcacaatgtttaaataatagacactattatgtgttgtggcattctaattatctagctaactgagaaaactaaggatgagccaagtgtaagaactgtggttcatattggtttctcttaaggcataaataactcaaatcaacattctactttagaatgttttcttctatacaaacaagttcgattaattaaactttcaaaatatgccagtcatgggcaaaatctgatggacaaatttccttatagaaatattttggtcatgggtccaaattcactattatggatttacatgtccaagaaaatgtgtcctgaatgtctatgcattttttaatattaatgggatagaagcttgtacctatgtcagtaacccaatgaatcaaagttagtttttcattcccatctttcatctcttggaaaaagtttcctctttctaagatcttagctcctaggcttggaagaaacttaaatttctttcgtgaggctttctagcaatagaggatattaattaaatatttattactataactgaaatcatgaatcaatccatatgatcgataaattgggattatttatggagcaagaatattttacattacatgacaaaaataattttgttcacactgagcttagcaagtaatttttaaaagaacgagtctgctaaggagggtatgatgatcctgagaaaaggtacagacacccaaaacttacaatttcagtgttattattattttttaaacaaaaagtattatttaaaaagtaatcatgggacatataaaataatggaggtaaagttaatgagacatttcataaagccctttgtagcatttatctgttgaaagacctcataaattatttacaaatttaaattttgttacataagcctctagtatagatttgttatctctaggcttgtacatcctgtatttcattcattaagttaatattagaagcatgcaataaaagaccagggtttcatggtagatagtctaattgagtactcaaggttgtacatacctttcaagtctcttttgatttcaagacatcccccttcaagataggttaaacaaaggaattttactattaccaatggagtcttactgtagaacccaagggcaattagac

SEQ ID NO: 1882108 - DNA, 4001 bp, Homo sapiens
tgcttgggaatcagagggcacaggactgtcactgaagtctggcagtgcctcctgcaggctgtctgcgaagactaggtgaagcgtagcggcgcagagagcggcggctgtcctccgtcacgcacagcaaccagcaggttcccgtgtgcagccccaggctgaaaagcccgggctcgatggcctgcagcacgtggtaggacagccaagcgttgtgtcccgaatctgcgtccaccgccaccaccttggtcaccaggtagccggactctgcggcgcgtggcactatatcgaagagtgcggagccatcgggccccagcgcggggtacagcacccgcggcacattgtcattgaggtcgcccaccaacatgcgccggctcatgttggcgctgagcgcgggcgagccctggtcgtgggcctgcatcgtgagctcgaaggcgcacagctgctcgtggtcgaaggcacgctgcgcgaccaccaccccgctctgtgcgctcacggacacgtaggacgacagtgcccgcagctccaagtcagtggtaacgatggagtaggagacttggccattcagccctaggtccaggtcagaggcgctgacttgtgggatggaggctccgggaaggttgttttcggccacgtggaccacgtaggagacttggtggaaaaccggagcattgtcgttgacttcaccaatgcgtagggtgaggcttgtgctggatgagagcggaggcttgcccttgtcagtggcagtgatggtgacgttgtactccgggatccgctcccaatccagggtcccatctgttacaagcttatagtcattattggcggaagattcgattctaaaaggaactctttcgtttatgaggcatgtaacctccccattttctctcgaatctttatcatgtgttttgaacagagtgatcaccgtccagggttctgcgtcctcagttacagaactggacactgaagtaaaaaccacgtctggggcattgtcattctcatctaggatttctagtataattttacattcgctggtcatgcctccaccatccttagcttctactctcatggtataactgctacgaaattcgaagtctattaagtctttggatttaatttccccattttgatggtctagcacaaacatatttccaatatcatctcgtagggatttgaaagagtaggtgatctccgcattgacaccctcatcctggtcagtggctgtcacctttagtacagaggtgcctgggggcacattctctctaaggctgactttgtatacatcctggctaaaaactggggcattatcgttggcatcagtgacctcaatttgaattgcagcagtgccagttgggactgggtcacccatgtccattgcttccaggaccaggagatgagagctctgttgctcctggcccaggggcttctccagcactaattctggagcgttcttgcctttagtcttgtccatcatcagagagaaatgttcattagaactgagctggtaactctggagagagtgaggccctacatctgcatctatagcagattccaggccaaaccgaatgcctggaattgctagttcattgatttgtaaaacaatgctattttggggaaaatgaggtgggttatcatttatatcttctatcatcacatttatgtgaaaaacatttagaggattctctgctacaatctctaagggtatgacacagaggattttgaagacagtgactctcgatctattctgtcactcacaagtatgttcccattctccgtgttcacggtaaagtattgtttctctgcactaactctaaggtttcaggtcaataaatcctgaacatgcagccgcatgtcctccgcaaggttccccaccacggagccctggaccgtttcttctggaatagagtagcggatctgctccgagggtgccccgcagaacaaaggcagcaggaaagggaagagtgcttgccactgccgggtcctgcttctctgcttcaccctgtttcccatccttcccatgcgttgctgcagtctccgacgttaagagaaaatgtttcacaaagtgcttttaaaatatttacttccatacatagaaaactcaatgctcccagtttgagggcaccccaatccgtatggaatcagatttgcaggagcagaaagcccaagtcttggccactctccgacttgcttctgtgactgaacagaatatcgtcctggtagatcccaggctccagttcttgcagcacattggccaacagcagggctctgagtctatttagaaaactgcagccggaagcctttgctaattcaatgggattcagaattagactgatgtgttggactaatgtataggaaactagacattttatgagttttcgtagtgactgttttccagtgtttactaccaaagaagattccttagagatgggaatctatagaacagtcattaacccagcaaagagaatttaaaagtttgtttttttctaagcagaagcaatgcacatattggaagaactaggcaaagtcttctctcctgttgtagaacaaaaaccttgtgggaaaacatccccatcaagtggtatgggaaaattttgaccactatgaaatgatatgcagtattattttcaatctgatgtgcagataattttcctcctagttttatcagagaaaactggaggagcactgaaagctatatagggcatattcagaataaagttagccaaacccttcttatcacttataaaagaggtttctgaaaaggattattgtttcatgtttcatcataaagagaatataaaggtatagcctagtaggttgccataggaattaataacatgaaatgtgatggtgttttatttttatcctctatttaatgggactatatgttataccttaacagaactttatcactacctccgaatcaacataaccctcttaatatcacatttcaaagccaacccttcctttttgttctccacgatcttgggaagttagtttagatgaggttttataatatggaacaatctccttttcccagccaaatacctcatatcctttttatttaactaattccagtcaaagtacaatgccttacatcatttttctcagtttggaattccacaagtataaatcctatccctagatgctcaaaatacctgaacatttttcttgacttcaagaaaaatgtaggcatctgttggaagacttgcctttcctacagttgaaattatttttgtccgagccctagatagtcagtttacaactaatgacataaggtaaattcctaaatgagaaaactaaacttgaaagggaacataaatatccaagtaatttggggcaaatacctagaagtgatgtgagagtgttgactgaattgattatggaaatgattcctgtgatcaaaaaccctagataagtctcctttcctcatttggctttcctagacattgcttcagataacatgtatgtcaggcaactatcaagcttcaataacaagttggtctgaataaaagaactgaatgtactatttgccataagaatgaccttataaagaaagaaagaaggaatctatgactcccaactacactgaaaatgaacaaaaaaatagccagaaggatactagctaaatcagtttaattaaagtccaaataccttcaatctatttatatattcacaaactactctatttgaataaatctgtagacatctttagcacatttgaaaataggtttttgagaagcactgaatcaaaatcaagttatttctatatatggatttactacattaaaaaaccttccatacatacaaacacagacaccaaagtaaaagaataaaaggaaataataccagttcaataattcaattatttcctcagaacagtcaatgtaacttcaccatagtaatggaaaagacatctagagcttaagaaaaaatgtgatctaaattttatctcccaaggaaatccagtagttaaaagccagtcaatatgtctgtgttgataggatgaagaa

SEQ ID NO: 1882109 - DNA, 4001 bp, Homo sapiens; identical to SEQ ID NO: 318364

SEQ ID NO: 1882110 - DNA, 4001 bp, Homo sapiens; identical to SEQ ID NO: 318377

SEQ ID NO: 1882111 - DNA, 4001 bp, Homo sapiens; identical to SEQ ID NO: 318384

SEQ ID NO: 1882112 - DNA, 4001 bp, Homo sapiens
tagttggataaagttaacattaactcaattctgcttattttctggaagtattttaaactgtaaccaatagatatgatatttaaaatttactgtttttcaaatcttagaagctaatcatatttctaaacagttagtggataaattaagaaaagaacaacttatatttctagggaaaatgatttattttctaaaatttgcacttacttgagtagataaaaggactgactttcagagatcacaatcacagatttatgttttggtagaagtggtctgagaatactggtaaaaatatacagatgttagagtataacagaatgaataatcagtacgtcaataaacattctgagaatctgcaatttactggttgactgcactctccttgacaaaggtctttttttttttaagtggcagtatgacttgtcatttatttcaatgaaaatttaaatgtttcttacaaatcctctgaaaagtaaaactgatatttttacaaacagaagtatatgcaaacagtcacaatatgcattaggacactgacgctatttcttacatgccaagtagttcctccattctggagaacacctcttatctgaaagattttttttcttctactataaatttgaatctaagttatttttaaagagtcaaaaacagagcagaacatttttgaactgataaacaagaatataggctggactcagtggtgcacgcctgtaatcccagcactttgggaagccgaggcaggtggatcacgaggtcaggagttccagaccaacttgaccaagatggtgaaaccttgcctctactaaaaatacaaaaactagccaggcatggtggtgggcacctgtaatcccagctattcatgaggctgaggcaagaaattgcttgaacccgggaggcagaggtttcagtgagccgagatcgtgccattgcactccagcctgggcaacagagtgagactccatctcaaaaaaaaaaaaaaaaaaaggaatattatacatttgtattatagttccactccaaatacgatagctaaaagacaaatcaaccttctctttacagaacacaggctccaaacataaatttttgtcttatatgctttaggtttatgtatatataaaaccattcaccaaagacatgcttaatttttgagattaaggtgtaaattatgatgccttattttggtctagagtgtatgtaaggttagtatgttaagcattgttcaaaaatactagtaagtcataattatacagaattttcacaaagttaaatgcacagaaaaagcctatgattttggttactgatctatcttaacgctactttcttttaaaacagacatttaacataatacccaagttacagtaacattatgggcttctcctcccattggcaattaaatgcttttcttctgaaaagatgacatagaccaacaggtccatatcaaaaaaagaatcagacttgccagcaagattggtagactcttcccagcatacagctgagtgctgaaggaagaagaaagtttaaattgtttaaaggactataattatcacacaacatttattaagaaaaaagaagaatggatctagtataactaattctgagtaaaccaaaatgataagaactaattaaacacttcttaatcccacatttttggcaggtgtaattgagccatggtcttatttgattttgttatgattgcatccaaatttgcttaaactcagagttctgtttaatggtaggatgtaagaattgaattttgaaaaactactcactgtcaaaatctctccttcctacaggaaatttagctgagttttcttcatccccagtttctctcttttcttgtgttgattcggtatcctgaaccccattctcagctggaaaagctacagatccttctagtgcaagataaggttttataaccagattcagtgacagaccatgatttaagaaattatgttttttctttggtttttgtgacagcataatcccattgttctactaccctagcagttcctccctagacaatgaggccagtaccccttcctctacttcatataggctttcttttttactctatactgtaatcctgaatgctttcatgcatctcatggctttcattatcatttctattttgataagtcccaaaatgatatcttctgtttatattcaactttagaatgccagacctgtcatctctagttgcctatctcagaggcaccttaaattcaacctgttcaaaaatcatcttgtgccttaacccagattcactgcttctccaatgttccctgttccagtttatagcaacaccatcctcagtttctcattccaaaagcccaggagtaatgtgtaagtaatagattctggaaccaaaccaccctatggccgtacaactctgggcaagttatttattaaccctttgatttactttcctcatcaatgatgtttgagtataatagcacctacttcttatggttattgtgcaaattaaatctactaatacatgtgagaaacttaatgattagtacctagcaatgcattatgagtgttaactattgcttttcctcttatattttttaacttttatcttctttgcctcagacccacaatcagtgaatcgctaaattctcctatttttaactccaaaatatttttcaattctattctgtttgttttcaccatcttggccaagtccaccatcatgttctaattgcagatctactcatattgctgccttgcttatggcttcacagtattctcatggaaaaaaccccaaaagattcggtaatataaaatccttgctggccagcctggctttagaatacttcgtctttcagaatgtgtgtccaccacctcctcctctctaaggcttttactccacacaccttccagtctcactaaagaactaaggatgctcttctctcctaatgaagttgtgtttacttctcaggtctcaacttacatacaaatttttccagagaatttcctgaaacactcacctctctcacgagactaacttgctccaactactcacatagatagtataacatttatcattctaattaagtaataatgtgtagcttttttattcacatctgtctcaaaggtagggacagtgagagagaatcatgccattcaaatagaagttttattctcagcatccagcacatcaattcaccatagtagaagctcagtgagtatctgtccaattaatgaataaatgttgagcactgtaagctacccttatggataccatagtttaataaggaagcagagagttggcaaaaataaatttgagaagtatgataatggatacattaaaaagtgccttgttgtccactaggaggaaaggttttaatttaatctgagttgataaagaaggcctacataaggaagctttgtgatttcaggctgaggataacagtgagcaggagttggctctgtgaaggacctgaaatgtgaggaggacagactgagagaagatcacctgcaaactctctgaagcagacggtgtagtctgtgtagcactagaatgcagatgtccacttcacatgatggtgtgagtttgcacagggccatttccttggtgacctgtgtgtcctaaatccaaggggactctcccagaacattctgttgtgataaagattcttgggattttctgattcctgagatgggaagaacttagtcatgtaatggcaagttgagggctcaggatatgattcaattttaataaaaacaataacagcaataaagaaatgtgtcaatatttgctgtaagtttatagactaaaattcttagtttatacatatgcagccacaaatacacacacacacacacatgcacagaggcagttgtgaaaaaacacatacaaatatacaggattggatgaatgcgaaaggaaacttacttctctttttactttatacacttttaaatgtatacatttctctgttgtttgaaattattgtgtggcattcttttggcattacttatgtaatcaaaactct

SEQ ID NO: 1882113 - DNA, 4001 bp, Homo sapiens
agtattagttggataaaattaacattaactcaattctgcttatttcctggaagtattttaaactttaaccaatagatatgacttttaaaatttaccgtttttcaaatcttagaagctaattatatttctaaacagttagtggataaattaagaaaagaacaacttatatttctagggaaaattattttctaaaatttgcacttacttgagtagataaaaggactgactttcagagatcacaatcacagatttatgttttggtagaagtggtctgagaatactggtaaaaatatacagatgttagagtataacagaatgaataatcagtacgtcaataaacattctgagaatctgcagtttactggttgactgcactctccttgacaaaggtcttttttttttttttaagtgacagtatgacttgtcatttatttcaatgaaaatttaaatgtttcttacaaatcctctgaaaataaaaccgatatttttacaaacagaagtatatgcaaacagtcacaatatgcattaggacactgacgctatttcttacatgccaagtcgttcttccattctggagaacacctcttatctgaaagattttttttcttctactataaatttgaatctaagttatttttaaagagtcaaaaacagtgcagagcatttttgaactgataaacaagaatataggctggactcagtggtgcacgcctgtaatcccagcactttgggaagccaaggcaggtggatcacagggtcaggagttccagaccaacttgaccaagatggtgaaaccttgcctctactaaaaatacaaaaaccagccaggcatggtggtgggcacctgtaatcccagctattcatgaggctgaggcagggaattgcttgaacccgggaggcagaggtttcagtgagccgagatcgtgccattgcactccagcctgggcaacagagtgagactccatctcaaaaaaaaaaaaaaaaagaatattatacatttgtattatagttccactccaaatacgatagctaaaagacaaatcaaccttctctttacagaacacaggctccaaacataaatttttgtcttatatgttttaggtttatgtatatataaaaccattcaccaaagacatgcttaatttttgagattaaggtgtaaattatgatgccttattttggtctagagtgtatgtaaggttagtatgttaagcattgttcaaaaatactagtaagtcaaaattatacagcattttcacaaagttcaatgcacagaaaaagcctatgattttggttactgatctatcttaacgctactttcttttaaaacagacagttaacataatacccaagttacagtaacattatgggcttctcctcccattggcaattaaatgcttttcttctgaaaagatgatatggaccaacaggtccatatcaaaaaaagaatcagacttgccagcaacgttggtagactcttcccagcatacatctgagtgctgaaggaagaagaaagtttaaattgtttaaaggactataattatcacacaaaatttattaagaaaaaagaataatggatctagtataactaattctgagtaaaccaaaatgataagaactaattaaacacttcttaatcccacatttttggcaggtgtaattgagccatggtcgtatttgattttgttatgattgcatccaaatttgcttaaactcagagttatgtttaatggtaggatgtaagaactgaattttgaaaaactactcactgtcaaaatctctccttcctataggaaatttagctgagttttcttcatccccagtttctctcttttctagtgttgattcggtatcctgaaccccattctcagctggaaaagctacagatccttctagtgcaagataaggttttataaccagattcagtgacagaccatgatttaagaaattatgttttttctttgttttttgtgacagcataatcccattgttctactaccctagcagttcctccctagacaatgaggccaataccccttcctctacttcatataggctttctttttttactctatactgtaatcctgaatgctttcatgcatctcatggctttcattatcatttctactttgataagtcccaaaatgatatcttctgtttatattcaactttagaatgccagacctgtcatctctagctgcctatctcagaggcaccttaaattcaacctgttcaaagatcatcttgtgccttaacccagattcactgcttctccaatgttccctgttccagtttatagcaacaccatcctcagtttctcattccaaaagcccaggagtaatgtgtaagtaatagattctggaaccaaaccaccctatggccgtacaactttgggcaagttatttattaaccctttgatttactttcctcatcgatgatgtttgagtaataatagcacctacttcttatggttattgtgcaaattaaatctactaatacatgtgagaaacttaatgattagtacctagcaagtgcattatgagtgttaactattgcttttcctcttatattttttaacttttatcttctttgcctcagacccacaatcagtgaatcgataaattctcctatttttaactccaaaatatttttcaattctattctgtttgttttcaccatcttggccaagtccaccatcatgttctaattgcagatctactcatattgctgccttgcttatggcttcacagtattctcatggaaaaaaacccaaaagattcggtaatataaaatccttgctggccagcctggctttagaatacttcttctttcagaatgtgtttccaccacctcctcctctctaaggcttctactccacacaccttccagtctcactaaagaactaaggatgctcttctctcctaatgaagttgtgtttacttctcaggtctcaacttacatacaaatttttccagagaatttcctgaaacactcacctctctcactagactaacttgctccaactactcacatagatagtataacacttatcattctaattaagtaataatgtgtggcttttttattcacatctgtctcaaaggtagggacagtgagagagaatcatgccattcaaatagaagttttattctcagcatccagcacatcaattcaccatagtagaagctcagtgagtatctgtccaattaatgaataaatgttgagcactgtaagctacgcttatggataccatagtttagtaaggaagcagagagttggcaaaaataaatttgagaagtatgataatggatacattaaaaagtgccttgttgtccactgggaggaaaggttttaatttaatctgagttgataaagaaggcctacataaggaagctttgtgatttcaggctgaggataacagtgaacaggagttggctctgtgaaggacctgaaatgtgaggaggacagactgagagaagatcacctgcaaactctctgaagcagatggtgtagtctgtgtagcactagaatgcagatgtccacttcacatgatggtgtgagtttgcacagggccatttccttggtgacctgtgtgtcctaaatccaaggggactctcccagaacattctgttgtgataaagattcttgggattttctgattcctgagatgggaagaacttagttcatgtaatggcaagttgggggctcaggatatgattcaattttaataaaaacaataacagcaataaataaatgtgtcaatatttgctgtaagtttatagactaaaattcttagtttatacatatgcagccacaaatacacatacacacatgcacagaggcagttgtgaaaaaacacatacaaatatacaggattggatgaatgcgaaaggaaacttacttctctttttactttatacacttttaaatgtatacatttctctgttgtttgaaattattgtgtggcattcttttggcattacttatgtaatcaaaactct

SEQ ID NO: 1882114 - DNA, 4001 bp, Homo sapiens
tccccactcatgacgagtccctagcactcagcccctggcacccacagccccggcgcgctccgtcacctggtagggagcagcctgggctgccgtgagtgaggtgttctcactctggttccgtgtttgtgtttagcctgtgcaattctcgtcaacacagaacacctgcctgcccacccccggtgctgaagaccgaccagtcaaggaggtgttggtgggagtgttgtgttcaccatgtggagatcaggcggcgattaccgcatcttctttgctgactttggtaaccgggtgtccagggaggagcgatcgggagtggccaagcagttgcctggactcagcttctgactctgcagctgggagtcagatgcaggcccaagggtccaggggagttgttcagcgcctggaatcgccatgcattgcgcggtggaccgcacgacgctcctgctctgttctcccaggcacagacaggcacttggaaggcagctttgctcctctggccacccggaaacctcccagcagttcagatgggacaaactgggggcctgtcagaacagccacttgtgccgggaaggccaggccccggcctgctccgatgaacgtcaggacggtggctgcagcagggaaccagggctggccttggatctgtccagtagggtcactgactgggcagggcttgctgcatagaggatggctgcattttgtgctcagagttggttgaaatggctacgaagtgtggagaataaccactgaatcccaaaaagtcactgcgcttgatctgatccaagtaacagtgactgcagttagggtcgagagcttctccgaagcagcggtcatgcaggcttttgtgtggctgacgcttccctttttcacaacagtaaaaagctatcaatgggaaattgtggacttttcccaccagggactcaatggggactcaatgtgcaatattcagtcaacataaaactctttaagaactcctcctgactggtgactgtcaacacttgatctgaaacgtgaatagtttaattttcctgagcaaggagctgcgagtctagctttagaaaagcccctaggagtgtccacctccaccacttccaccgtgcaggcaggtttcaggtgggttggaccctgtgggacttgccgtctgagggatggatggactccgagcaccctccccggctcagcacccgcggcctccgcccactcaatggactgtgcctcccagagcttgggctggatggtctccctgcagaggaccaggagctctgtccaaggcctcgccctgggacgctggaaggggtgggaagggtcaggggtccggggtctaggacaggctcaggggtctcagcaggttctccttggagggcctgagcctggtaggggggcggtgccctgggcccctccatgccccctggtttgttaagggggacagagcagctgctgggccccaccatccacttaaggactggccgtgattcttggcaagctccgcccgccaggccacctctcacccagccagggcaccccgggcgacctccgcgccaggtgcgacagctcaggccggagacctcgtctgtggggacgggccgtgtccggggccgccaccctgagaccgggcgcgggcaggacggaacctgggggggaaacggggcaggtactggctttaggagtctaaatccccaaacgctgagcagacggaagacgttcctgccactttacctgcagttcaaagacctggcgagggcctggaaacggcgctcggcccaggccgcttgcgggcgctgggcctgcagccgctgcaggtcgggccctgagtcctggcgctcgggaggtccctgagtcggtccccgagtcagtccccgggcgcggggctcggttgggggggcccggaaccttgggctggtttcacgcaaatccgtttggggcgagcctcggtttcccggcagcggtgggaaagggcgcgagcggccagccatggcgcgcggacccttcccgccggcggcgtcacagcggcgtctcctcctgctccagcgcgtgcggcggtgcgtggcacgagggcggcagcgacgccagcttcagcagcgcggggcggcggcgcgcgcgaggccgctggaacgagcgccggctgtgcacgcggcgcgccgccgccgaacgcgcgtgcgcactcggcagccctcggcgctccggccccgcccccggcgcaggccccgcccccggctcgccctcgggcggctctgcgggcgcaggcgcggcactctcggagttctgcgcaggcgctggcgtgggcgaggcggggctcggggctcgcggtcgctgtagccgcgcggggatctggggtttctctgggacagcggcggcggcggtgggcggaccgtggcgcggggacgagcggccggttagcggcgtgtcggagccggtgtcacctgcgggagaggaaggcgtgagcggcgcgcggagcccgggcgctggggcgggaggggcgtccccgggggcctcagctgtccccgagcccggcggctctcgcctcccctcccgcggcgcaccccaggctcggcgtccgctggggcctcctcccaggacccgggttcgcggggcagaggcggaagcagcaacagcgaagccccagcccggccccgccacgtccccccgccgggggtcccgggacagcggcctcctcggcgcaggaaggtcccgccccaggccctgcagcgcgggaggtcaaggtccccaaggggacctgcttcctccatctcaaaccgccctggcgtcccccgggtgcctcccaggcccccagagggagctcagaaagcccagaccccacggcccgcccctctccctgctctgagctggaggcagagtccgggtctgcggggccggccctccctgtatccctgtgagagggtcggggacccggggcgtctgtctggcttcccccagccctgctctcagctccctgggagcgcaggatttggactcgcggactagctttcggagccacctaaaggaaatctcaggcggccctagtgccctcagctccgtgggagcagcagagacgccagagtatctctgtccgggctcctgagggaggtgcggccagcagggcgctagaggaggaagaggggctgctggagagagagagcgcgccaggttcaggtccagggaggagagagagcgagcgcgcgaggcggagacctggagggagaggagctgcggagaggggttaggcggggagggagagagagaaccaggttccggtccagggaggagagagacagcgcgcgcgaggcggagacctggaggagaggagctgcggagaggggttaggcggggagagagagagagcgagccaggttcaggtccagggaggagagagacagcgcgcgcgaggcggagacctggagggagaggagctgcggagaggggttaggcggggagggagagagagaaccaggttcaggtccagggaggagagagacagcgcgcgcgaggcggagacctggaggagaggagctgcggagaggggttaggcggggagagagagagagcgagccaggttcaggtccagggaggagagagacagcgcgcgcgaggcggagacctggagggagaggagctgcggagaggggttaggcggggagggagagagccaggttcaggtccagggaggagagagacagcgcgcgcgaggcggagacctggagggagaggagctgcggagaggggttaggcggggagagagagagcgagccaggttcaggtccagggaggagagagacagcgcgcgcgaggcggagacctggagggagaggagctgcggagaggggttaggcggggagggagagagacagcgcgcgcgaggcggagacctggagggagaggagctgcggagaggggttaggcggcgggaggcccgggagcgttacatgtgtgtggactcggggagggcggcggggggccgctcctcggggccgtctgcctgcaggaaggagtccacggacttgctgctg

SEQ ID NO: 1882115 - DNA, 4001 bp, Homo sapiens; identical to SEQ ID NO: 318402

SEQ ID NO: 1882116 - DNA, 4001 bp, Homo sapiens
aagacacacagggctttcctgcacttcgtttaaggaaaatattccacataattcttactgcgttagaggaataaagtacatttgtcatagtatacattatcatattcccttaaagcagggactatttaaagtttttaaattaaaaaatgtccaggcttacttctgtctgtacattcaggaataatcatatcactggttacatacaattctcatgcaaagaaaaccctcaaaaaacaaaaaaaaaccctcggttgttttcttaagtctaattaagccaaactaataatagcaatttaattagcaatctgtaaatcgagaggcatagaaattcagcagttaaactgtatttcctgcctatagtactgctgctactcaatctattttcttcatgtattagaagaattcataggcattgatggtcaaaataagaatttccacacagcagcaaatgacagaagagtgacagaaagagttcctaatgtcgtgacaatcttaatgatcctttaaaaggtaaaagattgtgtgtgtatgtgtggaaaggagtaggaaataaaagcaggaggttaagacaggtatttaaagggaatggcgagatagctacattagaatatttattttttaaaaaactgctctgaagtctgcccagtgtaccaaaaacattaaaaaacaaaaacaaacaaaccccctgccaaaaaacagagcagacattggtgaaagtttaacctgataatttatttgtggggaaaaaagctagttttgatgagaaaaagttcagtcctttccttgtaaacacaaagaaactcaacaggaattttaaaggtagtaggtcagaaaatgcaacagtaactcttacaattcttttcaattaaacagacaaatcaagttgaagagaagtgttaaaatacgattcagcttgaatatttataagtctatatatcctgttgttcaactggcttttgatttttaaaaaaacaaatcaacaaactttgtaagagctaccacatttcgagtgatgaaaataaattagttcccccccaaagatattgcttaacttctaaagcataaaaagctctataatatcttatacaaattaaccagtgttcttatgaaagtaatgcagttttggactgatgatattacactgtatttgtggtaaagtactaggcataagaatatatatatcaattaggcattttcagtctaattagtctctaagtttatcatttaattcttggcaatatataataactggtatgcattttggtacttaagtcatgaattgtggagaacaagaagcaatgtattatagtcacagggtttatatctaacaaacaattgcagtgttgaacaaatctcttctatgaacttcgtaatttgttttgctgttggtcacttggagtagatccttgatttgattcttccgtattcatgctttctccatctgcagtctctaacatttcttcatcttcatcatcatcatgtaggtcttttgaaattaattgtctggctagtttgatattgagtccttcattgtagtgaagcttccttctcatttcaaattgtcgctttttttctcgttcttcaggtgagaggtcactatcctcctctccactgctttcttgttcctgaatccggtactttggctccaagccttcagcagcagctaatttcttggctaggatgtctggcgccatggcttcagtggtctcggtgtccctacacgcatcttcatcatcacccatcatactatggtaaggagggcttggttcatctattttcattaaaccatagcctttgtctgctggatgataggtcgccaagatgttaatttcatcccacttctgggattttttgctcagctcctcgtcgacactcctgcggggctgttcggccgacgccaccatagaggaagtcgtagaggtcttgttcttcaagatccccttgatgggccggtgggaggccgtcgaggccgccattgccgggcgctccggctgtcgcctcagggtcgctgcttggcgtggggtccgcgaagagaagggtcggcacagcagagactcgcaggcagccgcagagcccgctcagggctaaagcggccgcacctgctgcctcggaaacggctactggagcggttgtcacaacgaccccgacgccagagccaacgccgaatgggtggcggctcctcgcgcaccattagccgccggcacttgacccgcggctcgcggagagatgccggcctagagctccgcggggagtggtgggtggggggtggtgggtgtggtgggggtggggggggtggagcaaatccgacgccctttttcatagttcttttgtactgtggacaccatgaggcttacaaaaaaaaacatctttatagatgtaacaagttgtaaagagatgaaaacttacagagcacgaaaacacaatagaaacaaactttatccccccaccacattttgactttatattgtctcaattaatatatttttatattgcctaactcttgacgattactgtagctattaaagtttttgatttgtcttttaggctttatactagagttataagtgggtttcacaccacctttacaagtattagggcattctggatttttctgtgtacttacagtgggttttatacctcaaatgttttctttttgcatggtggtggcggtggtgatggtggtttttcttatcgaagaattcccgatgtggcacggtggctcatacctgtaatcccagcactttgggaggctgaggtggtcagatcacttgaggtcaagagtttgagaccagcctggccaacatggtgaaacctcgtctctattaaaatacaaaaattagctaggcatggtggtgcgtgtctgtaatctcagctacttgggaggctgaggcaggagaattacttgaacctggaaggtggaggttgcagtgagctgagatcatgccattgcactccaacctgggtgacagactgagtctctgtctcaaaagaaaaaaaaaaaagaattccgtttagcattttttataggatgggtttggtgttgaattctctctgcttttgttcgtctgagaaagactttatccctcctgtttgaatgatagctttgctggatacagtagtctttgatggcagttactttctttcagcactttcaaaatgtcatcctactcccttctggcctgtgtggtttctgttgagaagtttgttgccagatgaattggagcttctttatatgtcatttgctgcttttctcttgttgcttttaggagtatctctttgtccttgacttgagaatttgattattatatcctttaaagtactcttatttgggttgaatctgtttggtgttctctgaccttcctgtacctaggtatttttctttctcatgttttggagagttttctcttattatttctttgaataagttttctaccccttgtttttgctcagttcccacttgaacatccataattcttgatttttgtctttttaggcaatttttctctatatttttgttcctttcattcttttttcctttttctcttgactccatatttttgttattgttgttgttgtgttttgttttgtttttggtggagacagagtctcactctgtaacccagggtggagtgtactggtgcaatcttggctcaccacaacctccgcctcctgggttcaagagattcctgtggcttagcctcctgagtaactgggactataggcatgcatcaccacacctggctaattttttgtatttttagtagagattgggttttgccatgttgcccaggctggcctcgaactcctgacctcaggcaatccacccacctcagcctcccaaaggtgatgctgtattttgtttttcttttccttttcttttatttatttatttatttatttatttatttatttatttttgagacaggttctcactctgttacccaggctggagtacagtggagtgatctggacttattgctacctcttcctcccaggctcaa

SEQ ID NO: 1882117 - DNA, 4001 bp, Homo sapiens; identical to SEQ ID NO: 318410

SEQ ID NO: 1882118 - DNA, 4001 bp, Homo sapiens
gatttgattaaatattacagaaatgttagcatccaagaataataattttaaattaatacaccttgcaacattgtcctaaagcatttccacatacattttctcgcatggatattacaatgtgataatgcaacactttgtatgagtggctaaggataaaaggcctacaggtagaaaatgaaagcaaaaatgcaaaagttttggcactgggggaaaaaaatgcctctactctctattcacacacaaaaggcagaatgagattccacctgctgactttcccttcctgcccgcacagcactagtgcttatgtcagaacaagctgggagagagggagagacgacaatttcacctcttggcaaagctcagcttgctgaacccttttgctttctgctggctgttgattcagcagaaactactgctgcagaattcataatggtgatttttaaaggccccaccgatcgcgttgctcaccccacgtgtcagcctcattcgctgcccgccagagcactatttccccagccacctttttatttttgctaatgcacttccaaaaggaaagaggttcgcccgtctgcaaagggctttttggggttttgattgtctaagcaggtaacctggccggccggggagatgaatgggcaggaaatgaaaccttgccctccctgcagccactgagagacataacatcgtttcgctcagggaggggggaccaaggtcctactgggcccctcccttcttatctccccccaagacccctgcgaacatctcggggaaggggtcatctgccttcctggggtcatctttctgggcgagagccccaccctgaaaaagcctaatccctgagggccattttaactcccgtgggcgccgggtccacctgctgctgaacgccgagctcgcctcgcggagcccggatggatgcgaggtgcactggggctgccggggccagccgagcccccgccccagccctagggcccggaggagtctccgccactacgcgcccagctgcccaggaagcacagtgatccgcaacttgcgcccggccccaacggcggaatgcggcggggctggcgttaccttcggtcgcatagctgtggtcgcgcaggaaactgttgttgattttgcgggtatcaatgtcctcctccattgacagcaggcttacttgcgtgggaaccagaagccggcagacaagtatccatgatccctccccgcagccagtctcacaggagaggggggcaggggagccagtgggactgcaccatggtccgagcctgaggaggagacggggaggcggagagaaaaaaaataaaaacccggcaatggagctgtcacctcctccactcgggttctgcgaggctgcggcggctcctcccgcgcggtgcgctcactccagctccagttcccagcgaggatgctgcgcctgcctccgctgcctccgggtgccaagatacgccgtgccccgaggggtctggtcccgcccgcccgccccggaggcgctcacaagcgggtctggggagatgcccaacaggttcccctccttggcagccgctccaaaatgcaaaaaagatccctcctccccctgggagagcgggcagccgcgacaaaatggtgcctttctggacccgagctgcagtggcgagatggcagggacaggattcaggcttgcctggccggaatgagggtgctggtcccacgggagggcggctccggcaggcgggggtagggaagctggcggggagctgggcagggcgctgcagccggcgccagcgcactcaccctcacacccacacgcgcgcactcgcagctgctgctgctgctgctgctgctgctgctgcaggaggctggaggcggctggtgcattaaaggcgaggctcctcccaaccgcgtcagcagccccacgactctttcccagcagcagtggtggccgaggcagaggctgcggctgctctttgctgcagtggggcgcatgcagccgcgaatcggcacctgggcagcaagcgactagcttgcaggttcaggtggaacgcatagacgcgctcttccaacctcctcccctctcgcgccactcagctaagggccacgtctacgctagcacccagagcccctagctccctgcctttctccggacgcctgaacttgagaacagcaaagagaagtaggttcctttggatagtcaggaagtctacatccaggtcccttttcctcacccttatatgatgcatgtggtcccttggtgaatttaaagggcgaggtttggggctcgaagcttcagaaaaagaggagaaagtgggaagtgccgctcagagcctatcttaagccctctagtaggaataggagggggatcaggggccagaactttgcaactggttcccccattcctaagagtcaaaataccttctaactgtaggaggctggtgttcaataaagcatctgtgtctacacaggtggaggaaagcaccagactagtaaacaggatcagtctgaaaaagtccactctcccttgcagtttgcacttcgttttggacaaattattgcagcctctccgttaggttttgcttgtgcaggaacaccttctatttgctgtcagcatggaaggtacattgaagcacagaaacataagcataagagccctgtgcccacagagagccactgctaccctgggggaatttcaggagtccaattaatacagaaaagagacctgtcttcctacttcaactaggaagaaaatgtagaattccctccccacccatgttttcccaaatttcaaactctacttttgaaagaaaatgagattactattgttatgaaacaaccaaaaacatttaatgaagcaacccaaatcactagaaagccaatttggaaaagacatcaaccccaatcagtagaaagccaattggaaacgacatttcctaggtttcatcttgtagaaggtattcatttcaatgggtaccactgtagggagagacatcagcaaatgttttgctcagttaagctccacaagtttagctagatgggcccagagggacctatgagttaattatatacatacaatgcttcggctaacacaatttagaaagtatttgaagttcagaaaaatggaaaaacaagtccttaactgaggttgggaattgtcattagatttccatgcagtatggatacttctggtagatagaaaatgacatcttcctcatctccagaaattgactgcatatccctgggagaaaagagcagaaatgttccttgacatagttattttgtgtgtgtgtgtgtgtgtgtgtgtgtgtgtgtgtgtgtgtgtgtggtggggggagttcagttcaactttcaatagattctattttattttcatctagtgcttaagacttatacacttgtttgttcaaaatccacatttaaaattttagtaacaggtgaagacgggtacaagttgatttaatccacttcagtacaagttgtcgtggctggttcttccatgggatgagctgtatctatcaccgaggttccaacattcagtccttttgtagttacacattgcagcttctcttggatattggcacaatttggagtaggagcagagtggggaaaagctaagttcatctcttagtgaatcaaaatgatgagaagacattgtgccttcggttggaatgatcttaaaattgtttcaggaggccttggaatagtatttgggaaaatttcccctgtatctttctgaatcaagggctagattgggacagagctgtgtgatgaatcaggtaggcccaggctcattggccaggctgtgcttgaggaattttccattgtaaccaatggggagaatgtcccttccacagatcgagtctctgggtttatttatttttcttttcacatatgctgcaaactttctcctgcatttattcaacagtccaggcatttttcctaagacacatgttctgagaaggcagattggataggtctccattgtttaagtagatttcaaggtttccatttggccaactactcttttc

SEQ ID NO: 1882119 - DNA, 4001 bp, Homo sapiens
cattttataaataaggatcttcatttatatagaggttcaaagttatgcccaagggcacacaattaatggtagagttggttctagaacctaattgacttggtcccttcacattttttataaataaggtgggttacaaataaataaatatgtatcttctgcctcccagttaatattctaataccacagtggctggcaaaatcaacctcttcaattctttagttcaatcttatttcataatctatctgtagcaagatctgaggtgaagcaatgtgagcagtctaatgaacttagaaatgatacattttgctttcctcaccttttactgagtcctgttgttttatttgctactcaaggatgcgaagtatctgtttaacagtaaagtgccaagcaatctgacatctcctcctgattaaaacagagtcatctcaaatacagatggatacatgtcattatgcaagctatctgcttttcagagctgctgcctcaaacttcctgcagtaagatgccccctcacactccctgcagtcccccatccctggcactggctttccttgaaaacatataatcttgtctacctgcatttttgtatgtttaggctcaagcaaagaatccattatgaaaatgacagaactgccagaaagaattatgacttcactgcttaacaagctgtgaattcactgtggaggtagcaaggcagagaagcaaagaaacaggaggaagaatatatatgaagggaaactcgccttgggctctgcactactgcaagttgagaatggttttcccagcctttcaggatttccatgtttgctccaccacaaactacctaagtttctttccatagtatggggcaggatttttgccttttacctaaagttggtaatacttagaatgatgaagttgatgataatggcagcttgcatttattgagaggtaaataggtactaatagtaggctaagcatttgtgaatattattttattcaatattcacaacttctctatatagccctctcatttaaatcctttaaggacttcccattgcctttaggataaagtccaaatgttttaacatagtttatgagactctctgagattccacaaacttttgcctctctctcaacctcatctaataccactctgcccctttctggatgggtctggtctcatctatacttttggttcttcctgtgtttatactttgtcttgccaataggcctttaaatatattcccttgtaaccacatttctcccactagtcacctgattatctcatacctccctttaagaccttactattttttttcctgaagaggctatctccagttttccctgttgtttgcttccaaggttaaaaaagaggaaaaactcttttgtaactcaatacttgaaatgactatttaaattgcaccttttctgctagatttaacctctacgaaggctgacaccgtgtctactaattcacagttgtttcactagcctctagctgaatgcctgacacgagtagactttgaataaataattagaaatcaattatatgcaaaacctatatatgaaagttcccatttcctagatgaggaaacaggttaagaggagttaaataacttgcccaaagacataattagcatatggtgaagccaagctttgaatcaaagactgatgtcaaaacccatgttcacaattactctacagcactgtcttctcaaaattccctccagctatcacaggaaaaataaagaatatttctacaggatatttgtcttagagaaaaatttagtagaaaaagctcccaggattcagggaggtgatctttttcccaactaatttcagagctacataaaagaagctcagtgatttaatatctttctgcaccctgggcctgatggtttacctccccaaaatctggtttctgtttctcaactataggtggtagtggataacaggcaacctatagctacagctgttagtccttcccacagatcaacatgcaaaagagaaagtgagtttctcacattctgagagagatgttgcccaggcaacaaagacaaagccagagcaacagaccacccagctgagacaggctctgtcttccgcacattctcccataccagcgcccacttctgtggggcagcagatgactatgttcatacacccttttaatggggtgcccctgaaggactcacctgccacaactggacacagttggcaaagacatctccatggacagcccaaacaatagctccagattcttgctatgtagttgagtgtttaatgtttaatctgtagactatgccagaatagcaactttacaggtgaaaagctcagtagtttcaattttgtgacttgtaataagaaaaatagttgggcactgaattaaacgtttatttagaaaattaattaaaccagtttgcgtatcatggcagccactgatatagctctgcctcttaatagttgtgtaacttttgataagttacttaatatcttaatcatgaatttgctcatctaaaaaatgggcttacaaatataagtaattaccaaagatatctttgtgagaagtgagaaaacaaaggtaaactgcataatatgtggcacataatcaggccgtacatgaaggttatagtaattattacaaataatccctacattataggaattatttgggtttctgaaaaggtggctgggcagaaaagatgaacaatctcttcctttgagtctatttgctagtttaaatttagtggcaaaagcaagttgcatcatagttgctcccgtaataactagtgacatgggctctacaccctgcctggcacaggctgtctttgctgtgtgctataaagcccttaccaggcccaatacagtgagaggcacacagtgggtgctcaagaaatgcttgttgaggctgtcaaccatgggccgtgcaggcagtttaaagcacagtaggcatctggatctttaaaggaaattgtaccgttctaagagtcattaaatgagttcttcagggagggcagtaacaatatgccacctgattgctttgttcagaagtgctttccgactgagttaacctactaaagatgctgttctttgctacataacttcatgactgccagtccctgctaggaagtggcttttcatgatggcttgctggtacgtgtgtacatggaaggaagaggctggctacgggggagagagccccagagcagaatgaagctcctgccaacctgttccagcacactgctccagcacactgttgtgtccttttatgctgtgtgtgtgtgtgtttgttttgtaggggagtgggtgggtacgtctgcagtatcccctacgtttgaaaaacaggtctgaatctcatagaattctgttagaaaatcattcctcaagcataacttaattttctgaaagtattttatcctttgaccaccaaaacctctttggagagaattaaaatggaaaaatgtgttaagtaagtacatctctaaattaaaccatttctgcctgggcagaccaaattagtcttttctagggtgcagggtacagtatgttgtctctggtctttgttcttcagtaaaagacttcagagggaaaaactattctagagtgaataacctccaaatgttaattttgcaaaactaatactagtgactcattaatatttgtaaatcatctagattttgctattttgaaaaaccccataaagtgctaattaataaaagatatcatgtcttattaatgttcacatagtaattaccaaaatcacaaattcatctgctaagtagtcagcaaacaagacaaatgactgtgctcagctgaacagattatcaaatgcctttgggagtacaacctgatagccccaactaaaccatgaatcaagcagctactccttttgccacatggacaggcaacaacaatttcatctctcatgtgaggtgggacagagcagtggagacatccagcaactcgcattccctagagcacacgtgcttatgcaagtgtcagcattgctcgtgtatctt

SEQ ID NO: 1882120 - DNA, 4001 bp, Homo sapiens; identical to SEQ ID NO: 318421

SEQ ID NO: 1882121 - DNA, 4001 bp, Homo sapiens
cccggattcaagcgattctccacaggcgtgcagatttttttttttttttggtagagacggggtacagctcaaacctatttgtttgggagttctgtcacttcaaccccaaatgttccagctaatatggtggtggaggggtttttggcaaatcatcttaagtgcagtagagaagttggacgaaaaacagcccagttaagaggccgatggacagccaacttcagagtggcctctgcaagcttggacctcggggtagacagtggggcgctctctaggggtcatctgttccctgctggggtaggggggaggcatgtccacggaggccagggctgtgggttcggcactaggtcctcctccccgtggcttcctagtaggcatgtggtggtgtacgcctgctgggcacctagcgagaggggtcgtgagttgggagggagccacgttggggtgcctgcctgctcgggggcccctgcccactgcgtgtgcgcagcgcctgtcaggatgtgacggggacctggacatgtgtgtgctctccgagctgagctgtgtgcgcgtccgggttctcgacctcagctgcctggctgtgcatccagcgtgcacgaccggtgtggcctgggctccagcctggagtgtggaccgggtcggccggcgtgtgcctcccctgtgagggtgccctggcgggtgtgagcccggcgggctggagaaccgggtctcggcgccgcaggtgggtgaccgtcctccccctccttccctccgggggcagcctcctcgcggcgtgtggctgggggtgcggggccctctgccggctgccgcgcgcgcgcacgccgggctcagcacccgccgtgtacgcgcccgtgcgcgcgccccgcgcctccagcccagcgctcggagccgctttcgctgccactgtctgctcccccgggccgccgccgcctccccccgcaggcccggggctctgtccgctgggcccgcgctgctcgccccgagccaggagaacgagctcgaggaggatgcctgggcccgtgagtaccgcggcggctgcgggccgggcgggcacggagcgcgggcggaagatggtcccaggactgagcccttccccgcgggcggctcagcgccctggccccgggtcgccgccccggtcccccgcccgggccgcgagcagcccctcccccagtccacaccggagggagggagagcgccagtgagcgagggagccggaacggggcgcgagccgccaccagttcgcttggaaacggttgccacagcaacggggttgcgctccccggcaacacgactgcggggcggcgacgccccctccccctccctcccccctcccccgacgcgggcccacagcccgggggtgcagggggagaggggtgcgcggcgggggcatgtcgcccctctggcccggctgggtgtgcctgcctccacagcccgtcgagggtgggggtgggggcgaacggccgtgggcacgagctggctcccacgtggctgcagtcgtcgcagcagggctcctggggtggctgcaaacgtgggggcggcccagcccctgggcttgtcacgggaggaggaggcatggaggctggcgctggggtctttgcccatagaccccccacccacccacccaccgccgccaccacctaatcgcgccggccctggacatggcctgagccgagctgggttccccaggggcgacgtttcttaccagggtagaggagcgaagcttgcatccctcctcctcctcacggccgaggcacgtgccaaaccgggcatgggcccgcggtgagtctctgctccgtgttcctagccaccattctccagggaggggtggaagcagagtgggcaggagcagaggaaaggatattgctgacccagggaagctgaagcccaggccaaatgggagcgacccagcccattgtctggatcacaagtgcccctttcttgtctgagcacaatgccccaactgtactgagtagcatgcaggttggccggcagggaggcacgcgccacatggaggtgcctggtccgccaggggagctcctctgggaggagaatggcctctgactcagaggaaatgacctctggctcccctcccaacctcccctcagcgggcatcatgctggagagagaaatggccctcctgccagctctcccaggcctgactcagcagatgccagccccgaccgcgggcttcagatccaggatcccagcgaccacaaccgtccttgggtttcctttcccatccggggaggcatcctagaggtgactggcatctggggcattggaggccttggcataagatgcccttagatgggtggtgccctggaggtcaggcctgagtctcctgcaggcaggggcgcctggggaattactcacgggtgcctttcattcccttcctgctctgtgagacctgtgttgagtgctctgcatccattatctcctaatttttttttacaacagttgcgcaaggtaagtttattatccccattttagagatgaagactctaaagggaggctcagggaggtgagtgacttgcccaaggtcacactaccagtaagtggcagagctgagtctacactgcaggcttctctgggggcaaagctcctctctgcctgctagctaacttctcttgtaacccaggagaagaactgtagagccttcttccttcactttcctccagtgaggacattccctgtctttcgggtcttggtacatttttccttcttccagctaaatcagccacattcttgctcccccagatgcattataggatggggccagctttctccctcccttcttcacttcctccctccctccattttctccggtgagaccaagcagcaaagggctgcctcagtcccctgggaaaaccccaagccctggtcctcggctcatgggctccatggcctgctcagcttgcagtcttggctgtgggagagaaaatttagcaaagatgggtccatgcactgctgcagcctgtgggtgctcagtctagctccaggcattggaaacccacatgcttccaaggatcaggggggaaatggaatgagtgaggcgggccagggagccgctcagctccaatctttgtcactgtgtgaaatgtggacttggtatgacctgactgtccaattttcaagatgaaccagaaatccagacctttatataaaatctcctggatttttaaatgttggcaattaatcagaatgtttttaaaaatggattgtgaacatggattgtttttaaaacatgtctgagaactgtgtccaacctaagggtcctgtgtctgagacctctggtccgtgggaaagggaccgcaggttttgctgggccgcctccaggctgtgtacactgtgacaccaggggctgctttctgcatttgagcctcttgaggctgcagggtgatccctcatcagagggagttctgttgtcccctcggcaccctggtcctactgctgaagaaactccagctcaggtatgggagtagccaggatgggatcacatggctcggtgagggcagaagccagatttgagctcaggcctacccctcggcactctgcatgttacccaggctgccccccacagggtgtcaccatcacgcccgtggggccgcctcccctgggaggtcagatcattatttccatgccagctgcggggatgaaggcacagagagccacaggctgaggtttcagaggaggaacctggtctctgaaaaccctgccctgaggagggccggagctgagcgcagtagacactggcctgagggagggctctccacctacaagcccaccgaggcctcagtctctgtggtcttatttgtagtttcccaagccctgggttcctggcttggtgtcagggttaggtcatctacctgcaagcaagggtgcttgccactcagtaccctggcctaggcggagggcggttctggccagctccaagcctggctgactgggagtggagacaagtcctgtcaagtcctctctggcctcagttcctctgtgttgatgtg

SEQ ID NO: 1882122 - DNA, 4001 bp, Homo sapiens; identical to SEQ ID NO: 318435

SEQ ID NO: 1882123 - DNA, 4001 bp, Homo sapiens
agtcttgtcctgcaagttatctctcctctccttggagttcctgagaaatgggaaatcaattaatgccttattaaaaatgagcctaatgcccataaccaaatgtcatatagtaggatcaacatcagtgattaagaccgaaaacttaggcaagacttcccagatttttaaggcctgtattcaaagtacatttataactacattctcagcagccacctaaagaaaggaaaagaaacaaagggttctaatagattacagcctattttctctaaaaatacagtgtggcaacaaaataaagagtaggataaaaaaaaggataatgtatctgatctaccttgaagaaacagttctgccttaatttagtcatcctgcatgtcagagaggaatgtaaattaagaaatactatatagatttatgcttagtaataatagcaccctagccaactagtcacatgtccaaattaatgttcttgaactttgaattatcagattcacacttccttcttttggcaaaagagaaaacaggtgagcaaagacagaccttcaggaaataaagatctggaaaaacttctattatatatatcagttgatatatcaactgtaaaacagaggaaaacattatgttgaatataatgatcaacttagaattttacataatacctattgtattagaccattcttgcaatgctataaagaaatactaagactgggcaatttataaagaacagaagtttatttggcttacagttctgcaggctgtacagaaaacgtaggtgtatctgcttctggggaggcctcaggaagcttacactcatggcagaatgtaaagggagaggaggtacatcaacatagtgaaagcaggaacaagagagggaggaggtgtcccacacttttttttttcaaatacattagattttaatatttaatatctaatactattgcttttggatatattttccctgaactaagaatacaatgctaattgcataaaaagatacacatataaaaagtagttctctgttttcccaggaaaaaatccaagcataatttctagaatagtcaagtttcttgttttaattgtaattaaagtcttgatcatcttatttattagctgtgtgacttacatgtttaaattaaagaaatgttgttaaacaactgttgcaatttataaatgtaaggtgccattattcagtaaacagactcctccatgagtggatgtgttccttctcctaccaactattgaaaagcagcactatacattagtttaattttattagtagatgatacactgctgcaaatgctaattctcttctccatccccatgttgattttgtgtgtacctgtgagttgtttagaatgcatcaacaatgtctttaacaatcaacattaagatgagctaggcttgggctttcaatgaagattgaccaatggtttcgatgaagtcagaccatcactctctgagtcaagtgatctgacctatccctggtagtaagaactcttggaacccccttttcaaatgctactgccacatttgtggcatcttttgcacttgtttcaaattaaggatagtcgctgccgtccctgcaccaggcttgggcttcttctgcagacacctgctgttcactgtcagtcttgttacccaaaattacaaaaggaaagcttttgggttctttcacatcagcgaaatataagaattctttcttccagttacttaagttctggaagctttggaattgtcaacactaaaagtaagcaggcagcagtcagaacctctgtaaaatggcatcctcaggcttcagaatcactcctgacctgctgtgtcccaattctacttggtaccaaaatgtccatccacttccaaatctttacttaaaaattccacacctattgtatgaaagagctgggtatcaaacttattaattacatatctgtgcataagataactctttccaactccaccatctccaaagagaattactttaaaaagtgatgattttcctgccgttaagagctttggcttcagaactcttagttgttcaattcaatcatcattatctcctagtgttgttgagaagattcactcaaatgacagggagaaagtattccatcacaatgccggcttattataggagtgcaagaaatttctcatggccatacagagctctgggctggcccatctgagtgcaatgagaacagagagagggttgggacctgcatagcagaaggcggaagtggtggagatgccaggctctgactccagcggctgccatcaggcgcagaggaaataacatggcccctggcttggatgggctgccgcacacttttaaacaacaataacttgcaagaacttgcgaacaatggggaagacagtcccaaggggatgatgctaaaccattcataagaaacccacccccatgagctaatcacctcctaccaggcccacttccagcactggggattacaatttaacatgagatgtggtcagggacacatacccaaactatataaactactatgggtatattaattataataaaaataaactacatccttggataaagaaaatggaagaagttacattataaaaaaaatttcaacatctttttgaaaatcagaaattgaatagaaaatagatacagtgtagctaatttttcgaacaagagtgtcaagtgaaagggctaacaatgaagaactctcataaaaaactttctaattacttccatagaattctgagtcttggattttgctggtgggttctagaatagaaaacatgaactaactttctttctttctttctttctttctttctttctttctttctttctttctttctttctttccctttctctctctctctctctctctctctttctttctctttctttctttttttcttctgagacagagtctcactctgttgcccaggctggagtgcagtggcatgatctcagctcactgcaacctccgcccccccgggttcaagtgattctcctgcctcagcctcttgagtagctgggattacaggcgtgtgatgccatgcccggctaattttgtatttttagtagagacggagtttcaccatgttggccaggctggtatcgaattcctgacctggtgattctcccacctcggcctcccaaagtgctgggattacaggtgtgagccaccatgccctgccacaaaagcttattttcaaatttatatagagtacagttggcctcctctcctccctcaccattctcccaaaataaaaatcagaatacagtggttaggaacctaaagcctaggcaaaaaaaaaaaaaaaaaaagtttaatctctagtgagacagcggaatcctgggattacctcttacaaaggaagatgataatcatttatggaattggaaaccaggtgagaaggggtcatagaaataattgcatgcctacatatagcctattattttgcaagcctattccataggacccctaggacaggggcacccagtagtgctttctggtaagtagtttaaagtattgtcatttggagaaataaagggctcaagagagaagataaaagagaaaaagatacccacttactgaaatttggataactagctgccttaacatcctgaaataaaacagcatggttaacaaggcccatatgcacttatattgccctaactctaaatcagatcagttagtatgtcattaatcctatgatgaaagctcccaacataagacaacattaatgttattattactgttagaaagtgtgaggtcttctactctgaccctacctaaacttgtttatttcaatgagcaattttattaatttgcactatatatacattgactctctattgtttcctgcatattctttttaaaactttttatttttaatttttgtgggtacacagtaggtgtgtatatttatggggtacatgaaatatttttatataggcatgtaatgcataataataatgtcatgaaaatgggctatccatccccctcaagcatttatccttt

SEQ ID NO: 1882124 - DNA, 4001 bp, Homo sapiens
aataatataaggtcctagatttcactttatacgtttaaaaaatacaatactgtgctaatcccatgagaataatttctgattagcaatcaaaacatcttagagacatcctttgaagcatccttatctccattcctggatctaaaactatccctctgtgactctcccttgtctcgtttttgtgcctatcactactgctaaggtcacttggaaaatagacgaatgacttgataatgcatgagcaacattagtttcaacttttattatgattttttattgatacgggggtctcactatgattacccaggctggtctttaatgcctgagctcaagcgatcttcgtgcttcagcctcggtctcctgagcagctggaaatacaggtgtgagccaccataccatgcccctgcatgaggacaagaaccgtgtcttatttacctctctatccctgagatcatgctgtgcacttacgtgttaaaaaacgcttagttgaacttgcaatcctatctgaaccacacaaatattactttggaagaacaaaaattctattacaaccagtaaaggaaaaaaatactctttagtaatagcatatcgcagtggaaaaaagagcatatattctggaaacaaatattcagcgttcttatcccaattcagccacttaccagctgtgggactgttggcaaatcacttaaaattgtgcctcgtttccacatatataaaacgggaataataacagaacctaccttacaggactattgttaagattaaataagttaaacaataagaagactgtagcctagccaatagcctagtttaataaactttagtcattactaaccattatctctgtaaaacaagatgggaaaagaatttgttaccgggagagaaaaaaaattcaagtaatgacgttttgttctctaacttaagactattatttatttattaagttatttattatgactattgacaagttattatgactattaagttattttgtctactgaaaccttccgatttcattaaattacatttagagtatctatggcacaggcttaaaggcgcctacttccatacctgaataaaagcatttgcttgcacacactttgcattttccactgttactttgataccatttttagttgcgaaacacgtggcatgttctcggaaatgaatagctttcaagatagtggagagattcctaacgttgtcaaggctggccacaaggctgtactgatcatcctcgtcttggatctgttgggtcagaaggggcatcgtccactgcgcattcggccccgagggatgctcctggggccaacaacttctcggcggatcgccaaacacctgaagggattagacagtaaaactcccatcagtgctggcgaggtccggcgagctccacctgcgctgagaggtggaaaggggctgggaggctgaacacggctgaccaggccgaaccccacctatgtcacttaactatctttgtaattctggaggaaaattatctaagctacggtttcctcgtctccgtaagaggacaataacgtgaaaagttgtgaagaatgaagacacgcaactgacacggtatctcccggccaaacaggagctacaaatccgcggggagtcggttttgtgcagcccgcgccaccagccccgcctccaacaaaacaggcgatggcggggcgggcccggagtgtccagataatcctccaagagtcccagacaaccccattcaccagcccgcccgcgggacagcatcgcttactagtctcggggtccccgagtgcggaaaccctacctttgcggtggggtctggacgcccgagagcccttctcagcaaagtccctgaagaggagcgaggcggctccgaggaaccgcggaggaagtgaagccagtcccgccactcttcagaccggccctccacctcggccaccgtcaccacagagctgaaggaggcctagagagccgcgcgtgccgcgccaccgagaccggaaggaggcggcacagacctggaggacgaccgcggagctgagcgcttagagccgccgaaccatagagatcggaaataggagcgagcggcagcgccggaaaggaggccaagagcgcgggcggcgaggcaagatggcggcaaccaagaggaaacggcgtggaggctttgcagttcaggcgaagaagccaaaaagaaacgaaatagatgcggagccgccagctaagcggcacgccacagcagaggaggtggaggaagaagagagggaccggatcccaggccccgtttgcaaggtaggaggggatgtccccgggctacacctgcggcggcggctctgtgcgccttttcttgggttacttacttgactacagccttgcttaatttcagagtagcccgggtgttaacggtaggtcggttttagcaattctcccggccagactgggcacggagtttgcagctaatccttgtgcacgtggccgtcttcctggaggcggcgggttttaaaacctttacccggcccacggggaagcgacttacagggtgctcagatccagcgttctttcttactagttgttcagttgttttttttttttaatgtttttggagagtagtgcttttccttggttatttctcgctattatttctccagtgattagtatgcccatatactgccatagtcagccactctcagtcagggatcctgaagtacgttaggggagcctttaaaaagttgttgcccttgggactgtgactctgacttgttaaccaggtcattaactcaagagatactgaaaaatagactaggtagtatgagctttacttgtattcaacagacattgaatgtgccatgcactgtaccaagttaggcttcctttgggtttgagattgcaaagatgactagaatgtgacctcttcctcctgaaatgttggagtttaggaggaaacttaagaattcaaataagttgatggtttttattcaaaagaagtgcacacaagttgttagaattagctttcattcaactaagaactcttcttaagctagacagaatactgtgaacaaggattatctttgacattaatttttgcgtcctccgcacttagcatagtactctagcgcggagtaggtgataagtaaatgaccccgtgtggtgtgatggcaagctctaagaaagaagtgagctctgtggaatgaaagataagtgtaaattctagccccgttattaacagcaacattctgtgctcttttctgacctgcagattggggggcagggggagggaatatttactttttatgaaaaataagctggacttgtacacttccagtaaatgttagtgttctcactcttcccttgagctaggtagtatctataatctgagccatacttcgatacattctatggaagtgcaggagatatagattatttttaccctagtataataagataaagaatcatgaaggatttagcccgtaagctgcatatcagaggaagtgtagaattttgacattcaaaaaatgagagggaacactccaagggagaaaaaaaaaccgatgaaagactttgaagtagggaaatgctgaaaaatgtaaaaaatagagccagattggattgcattaggcttcatttggggcaataatgatgtagacgtgaaaatctattttaaaattcagtgtcaaagctatgtcatttgaactttgtttagaaaactctgggaagtaaggatgtgatggaagtattactttaaaaatggtccagcgtggtggctcacgcctgtaatcccagcactttgggaggccgaggcgggtggatcactaggtcaggagttcaagaccagcctggccaagatggtgaaaccccgtctctactaacactacaaaaaaaaaaaaatcagccaggtgcagtggcgggcacctgtaatcccagctactcgggagtctgaggcaggagaatcgcttgaacccgggaggtggaggttgcagtgagccgagatcgcgccactgcactccagcctgggtgacagagtg

SEQ ID NO: 1882125 - DNA, 4001 bp, Homo sapiens
cattattatttacttttaacaataaacattttatgatggcactccgttttagtgataaatgactggggaaaataaaaaatgtgtatagcagaatcaaatataggccctccccgggggtttcactggctttctctcacagctgctggctacattatttcttttccacttacatttttacagcatggggttggggcgggggggtggctcttggttttctggttgtacctgtcagatttgttaatcaaatgaatccagtcctacaaacgatgagcctgtgacagctggcctttggggttggattctgccctgggcagcaaagtgtcccttatttgggtatttttttccaggttgaaaactcggcacttaaaatttagcatcttaccactgtgaaataacaggcattccgaaagaacttcggcatctgatgcctttccgggaacacttgggccactctccttaacctttaccggcagttttaaatactacaatgcaggtacaagcagaaaagccaaggatgcgggctatgcaaagccactctgtgactctacctactgccatgggaacgtacttatggatgtggcatgtgagtgtgtgtgtatgtgtgagtgggtttgtgaaagtgtgtggattcgtgcgaatacgtgtgtgagtgctttgtgtgtatttttggatgaatttgtgaatgtacatgtgtgttcatctgtgtgtgtgtttgattatctgcttatgagtctgtatgattgtgaacgtgtgagtatatgtgtgctgtttgtgtgactgtatgagtgtaatgtgtgtatgaatgtatgtttgaatgtgggtttgagtgaatgtgtgggttgtgtgtgaatgtgtgtgtaagtgagcatatcactgcgtgcatgtgtgtagctccttaagtgtgtatctgaatgtgggttttatttttgtgcgcgggaacgcacattgtgggtgtatttgtctatatgcatttgtgcgttgtgactgtgtgttgagtgtgagcgttgtgagaatgtgtatttgtgtgtcatgagtgtgtgcgcgtgtgtttttgtgcatatgtgcgcgcattgtgtttgtgtgcatttgtgagtgtatttttgtgcgtctgagtgtgtgcattgtggatctgggtgaatgtactggtctgcgtgtgtgtgggtgtgcgtgtgtgtgtgcgcgcgttgtgcgcgagtgtgcgagcgcgtgtgagcgggtgtgtggtgcggccgggcgcctccacctccctgatccgccccatcccggcgggcgcccgagcagaggcagcggcccgggccggggcgggcgagggagggacgcgagccggggcaagcgggctgcgccaccgccggcgccgcgccgactttgccctttaaatcggtctccaagccgattacagctgagctcccacgtgacgttttaccttctgtctcccggagcgcgttgcccgaggacagtccttccccggctgccgccccagcccgccgcgggggctcggctcccgcaactttgggcgaagcggcggccggctcgggcgccctcgcggggccgcgctccacgcgggcgttgggggcttggggggctccgggggctcggccgggagggtggtggttagggcggagagcgtgcctcggccccagcccgcgcccctgccaccgcgcgccgcggcctcccgaaagcgggcggggtgccctgcgcgcggcgtggggaaagggggcgcccttcgccggccgggacctgagcggtcgcgccctcgagggagccagctgggccatggccgcgaggcaggggtgagaccggcggccacccgtgagccctccgcacccgcaccatgcagaagagcgtgcgctacaacgaggggcacgccctgtacctggcctttctggcgcgcaaggagggcaccaagcgcggcttcctgagtaagaagacggccgaggcgagccgctggcacgagaagtggttcgccctctaccagaatgtgctcttctacttcgagggcgagcagagctgccgcccggcgggcatgtacctcctggagggctgcagctgcgaacgaacgcccgcgccacccagggccggcgccgggcagggaggcgtccgagacgcgctggacaagcaggtaccgcgcgccttctctccgcggtctcccagccttgatcgccgcactcccttgccgtcctaatccggggatcaggggtcgggggtcgtgaaagagtgcggggactatgctccgaaatccccccgcgtcaccagtggcgggacatctccacgctccttccgatcttcatccagggattctcccatctccatacccctccaccccactgccaagtgatcagtcagaatagtggcccgacttgctttcattaccctggtagaggtcgagtcgtttcagcttctctgccaaccatctattgcttctctagacctggctcgccagatttttgtctggtgacatgtattgacacctgttgggtgtagattggcaagacggaactaacttatttggaaaagtttgatttctgccatacccggctggcgcgtgtagatttctttgcctgcagatgtttgaccactggttgggctgggaacaagcggggctcccaagccggacagacactttctgttggtcattttcaatcagtctttgtgatttcggtcagttggccttgctaacatttgacctgctgggtgtaattatgaaggtaaatgtgtattcatattcctcaggattaatatttggtagccacattcttgctatgtttaaaaatgtgggcatttttaaagaacgcttctgtacttttaaatgaatgctttgaaaatgaatgcgaccttttaattctgggtcataattttattagttttgctgtgtgctcatggtcgcggggtgggggagaaaaaccctttaagtcttagtgatcccagcccctcattcctgcaaacacaaagtttgtatgtttccaatcaccgtttggttattaaagttaaagcagactaattttatgcccctaatgttctcatttagcttctcaatccccaccttgatatgaaaaaggctgattgtttttgctgttgcgtaaaaatattcgcagctgaattttccatgtgagttcagatcagacagcatctaccgcacaccacagaggctgtgggaggtgctagcaatggagtgatccgtaagatgcctacctaaccctttggggctcataaaacaatgtgtaaaattaagaggagttaaaactagaccgaccggaagtttgagttgttttcactataaatcattaacagacttaagtgattaaacttgttataacacttataaatctgaaagtttaaatatgctctttagtttctgagggcttgttcagagtcatttgaaaaactgatttccaactttatagatatagatactagaaatataaacataaatttcaagtcatgcattttagaatttaaattgggagaagagttttgaggaaacattttttttcaggaatatatataagtaacattctattggtgggattttttttaaggtatgtgttccaaggccccgcaggaaccaaaatgaataggtttctaaatgttattatgtctaaagtagaatagggtattttaaattactcaggatatatatcatttacttaatctcaaattatttgttttcttcatatttatattaatataagataaccacttttgattttttttttttcagttaggggtggggagttgttacctgttacaattcatatggctctctgacttgctaatgttatatggaaaccaacatttttctacttggaaaatatctggactgtaatcttcaagactgttttctttcttgcactttaataaggaaacataacttccaaatagtttgactttcatgccactttctaatggttgtcctaaataggccatctaatgaaaaaattgttttccctttttatgaccatgcaaatgatgagtatttctcagtcattttattcatcttcaag

SEQ ID NO: 1882126 - DNA, 4001 bp, Homo sapiens; identical to SEQ ID NO: 318460

SEQ ID NO: 1882127 - DNA, 4001 bp, Homo sapiens
gtttctggcatgtgttttaattctgtccacttgcacgttcatgccgtagtatgctttgctggattctccggatgtactgttcaggtctcctccttcctttctgaaaacaaagagaaagggagaaagagtaccagtggcaagaaacagggtggatgtgtgaattacacaagtcatcagccacttcatgattttttttctgattaaaacataaaacttttataagtcaccgatttttttgtttgtgttctagctccctccccgatttttctttgtacaatataaagtcgtttgtaacttgcagctcacgggcttgaggagtggctgcggtataagcgactattcactacgctcttgctttccaagccaattcctgatcttgtgaacagtacgaatttacccgcgagtgtgtcaactgacctatgtcttgaaaataggaaccaccttgcggtttacttgtgaaaattagcattttcctctagcggctgaacacttatgcagcaataaaaagtgaattgttaggcttataaatctcgagcttgtcaaattttacaacagaggagcaataaagcaccttatagagatgaagtttttcctctgaagaacagttccgtttaacgacaccaggatttgcaatgactcgaggacgccctctattgataggaaaatctagagcacccgtgtacttatggaacaggatatagggggaggggagtaaaaaatcatagaaagtcacgagtggaaagacccaaaccaaacagaaattattgatccttaactattgagtatatgctttgaagtatgatcaataaagtgagatgctgcttttataggggtcgaattaaatcttgggttaagagaaaaaaatgtagtctttgttagccaaatactttgaaaatcagtattatgtttgattacttttttaagatgcttcttagtatgtcatgaactgtatctaattatatgaagtaattgcaagatagtaaatttttgctctaataatacttagtccgcagcattatctaaaaatgtcatataacttcctccccaaaagtcatttctccaggcaactgtgaagctattattaagcgtattatggatatacacaggcttggattatattgtggatagtgaaaggtgtgtttaccccttaagtcatcatagtatgtaacaagtaagtaatgaaaagttacagtaaaaacagataggcatccttcattagggacctagtggtttgggcaattcaaaatgtgtctaataagtgagctggtgagactgaaggtttgcccctcaattatcctagtccattgattagctcatttaaacatgtgtggaatatcagcatgtccgtggttgataagaaattcctaattagagattctgagtaacatagcgggtacagttgccaactacgatttggatgttagtggattttaaatggcaaccctgtgctgtttggggaaaggcaaaggcgagggcggtatcaagtgtctctcagccttgaggtcattcttgagattagataccacttcacacctaccgataacaaattggaatctatcatcagtctcataactgcttttctgtctccacttggcagcctctttctttgtagacaattgtctttttcctcactttcggacccatccgatcataaaaggagaaagtgagctgccattgaattaatccgtagaaatttgtggaaaatttaaataatctgtagaaatttgtgaaaaagccactgagcaacaacaaatcgtggcataattacactgcataaaaacccaccactctcattaattacactgtaaccgaacgttgaagtttgcccactcttagacctctccttgccgctttcaggaagggaaatgtcaaactagaacacctgagcctcgcacagctgccagcgaattccggcggcagttcgcgggtaccttcccagcccatcctatctgctccggaccgcgggtgacattcagatttccaacaccgccccgagcttgctttaccagacaccctcaaacgactcggaacgcggttccgcagatgtgattggctgaaaggggacctgccgcgcggcgctctgtaaaagcgcctgcttcctccaaggaggtggagctgaagctggcagggccagggcagggaggggtaattaaattaaaaaaaaaacttggagggaagatgaatcggatcacattaattcaaggagaggtcaaaggccggtacctttgtaacgccggcgagagtaagacttgcggtcgcccatttctgttgggcgcgaggaaacagtaaatcgcggaagggggtagagggggaaggaaagggagcgcgaggcagcatgcggcgcaggagagaggacttggagtcgatggacagggaactcgaattacactgagcgggcgggggagagggccctctgggtcctgcgattggcaggctgagtcgggctgacgtgcggtcacaaccaatggggaggaagggagggacacggcgggggattatggcgtcgtggattggcgggcacagggcggggcgggacggcagtgcgggactgagattgatcgaccgcgggggctgccgcgcagagatatccgggccgccggtgggtggtcgctagggctgggccagcctcttggaggtccacgcccgccgagcccacgctggctggggccggggtgccggcgcgctcgggactcgtctcagcagtcgctcacggtctttgtgtcttctcttccgcccctttccctgcctgccgcctccggccgccacgatgcccctgcgccccgctgctgccgccgcggactggctgcgccggctgcgcgctgcttgctgcggcggtggtggcgccccatctgctacacgggcctgaagaaggaagaagaggaagcgaagcgcgccccccggcccatgccgcagccacgggcccagacccgccacggcgcccgcgccgccgccctcgccggagcccacgagacctgcatggacgggcatgggcttgagagcagcaccttccagcgccgccgctgccgccgccgaggttgagcagcgccgcagccccgggctctgccccccgccgctggagctgctgctgctgctgctgttcagcctcgggctgctccacgcaggtaggacgggagcgcgcgaggggagccagccccggggcctagggctttgttcccaaatagccccaggtctcgaaggcgctcgccggggcggaagggcggcgtggcgcaacgggaaaggcctcccgagcccctgacacgcacctctgtcgggctccgggccacagtaacgcagccacccaccgggcggccgccgggcgcagagacgagccttctctccaccctccccgccttcggctcggaccgctgacaaatctcccctccgacagccgcttatcaaacatttagcgggcgggggccgcgcgcccgagacaaatgttccggatgctttattgctctctgcgctggtgtttactgaaagtcaggctcggatcaggtttccgccgtcgcagccgcctcggagggagacaaggagccttgtgctgcttttctggagttgggggtggcggcgaggcgaaggaagtacaccagatggaaagatttttaccagattttgcaaacctgggagttaatctcgaagtaacgtcaacttttttgagcagggatttctttcgttttggcaaaagctgcgtttgttcagcgatcagcctcccgggaaaagctcgtgttttgtgactagccgggtgtcttcgggctccgtgaggggttgacagataaccatgctgccttctggaggtcggcgcttccccagccttgaggcgtatgttccaagggaagtaagcctgcaaatgagccttctaccatgtgatacctatttttctttttaaaaaatcgtttcatgaaaatccaggacgctcttcacactatttttttctaggaatttgcctagacaaagaattttttttaatgctaaggttgaaagggtcattttcctttagtctt

SEQ ID NO: 1882128 - DNA, 4001 bp, Homo sapiens; identical to SEQ ID NO: 318468

SEQ ID NO: 1882129 - DNA, 4001 bp, Homo sapiens
tataagttaaaatatattttttaatgtaacatttctatgaaaggtaattttttgttgcaaataaatttgaatatatttaattattaataagtcccgacatctgaaaggactgtgtttttataaagacagtgttcagttgggcgcggtggttgacgcctgtaatcccagcactttgggaggccaaggcgggtggatcacaaggtcaagagttcaaggccagcctggccaagacggtgaaaccccgtctctactaaaaatacgaaagttagccgggcatggtggtatgtgcttgtaatcccagctactcaggaggctgaggcagagaactgcttgaacccgggaagcggaggttgcagtgagccaagatcgcgccactgcactccagcctgggcgacagagcaagaccgtctccaaaaaaaaaaaaaaaaagacaatgtgccaaaattgtgttccactttcctaaacttaattcctaaaactcactgtggacctaaacaggaagtgtcttgggaaacaacaaagatgcttcatattaacaggtaacaaaatgcagttttagggcccagcgctgtggctcacacctgtaatcccaacactttgggaggctgagacaggcggatcacctgaggtcaggagttcgagaccagcctggccaacatggagaaaccctgtctctactaaaaacagaaaaattagccaggcatggtggcggtgcctgtaatcccagctactagagaggccaagacaggataatcacttggacccaggcggcagaggctgcagtgagccgagatcccgccactgcactccagcctgggtgacagagagagactgtatccaaaaaaaaaaaaaaaagataacaaaatggaatttttccttacaacaacaacaaaacctggtaacagaatttataagaattccacaagattgcaagggcctaaatgacccggttggaaactggagagtggaataactaggaactactggattaaaaccgagggaatctcctgtcactgagaaaccattacgcagacttccatccaggtggctaaagccacagatctcccaccctgagaacttgccaatactactactattctgattacttcaacatgagtaggactatccaaacctccagcagctcttgctttgtttttgtttattccatcatatataaatagttcacagcataactgccttatacaatacataaaaagtgaaaactactccttccaacgcccatcccttatccaaatgattccagttctttctcttcaaaagaaaggagtaactggcaaccagaagcctcataactgaactcttccaatcaggaagacaatgcgaaatctgctgcagccaaagaatgtctactgctccttgagacactgtcacaagagatggaaagctacaccatggcaaggtctgggcagacaaggaaacaggtctggggtaccgcatcctcccccacccccaaaacttctttagacctatacgcaaaaacttggcgtgctcatccctacttgcaacctgacaatttacaacctggcacaccttctaattaggaactagttctagccttttatagccgaaatattaaactgcttctcacgataaatcaggcactggcgcctgctactgagaatcccctgtgcatcaaacctccagtttcactactgagatgggccagtgaccaggctcctctaccgtacagaggggaggagcccaccctgctctgctagagtggaactgcaaacagaggacaggagcaaggtatggagcgcagaggcgtgaacagcgtccaagcagggctgggctcatcgcaccggcgggcgacagacagcggcgggcacgcgggagccggggtgcaggctgcaaagcggggtccctcggctgcagaagccgcccccgtgtgtcgccccacagctgcgcacgcgtcaggcaacacacccccgctgcccgtcgcggctctgcgctaaagccctcccgggacagccgcacacgcccctcggacccggcggcgcgtacgtacccagcaacacgcagagcacatcgagggccacgtacggcagccgcgtcttgtcaaacatggtctctgcccgggctgcccggcaagggcgatggactgagctgcgggacggcggccgaggcccttgattctcgagcccgggccggggctggcgacggccccgagctacggcccctcccagccggaggaggagagcagccgagggcgggctgagaccgggcggcgctcccaccgccagcaatggcgcccggggccctcccctcacagcccccgcgaacactcggttagtgccgaggcgctcgtgtgccagccgcggcagctctgtagcctcaggacctcctcagccggcacggcctgccccggttgctccccgtccggatcccggcgctctctcccacaggcggggcgtccagactctcgctttaaggatggggaccggcagggaggaggaacgcggggtccagcccctcccgctgagcagcgcaggaccgggcagcgcgcgggttcgcgggcggggggagtgcagcaggggcggggccagggaaaccccaggccgcggcggtcagccaatcagcgccgtcggcctcatccctcccgacctgcggcatccgcccagaagtgcggctctcggcagccgggcggggcgtgggggcggctcccgttccgatccagggggctttgctctggaccgcaattgctcaggtggtctccgaactcggcctcggtacccccactaggcattgctgctttcagagagctaggctccctacccaacgatcctagagcaccggctgcctgccactccccaccccttccatggggatgaggtaataaacaggtcagattgttaccactgagtttaaggggggaaaagaggtcagagtaggcaggaacagagacgctctcctttagtttggtacctctgagccctttctcacttaggcctcaacgttgacctccctgtgtcctggctgagcccaaatgttagcaagaagcatgctaaatcatccatcctcgatacctgatcaccgttgaattcttgatatttaatatcggattagattccttatattacacctttgttgtagaagcccttgacctgcctttagccagaatccctctacccttgatgtctcctcttagtaattttccatccaccgtcacctccctcacagacacggtgcctgttccttggctataaatcccctgctgtctttgctgtattctgagttgagctcaatttctctctcctgttccaatagtcatgacccttattgtaataatcttgaataaattattcatgtgtttgacaagtgtcaggataattttctttaacagcagcaagcactccccctgccccatacccaggaggaccctagcccacatttagtaatctcagtttcctaatatgtaaaatggggattttttaaataaatacctaatactcagacatcacaagtactttgaatttattgtgaccttgcaatctgaggcccttgtaactctggaagtaaagaaagccacatgataaacaatggcccatctttctcaggtgtaaattgcttaaagcttttacagctttaagctgcccagtgttccagtctggaggaagaagtgaaacccagaaaagattatatgatagtggctttatctagagttaaaccgtctacagatgttaatgattggtatattttctctttaaatatgtaaaacacaaatcacaaaatgtgcctactacttcttcgacttatcctgcaaagcactcataaagccaatggaaagataacattaaacagagtctggagatacagccccaagtaagctctcaaaaacaaaatatacatttgaagaaagatgtttttctttaaaacgaatgctaatgttttattttgcctcttgtttaaatagccgtaaaagctttaagcaatttacacctgagaaagatgtgccattgtttatcatgtagctttcttta

SEQ ID NO: 1882130 - DNA, 4001 bp, Homo sapiens
ctgccgtcctccctgcctccaaaacaggtcaggccttcgtgcctttgcacttactatttgcaatacccaaatgttcttcaggctctttagcctcttcatttctttcctgaagtgtcattctcactgaggcttatctaaagctgcagctactggggcattcctgtctcatctccctgctgtattttgtactcccggctctcttttgtacttttaaacatactatatggtttacctttgttgtttatatttgcatgttgtttcccacttgaatgtaagctccaaagattttatttttttaaactgaattattactgtattcccagaacaattccctggcaaatatttggtactcaatagtaatgctaagttagtaaataaatgatgaatttagaatcaaaataatgtgtctatggccaaaataaaacctgaaatccctgtcctatttcccagaggtaactgctgttaatagtttagttgtgtgcttccagacataccttcacagaatcatttatcacaataaaggtgtcatactatgcagattgtttgacaagatgctttttttcactttacacgggcatcttttcataccattgtgtggccaggccatgatttgttttccaaaagacatttacccaatttatatggtgaagatttttgtccatattactttttatagtatttctgtagggtaagttcccagaagtaatattgcacgatcatcgaaaaattttagtgttacattactgccccataaaggtactaattaacatccctctcaacaacatagaagattcctttttttttttttctttttttgggtggaggggggcggggacagagtcttactctgtcgcccaggctggagtgcagtggtgccatttctgctcacggcaacctccacctcccgggctcaagctattctcctgcctcagcctcccaagtagctgggaatacaggcacgcgccactacgcccagccaatttttgtagagaagggggtttcaccatgttagccaggctagtctcgaactcctgaccttgtgatcagtgctggggttacaggcgtgacccaccgcgcccggacggatttcttgttttcatactgtcatcaactttaaatacaagtattttcagtttttgccaatgctgttaatttagaaatgtgtatgtatatattgtctggtgggtgtttggatggaaacgatcaaaatcgggcaacttccccagtttccttgaagggagtgcttgccatcggcccctctgggaagtagctctccgtagttctccatcttcctgttttgaggaacgcaggaggaggtggatctggagtctcatccattcggtggctgttaacggcaactgcagcagccagccaggtcaccccctaaagcaaagttaaccccttgcatggtgccttggtcagcacccaccaaattcgaggtttctcctatccttcgactcgaggctcttttgacagatgtgatttatttcctcctagagccagtcacattggctcaagcaacctatcgtaagaaaacaaatacaatagtgttttagctggaaactgcccactgtctaagcggctttttaaattaagaactcaggttcactacgggatggcttaggccagggaacagcatgtgcgaagttcgaagcccgagaagtttggaggagcggccccaggcgcaggcgggtcccgcagcggggcccgtgccgcccaggcgatcagccccttcacttaacccgcttccctcctagcaggcccgagtcccctagcctcagcctcacgcagccagagcaaggggaagagggagtccttcgtgagttcgccgctcacattcggcggtgggaaaccgatccgaagatgcttttgtaggcgaaacgctcagctcgcgcggctctgaaccaccggggagcagcggctgctgctagtcggactacgccagcacctccttgtccagcccgggagcagccccgcctcgctcagggccgcgtgcgcgtgcgcggctccaggggcggggcctgctcgcgtcccgggtgcctggataccgagcgcgtccgtagtggcggctggcgctagggaactgcagggtctagggtgttgtcggagtggcagttggtccgaatttctcccgaagcccgcggaggagcgggtaagagccccgcgaatccggccccaacctcgggaacgggatgggaggcggccctggccgcaagccccgcgctgctagcgggtccaccgcgtcgtagccgacagccgcccttcttcctcgcagcgcgccgcgattcaccagcctggtcccttctgcggagagcgatgccgcttcccgacaccatgttctgcgctcagcagatccacattcccccggagctgccggacatcctgaagcaattcaccaaggctgccatccgcacccagccggccgacgtgctgcggtggtccgcggggtaagcgcccttggcccggggagctgtccggtctacatgcccaagccagacgagcccagagagccctcctcccggaccaggggccttacgcggcactcagcgtccttaagagtatcaggcaaaactttccccttagcattggtgacatctatacttgagtgttttatctaggaaccatttcgatttatcgactatgagacccgaaatcattgcaaaatgctcacttacctacaacgtaatggcaactcaattgtttaaaagtgtttatgatgaagatagactaaaacttaacaaagtaattgcattgggcaaaaaagtgtttacattatgttaaaaaaattacacggttgcagtcactttgtgaaatgactttacaaagaggaatattttagctaagttcctcatctgcagagagtcctctcagagctatgtatacccagagctggttaaatttattagaaccggaacgaccgtggtcatactgaggtcatcatccctagagtgctcagggtaaactgtccagcaaatgaagcttcacagtttattttttgccacaaacattccaacacttgccaggaacagacattcataatctcaaagttacaagtcaacagatcttagaggcattaaaagaaatcctcttggttttacaggagagctctttgccccttttcaataaacagatgtaaaacaaaaactcacttttatgatgacaagagtcagcacaggtgtaaatttaatttaaatattttagtcatcaacatttcaaattttggctgggcttggtggttcatgcctgtaatcccagcactttgggaggccaagctgggaggatcacttgagcccaagagtttgagaccagcctgggtaacacagcaagaccccatctgtattttttttaataagaaaactaatttaaaaagaaaaaaaacagccaaattttgctggctttaaactctataaccaaagtgaattagtttcgtttggctgctgtaacaaatcaccacaaaacttgacagcttaaaacacagacatacatttgggccgggcgcggtggctcacgcctgtaatcccagcactttgggaggccgaggcgggtggatcatgaggtcaggagatcgagaccatcctggctaacaaggtgaaaccccgtctctactaaaaatacaaaaaattagccgggcgcggtggcgggcgcctgtagtcccagctactcgggaggctgaggcaggagaatggcgtgaacccgggaagcggagcttgcagtgagccgagattgcgccactgcagtccgcagtccggcccgggcgacagagcgagactccgtctcaaaaaaaaaaaaaacacagacatacattcttgcagttctggaggccagaagtccaaattagtttcactaggctaaaatcaaggtgttgacagggctttgctctttccagtggttctcaggaaaacccagctcgtttccttgccttttctggcttctagagctgcatttcttggacgccttggctcatgtccccttcctccattttcaaggccagcatcttcaaa

SEQ ID NO: 1882131 - DNA, 4001 bp, Homo sapiens; identical to SEQ ID NO: 318493

SEQ ID NO: 1882132 - DNA, 4001 bp, Homo sapiens
gggcaagttggtgcagaagaagttgtgtaccgcaatagcctagcattgaatacaaatgctgtttagaaaaatatggggaacatggaggtttcatccataccaactgactttggacccaacatcacacagtgcctggtacagatacccaagtgttttctacatatatgtctgaacaccccagataggagatattcttttagggcaagggttatgtttcatcctcctcctatagccaaccctatacttggtatacataatgagttcaacaacaatttacttttgaacagaatatatgaactctgagggaagactcctattaatctgtgccttttttccattaatttttattctattttttctactgtaaaaacaaaaataatgcttattaaagaaaatgcaaaggttaaacaaaaggagaaaaatatcagccatattcctgctacccagaaataatcactgttagtactttggtgcattttttataccaatagttttcttttttctttaaacatagatgtacagacatcgtatcctccatgcaatttcatatcctgaatttttttacttatcataaaaaaagcatttctccaactcctcatcagctctttatttaagaattaatggtgaattattctctatagaaaatgtttacattgatgttgaaactacctcaaatgctaactgcacaatctctttctgaagattttaggtagtttacttaaccacttcccttttggaactctgaggttctattttatttttcctattataaataattccataatgaacatcactgtacttcatattatctctgataggcctatttccgacgatggctgtcccacgtgtgaaattaccagttcagatgctacaaatgcatttatggccactgagcaaaacttaagatcaccagccacctgcttctaaacatggaaactggtagctttcccttttacaacaggacacaaacccgaagctccttctatgccctctagtactaacacttgcttacctatcacctaacacagcctcccctcttccctgcccataaaacgctgcccagccctacataattacacgaccctgggctggtcccatcgcctttcggacctcatcagtccccatgctgcgcagttggagagtggcatgactgaagtgctggaccagagcatatcctacggcccctcctggaggggaggtggtgccctgggcgccgaaaccaagcgcagggtcttggcagggcgcagtcgcttcgccggtagacccggggactcaaagcaatagaactacagcttggagctccagggagagcccaagacaccgcagcccttccccatctagattccgagattggcccctgggccccactcccagccttcacttcatctcccctgaagccctttctcttgcccgcggctcacctagtccaccctccagacctcattcggacttcccattcttcccagtggaggggtcgcccaaacccctcggggtctcctttccccctctccttttctttccgcgccgtccaagccagtcccactctccacactctggaaggtatcggctacccccaatattgcgactgccttgcaagatccccccatcacctcctccgcatgtctttccacgtatctgtatggggttgtccctctgtctttcccgccatgactggctttccgtcctatttcacccacccttcctcccacggatccgcgagtcctctggccctggccctttcattttattagtccgcccctctcctgatagcacctctatcctctttaggtcccctcatatgcccctcctccaagtctgtccctcagcgtccccgtccgcgtctctactgtctgtccccgaatgtgttcctctgttcctggagtctggccctcggtccagccaggcccctgctcaccatccctcccccgggccggagagtctgcagcccggttcccggttctcgctggggtaactctttcctcttccactttctctactttgaacccatcccagcagagtccaggaagtagcctggcgccggagactggcggcggcgacgcccaatgggacgcgccagcggcggcggcagccccgcccagagagcaaatgagaccaatggtcgcgtgaaggcgggacttccgctgtcccgcgaagggcggggggagcgaactgttgtggtgcggagcgttcggcgggcggcggccgggcggcccaggggctgccgcgggactcggggcgcagccgagtggctgcaggggtggagtgggccggacgagccgcggggcccgggtgccgcgggttcgaggccgggccccgcgcgaggaggccgcgccaccccgggggagctgcccggcagcgagtttgccccgctgccgaaagaaggcgggagccggcaggggccttcgaaaccccctggcaacccaggcccggagtccttggggagcggctgtttcctgggacgccctcccggacacccccgctgcagggttacggttctgggcccccggcagaaggctcctccgggtgacccccggcggggccctgcgagccgcgggagccgaccccggggcctcgagccgggaggaagggggcttccggaggcggagggccgggggccgagggagccgggcctctcggacgcggggcagggcagcgcccgggctggagacggactctgggaccctcggctgcgggggtctcagcgacctgccccgcggcaagcgcggccgcggagtggcctaccggggaccctcccccagagggaccggcccggggcggggagatgaacggcttcagcacggaggaggacagccgcgaagggccccccgccgccccagctgccgccgccccgggctacggccagagctgctgcctcatcgaggacggcgagcgctgcgtccggcccgcgggcaacgcctccttcagcaagagggtccagaagagcatctcgcagaagaaactcaagctggacatcgacaagagcgtgagtccgcccccgctcgcgtctgggccccggcgcccccagctctccgtccgctgccctgggctccagtcgggactccccgggcactccccgccgtgggcctcgccgccccggctctgcagaactgagttggactccgcatttcaaaggccgctccagcgctgacatgctctgactgtgattctacccagatccgggaggatgggggcgggggcttcaggactcctgctgcctggaaagattggacagcagtttccaacttgttttattggtttagactttagagcagggagaggtgggttagttttgttggcccttgaaggagcaagaatcggagcggggagtgatgaagatacccggctcttttccaacttctctctccttctaggaaccctgttattccttcagacagagaaaggtggcagttacttccctggctcccgcatcctcggtatcagcagagggtcaccgagctagctgcttcgcaggcagctgtgggaatgggtttttctaggatgtggcagaaataaggccaaggccaggtcttgagaaatggctcttgcagtcgatgtgactggaggggggaagaaaagaaatcaattttcttagtggtagtttcttttgaaataagggggtggatatttaaatttaaatcggattgccctgctctttgtggcttattataggaaactcctcccgtgtgacttcaccacttctagttaacaattctgaagctgtgcctattgtcaaccaattaagaactttttagtttgacatctgttgctacaagccttaagtgattgcttcatgattaggaattggaaatgagttaaggggatatttaatattcaggtagactagctaagagcttaggtggttaacatccattctcttctagaatcagaatttctccacagttggaggaaatcagagactgcttgttaaactgaaagggagtgcacgtttcccctctgattttagggttgaaacaggcccagagataggaagtgagggtgtc

SEQ ID NO: 1882133 - DNA, 4001 bp, Homo sapiens; identical to SEQ ID NO: 318495

SEQ ID NO: 1882134 - DNA, 4001 bp, Homo sapiens
atcctgcaatgcgggctcagctgaccctcattgtcttggaacatagtagatgcataataaatagtgcagattattttgagtcatttggaggacaggtggagggagtgagggcaaaagtggtgagagaagcagatgagctgggcaaggacatgcttgctcaggagaagggaggcaaagcgtataagaacatactgagcctccttgccactttcgacgttcaaccaatatttgttaggcactaaatatacatgcaggacacttttctgtatgttgtttcatttaattcttaaataatcctttacagactcagagaggtgaagagagtagcacaggtagtatcagaattgggattcaaacctgacacatacactgagcactaagttaaaaccgggcactgggcagctgctgaggatgcgatggtgagtacaacagactgcttgctctttttgatatctagaatcgtacagctctgctgtgctcatccttgtctgttgtcatttactagttgacatcttcgttgactacctagaagcagctgcttcgacatctatcccaacctgaatcccgtcaaagggagattacaacaaatgtgctttttgtctatcatctctagctagtgtttcacagtggggggagtatcatttcctgggtgactttgcatagagcaagctccccaaaggccaaggaatactcaatctagattcttccaatcctccggtacccaccaagtcaaaagaattctggctccctgtagcttcatctaagtgcttttctgttagaggagaaaagtgaggaaagcgatgctctttcaataagttcggcagggtggggcaaggaatggtacaaattgattttttttttttcttgagacagagtctcgctctgtctcccaggctggagtgcagtggcccggtctcggctcactgcgacctccacctcccggattcaagcgattctcctgccttagcctccagagtagctgggactacaggcgtacgccaccactcccggctaatttctgtatttttagtagagacgggggtttcaccatattggccaggctggtttcgaactcatgaccttgtgattcgcccgcctcggcctcccaaagtgttgggattacaggcgtaagccaccgcgcccggccggtacaaattaatttaacacatcttttgataatctcatccttggtgttggaaaagacgggaaaatccaaaagtgtctattttgtgcccaaatgctcaagttaatactcgagggccttgatctctggcctcttgccatccctctccccattatttctgaagaagtagccattttgcagattccggaggatgggagccacggccggcccctggtactgaatctcatctccttctcaaggctccttggatcaagttgggaccggcagcgccaaggctgctctccgtgatttagcagcaacctagagtcagagagaccggaagatgggaggccgggattctcaggtggggtcaggggtatgcaaaaatccttagcagcggccgcgcccccgccccggggaggtaatttgcggagggcggtgcagtagcctctccagtgcccgcgtcccacggtctaacggcactgctcccggggtgcgcggcccacgactcaggctgcctcccccaacctgacaagtgtgcgtccttaccacaaaatgccaccacttccctaagtgacgctgggccccgaggacctgatttgaaatcggtgttcagaagaccgagcccggctggacgcagctggcctccggctgagagcggaggggaagggttccatactctccgaggatcccgcgggctcgtggcgtgtggaacgcttttcatcgctttcagttcccgtttccttcgccccgactgcctactcggtcgcagctaaagcccggagcgtgggatccgggcccggaggaacgggatggcgaacgcgagctgcgccgcggccaggagcccgccgcaccgggcatgctcagtggcgcggccggctgggtggcccgcgagctgcacccggatctgctcggcggcggcgacgtgagcgcgcaggggggcggcggcctcgcctcgtctctctctctgcgcctgggtcgggtgggtgacgccgagagccagagagatgtcggatttcgacagtaacccgtttgccgacccggatctcaacaatcccttcaaggtgagcttcggccccagcatctcctgccgccgcgacgcgtcgttgtttgtgaaaacggacgagttccttcgcgcccactgcgtctgcccctcggctccccttagcagcccagagaggggcgcggggccgccgtcctccatttggggtcgcgccccggccccgtgtcactcctttgggttttggggcttgggggtggaacctcctcagctcgtgcccggtcgcccttccacacgtccccgactggtgagggtcgtgtctgcagccgggactgggcccgcgcgcccggaggggtcctggcccgcctctcaggagagaaagccgagggcaggtagagtcgccccttgccaagcaagtgtggctggcagggccgggagtcggcggaggggggcccgccctggggtggggttgtcatggggacccgaggtggcggcggcggagagctgcgtggggtgatggcagaggtgtggaggaggagagaggtgagggcaccgagtatgctgcaattaaaaaaaaaaaggttatgtttttattttttaaacttgtgttgcacccaaataccaccagtggcgctgccatcccccctctttctgttaggttgaggttgaggttattgataccaaagcaaaacttaaaaataaacatatctggaaaacaatagtgcacgtggacgacctcttccctacccagctgcttctagcaaggtaaacgatgggatattttccaagctcctagtgcgtcaccggttctctgggctatgtgaggataccatttcctacttgagctgcttttcttcttggagtcgaccttatcaaccccggcttcggaagggcttggcacagaatcctgcaaaggaaggcggctgagatattcatcgtctgcgtttaaatgaatgcaacatctaaataactctctctttgaaagtattctgaatttcctaatgagtgtaactgttagcacgtgtaatttgtttccaactgttggttgaagttgtttctcaatccccccggccatgtgcagtagtaactttaatttgcagtcacacagaataaaacaggaactctaatttgtggtcacacaagtgtcacttctggcttgttgagtttacatctttttactcctggttttatctttcattaagaatcctggaagaggaaaactatttctgctctgattattaaatgcctgataattccaaggaggattattttaatgaaatgaccctgattattattgacaactcgactcactttgtagcagtgtagaattagactcagtcactgtttcattgtccctaatgtcacttaaaattcagtacaactggcctgtacctttcagtgacatggttgcattttaagacttttttttttttcctggcagttttgtttcaattagtattggacttgcttccatgttgtggaaaatcaggtagttcttaaatggtagactttctaaagagaccgttcataaattgttaaatgggtgttattttaaaatattttgaagataaaacatcaagaaccttttagcctttcctaattcagataattcactgacgctgtttattcagcatctgacgatttggcagtgtattttctacttggtcattccatttcatggttcatttcatattaactggctctcttgttagggcaaaacattgtcttcatcttagcccagactgtccttttgtgacatctgatattgccatgacacttttcctcttctgacattcataaagttgctgtagtaattctaaacccaggagttgttttaaatattcattgtggcataacgttataaatcttttttgttct

SEQ ID NO: 1882135 - DNA, 4001 bp, Homo sapiens
aatttcttacagaatgtagctctaaagttaaataatctataataatgaattccaatgatggtatttacttatctgtgtcatttactaagaaagaattaaaaatgtgcctatattttcaatataagtagaaaatcttctagtttaaaggacactctatgtgaattcactaaatatggcatttaaagcacatactctgggaataagtattagaatggagatatatatttcaactgtatgaatgaatatattatgaattacatattatatggagtaatcacttatttggcatgtataacaaatcatctttaaaaaaagaccgaatcatcaatgaatagagatatcttaaaaaataacactaaggacactacttagttggtctgacaaagtaaaagaattataaatagtgtcacatatggttgcaaattaagataaattaatattatgttacgtaaattcgaattattatctcaagaaaatcagaatacttaaattccagaaaaatttatagtatacttttttttttttttttaccaaaagagatggctggctagtgaatcattacatctgaatgggtaagactaacagaaaattctggttcagttaagttctatatatgttcctcctctgaagtataacttcctgacctcaaagcaaaaggtctcttagcctatcaaccatcaatgtatagaaactgctatgaactggaatatacatagtttagattaaatggaattaagcaaaaacatgagtttatttcaaagtatgaatattctgacaggctaaacaattttaccatagaaataaaatgacaaagcccatatacattcctgaaaataagctaaaataaaggccaaattatgcttaaattaaatcctactcactggttgcgtaactgtgagcaaggtattgtatctctttaacaaaaggacccaccctcaaagggttgttatgaggatgaaatgagtgattacacggaaagtccttagaatggtgacttagatgtactgtgttcatatataggctaaggatacatgtgataactctaggtatcacttaaaattggctaacatttcttcatcaaacaatggaataggttaggcatttgcaaagccatggctccttcattctagaacccactgaaaaccacaagatcacaaactcaaggtctttttgggtctaatattctagaagtaacaaaatatcattaagaaactggtacaacaggattaacatattaacagcttttataaatgagtaaagaaccctaacttggtaactcagagacttagcagcaccactttggttttttccacatatttctctacctagatatatttctgtaataccccaattttacttacacatgcacacacacacacacacgaaccctgttagttgatttaaaaaatgtaattacgttgcttagttattatggctaaataccaataagtatatttgctgataatgctatcaggtctatgaaaccaggataaagaccatgtagtaatctttttttctgctgcttagttctatattatttgaagtagcaaaaactgaagttattttaaacagtgaagtcatcaagaacttgctttatccaatctgtctagatatctccacctaagcatggtatatattctcagtataataaaagattacgagtctcataaaaacatgtaattttaacagaaagagactaggcctataaaattttctatacaaaataattcttagttataaatcaacataaaatggtgcttaacacgtatataagtagaaataaaggttttaaaaaaagctttcaaacagttgactgtattagtacatattttaaaatgtaaaaataggcatgctctttttggtcttttatgttggagaaatatactaccactcaacctttactagaaggttggcagccctgagaactcctttgttaatgtagcatgttatgaacatattcctgctcccaaggaatgagaagcagacatttccacatgcaacctacttgcttttgaagaagaattttcgtgatagcatagggaaagtattctactactatgtaattattctttaatgagataaacacttaaatatcttagatggacattatgcattatattagaattccaataaagtcatcaataggaataagtgtttactagagtctaccatatgctttaattctaagtttacagttggcgggtacagaagggaaagatacaatgaaactgtctacttggatagaaagacttcatgcacagccaagcaacaaataacgtaatttcaacaaatgggtgaatactgaagaataaattcaacaggactttactgaaaaaggtggaatgaagagaagacagtgtctacaaggagatggagtattatcataaaaactgatggacaactaacatctattttcaccttcagtaggttaaatccctcatgcgattttttactcttaacacattttaggtcacttctgaaatttaccttttaatttagtaagatattgtgaatataaagtttttgaatttttaacaggaagaaaatgaaaaaagttattataaaaccaaattacatgtaggaattaaattatctaataatttatatgttaacttacattgaacatttgtaagaactaatttgggtgattagacatcattagtaacatacccagttttatttctgtccaggaggctgggtgccaaggatcgaatataagcacaggtacatataagcagcaagattacagtcaatagactctgaaaattgaaaatggcagactaaaaagaaaaaaaaaaaagaaaaattaatatcaagaaaaactgcataggtaaaaaatgtttgacaattccacatttagagtcatgtttttatttcttcaagaaggcaagcagaatgacaagtctggcaacacttaaaaccagaatcttgaggtcttctacagtcttcaagctctgccaatagctggttttatggccttagcagaattactagcttttctaagtctttggctgggcggagaatgggcagacagacttaaatgctagctaagtttcttttaattctgaatttttttaaggataaacatcctttaaatttaagctataattttccatgagttgacaaatactaggctaatagattttggagaaagaaagcaagcacctgtactttcactgttggatttttaaaagttattcattacaggttgaacatctctaatccaaaatccaaaatgttccaaaatcaaaattttttgagtgccaaaatgatgctaaaaaaaaaatgttcattggagcattttggatttctgattagagatgctcaacgagtaagtataatgcaattattccaaaatcccaccaaaaatttgaaatccaaaacactcctggctccaagcattttggaaaaaagatacttagcttgtatttaatagtttgagtcttattccaaagttaaaatttaacacaagagtcataagaaaccataagtttcataagtttccacagtcaaacaaaatcataggtttccagttaaagtaaatggaggtggacttattctattcaaaattcagctctagcatcacctttttaaggaagtttccttgaatccatctgcctcccttctcttattttatgtagaactctcttttctagtctcatagcaaactgttacctttattataatattcatttctgaagggtagacattgttatcagattatcagactctgaatctccagcaccaatcatatgcctgtctcacactagaagcccaataagagagagttgaaaaaaataaaatgaaattaagaaagtgcaagaatattactgtgtatatataacaaagaataacattttcatcatatacagggagataaaatatgtcaatctcacacaacagccagcaatatgcttgtttagtaaacttagaggcaccttctaaaaaacaaacaaaaaaatcaggaatgaaacaaagaatgactcatgagaaaacttagt

SEQ ID NO: 1882136 - DNA, 4001 bp, Homo sapiens
tagtgctttttctaagcagaacataacgactgcaaaataattttttaaaaaaacgtaaccccaaaaatgtcaccttaactgttaagatccccaaccagcctctatctagtctcaacattaccaccatataatttctggatttctcagtttaatcacttctgggggaaaaacccagactacctctatatgatcactaagcaaatttccagtaagaaatcaaggctttgtaacctggctgggtgcagtggctcatgcctgtaatcccgatactttgggaagctgaggcaggactgtttgagtctaggagttcaagaccagcctgggcaatattgtgagaccctgtctctacaaaataaatttttgttaaattagccgggtgtggtggtgcacatctgtagtcccagctacttgggactctgaaggttgaggtgttgaggactgcttgagcccgggaggttgaggctgctatgactgtgccactgcactccagcctgggctgaccctttctcaaaaaaaagaaaaaagactttctaacttcctgcgccttctcaaatagtctggctcctgaagaaaacacttaccaggcctgcatgactcttcgatgctcagggcacatgcctgaccaaagacaaccaagtccaagagcgagtttgccccgagccgattggcaccatgtaccgaggcacaggcggcctccccacaggcgtacaggccgggcacaatctgatcctggccattcacgtgcctcaggacctgtggaaaggaagatttcaggtgaaatgtcaaggtgctcatgcctccaccagcccaccttccccaatagggtgtctgtgctgcaggtcagagagagagggaagtaggcccggcgtggtggctcacacctgtaatctcagcactttgggaggctgaggctggtgatcacctgaggtcaggggttcaagacctgtctggctaacatggtgaaaccccatctctactaaaaatacaaaaattagcggggcataatggcgggtgcctgtaatcccagctactagggaggctgagacagaaaaatcacttgaacttgggaggcagaggttgcagtgagctgagatcgcgccactgctctccacccgaagcgacagagtgagaccccacctccaagaaaaaaaaaaaaggggaagtaaagaccgtatctaagagggaagtaaggaccatagctactcttcttcagagggaagcttccgaaggtatcccccagtttcccctctgcccctgagcacctgctgttacaagcaggtcagaggacctccaatgtcagcatctgcgactgtcccccgtgtcccatgttcccggggccctcaccacctgtgctccggctcagacccaggagcacggcaggtggaggaacatcagcaggggagactgatattccagactcttccactcgctgttcacctcttcatctacacagggaaagtaacagcttccacccacctcgcccaacaaggagctctggtgaccttgggcagacacgactcctccccaagtccacccgccaggcactgaggcgaggggctacctcagcccgggaggtctctggaccccaggcccggaccaaggcggcggaggggacgcccagcaagcccgcggggtcgtgaccttcaccggactacctgctaaggaccgagctccccggacccccgagtccgccccacggctcccccttgcactggcgcagggctctcccagccccttccagatcccgggacagggggcgcaaggacctggcgcccgctctgctcgggcccgctggggaccgtcccgctcctaccgccgcctcggcccccgcctgccccgccccggtccgcggcacggactcaccgccttggccagcgccaggcgcggagcgctcagcaggcgcgacaggacccagaccgccatgcctgtagtcgcctccgcgcagtcccgccagtccccgcgcagactacgcctgcgcaccacaccggggtcgagctttggggggcaggaaccgcggcgggtgggatgccgcgcctgcgcacggggtcaagcggggccatagtggaggcgcctcgcctgcacaaagcgcacctgcggacggtggcgctgtggggatagggaggtcccgcgctccctgaccgatgtagggcgggccctattccggggaggtgttgggcaccaacatttttaaagccccgtgggtggttccctgggatcgcccagaccgaaaggccccgaacgtccagatcgcagggaatggggtcggaggggcggcgctcgtccgcggaggcgggcgggagcggccacgggcctctggcctctagtgagcgggtgtgaccctcggtctccggcctgtgaggtgagggagcgatcctcagccgtgtccctagcctctggcttccggctaatttttaaattttttgtagaggcgggatcttgctgtgttgcccgggctggtctcgaactcttggcctcaagcgatcctccctcctcggcctctccaagtgcggggattacgggcggagccaccgcgcacggccgtggtcagctttgaaagctgcgtagatccctttggctcatacgcctttctgctagcttaccctgattctgcttctggttcagatagtattttaatatttctagtgtgtctttttgtaagatatctgaaatctttttgtggaatgaagtggcatgaaaaataaaccaataatcgttagtaattacgtttcctgtcttttcactttaaattattaaaatcttcgttttgtgcatgtttaacaattttgagttattttagtaaatttgcaagggttcagtcccattttattgatatttgggttgtttcccatttttgctcttaataaataacactgtacagaacatatttgtgaccataactttaggattattttcttagattgtaggccccagacgtggcctttattggcttgcagggaatgaacgtaatagctcctagacttttttttgaaagttatgcagttttagtcctgtgttaattacctaattttgttttgttttgtttgagacagagttttgctgttgttgcccaggttggagtgcaatggcgcgatctcagctcactgcaacctctgcctccagggttcaagagattctcctgtggagcttgcagtgagcggagttcgagccactgcactccagcctgggcaacagagcaagactgcccctcaaaaaacaaagagattctctcgcctcagcctcccgagtagctgggactacaggcccccgccaccacgcccagctagtttttgtatttttagtagagacagggtttcaccatattggccagactggtttcaaactcctgacctcaggtgatccacctgcctcagcctcccgaagtgctgtgattgcaggcgtgagccaccgtgcctggccttaattttttaattctataattaccacatgtaggggtgggttgcccctccacacctgtgggtgtttctcgtaaggtggaacgagagacttaggaaagaaaaagacacagagacaaagtatagagaaagaaataaggggacccggggaaccagcgttcagcatatggaggatcccgccagcctctgagttcccttagtatttattgatcattcgtgggtgtttctccgagagcgggatgtgtcagggtcacaagacaatagtggggagagggtcagcagacaaacacgtgaacaaaggtctttgcatcatagacaatgtaaaggattaagtgctgtgcttttagatatgcatacacataaacatctcaatgctttacaaagcagtattgctgcccgcaggtcccacctccagccctaaggcggtttttccctatctcagtagatggagcatacaatcgggttttataccgagacattccattgcccagggacgggcaggagacagatgccttcctcttgtctcaactgcaagaggcatgccttcctcttatactaatcctcctcagcacagacccttcacgggtg

SEQ ID NO: 1882137 - DNA, 4001 bp, Homo sapiens
acaaagacaacatttcagtagaagtttaaggttgcgtgttgtgggcttgggaaggggtagagatctttatttcctttcattctaattctgtgccactgatacctgccagtaaaatacatgaaacatattccagaaagagttgatttagtagatgaaaaatgcgtctcccgagaccagagaaggtaccttttctgtcttgctatcatttccataataggaacaatgtttacatttcctcagcccatgcagtgcctctaatgtattcatgttctttcactctccagaggcaggaattgaggtattagagattttattttttagcgactgcatcaagcacttaagatctgacaactgtgatgtgtattctcacttggtattaaaaaataaaagcttctgtgtttgcatttgattagagtcactcagctgggtggctgattaagcaggaatagcgaaagcaccttccttcagaaacactgaatcctggttaatgtagtgtaagattacggatgggtgtagtcacataatttttattaaattgaagagattagctctgctgaaaaatcccactgtgacagcaaactctaggtgcaataatggtacctaacacttctcaaacccactacagggccccaaatggtcttatttctgaatcttctttcagttccagtgagaaagcttcattcaaatattcaggatagttacctgaaattgagtttgcactgtttttttttttttttttttttgagaggtgatgcaaaatcagcacaaacatttgtagtctgtgaactttagctatattctctcagtgtaaataaaaatgacacacactctctttcctctagttgcttaaaaggcaaacacttttccccagacggaggctccggtggccacaagggggccgtcggaaaagatcccaactggaagcccagagtgtgtgatttgtttgtctaacatgcataaaattgttgcctcttcctccagactcaggataacttggttatcccagttctaggaagggaaggttaaaaagccataaagaaggaaagaaagataacttttgaaagccaaaacctcccatattccctggagtgaagcagagtagaaagtgcaggtactggaaagagtgaacagcacttttctttctttctttttttgaaacggagtctcgctctgtcacccaggctggagtacagtggcctgatctcccttcactgcaacctccacctcccaggttcaaacaattctctacctcagcctccggagtacctaggatcacaagcccccgccaccgcgcctggctaattttttttttttttttttttttttttagtagagacgggggtttcaccatcttggccaggctggtcttcaactcctgacctcgtgatccacccgcctcggcctcccaaagtgctgggattacaggcgtgagtcaccgtgcccggcctgaacagcacttttttagacaacaaagaaggctacaaatggagtccatttacatactgcacacgaggggcttggggaggattaattggttaatgtttggcaagctgagcttggaagacaagttgtgcagaggtgctgttgtcacttactactgttattaattaacaaggtgaatgccaagcaaaaacaagcctcggggtgtgctttcatttcttaacgccatatgcgatgtctattgcaggagtgattcgggaaagttacctcaaaggccacgaccagctggttcccgtcaccctcttggccattgcagtcatcctggctttcgtcatgggggccgtcttctcgggcatcaccgtctactgcgtctgtgatcatcggcgcaaagacgtggctgtggtgcagcgcaaggagaaggagctcacccactcgcgccggggctccatgagcagcgtcaccaagctcagcggcctctttggggacactcaatccaaagacccaaagccggaggccatcctcacgccactcatgcacaacggcaagctcgccactcccggcaacacggccaagatgctcattaaagcagaccagcaccacctggacctgacggccctccccaccccagagtcaaccccaacgctgcagcagaagcggaagcccagccgcggcagccgcgagtgggagaggaaccagaacctcatcaatgcctgcacaaaggacatgccccccatgggctcccctgtgattcccacggacctgcccctgcgggcctcccccagccacatccccagcgtggtggtcctgcccatcacgcagcagggctaccagcatgagtacgtggaccagcccaaaatgagcgaggtggcccagatggcgctggaggaccaggccgccacactggagtataagaccatcaaggaacatctcagcagcaagagtcccaaccatggggtgaaccttgtggagaacctggacagcctgccccccaaagttccacagcgggaggcctccctgggtcccccgggagcctccctgtctcagaccggtctaagcaagcggctggaaatgcaccactcctcttcctacggggttgactataagaggagctaccccacgaactcgctcacgagaagccaccaggccaccactctcaaaagaaacaacactaactcctccaattcctctcacctctccagaaaccagagctttggcaggggagacaacccgccgcccgccccgcagagggtggactccatccaggtgcacagctcccagccatctggccaggccgtgactgtctcgaggcagcccagcctcaacgcctacaactcactgacaaggtcggggctgaagcgtacgccctcgctaaagccggacgtaccccccaaaccatcctttgctcccctttccacatccatgaagcccaatgatgcgtgtacataatcccagggggagggggtcaggtgtcgaaccagcaggcaaggcgaggtgcccgctcagctcagcaaggttctcaactgcctcgagtacccaccagaccaagaaggcctgcggcagagccgaggacgctgggtcctcctctctgggacacaggggtactcacgaaaactgggccgcgtggtttggtgaaggtttgcaacggcggggactcaccttcattctcttccttcactttcccccacaccctacaacaggtcggacccacaaaagacttcagttatcatcacaaacatgagccaaaagcacatacctaccccatcccccacccccacacacacacacacacacacatgcacacaacacatacacacacacgcacagaggtgaacagaaactgaaacattttgtccacaacttcacgggacgtggccagactgggtttgcgttccaacctgcaaaacacaaatacattttttaaaatcaagaaaatttaaaaagacaaaaaaaaaagaattcattgataattctaactcagactttaacaatggcagaagtttactatgcgcaaatactgtgaaatgcccgccagtgttacagctttctgttgcagcagataaatgccatgttgggcaactatgtcatagatttctgctcctcctctcttttaatgaaataacgtgaccgttaacgcaagtaactctttatttattgttcaccctttttttccttaaggaaaggactcttccaaatatcatcctatgaacagctcttcagaaagcccattgaaagttaaactatttaacgtgaaatccattaactggaataattgagtttctttatttttacaataaattcactgagtaaataagttggagctggaattctgagctttgtgtttggactgtctggtctgtagctaaaggaaaaagttaggaggggaatatttatttaaatctatcagttcattgcctggtcaggtctctggcctataaacatgcaaaaaaactaattcatgttaaagtccttccagatcctaatttctaaagcaatcaggagagaaagcttttagaatggcacatcatatctcattgatgccaacatggttttgtccatggttc

SEQ ID NO: 1882138 - DNA, 4001 bp, Homo sapiens; identical to SEQ ID NO: 318509

SEQ ID NO: 1882139 - DNA, 4001 bp, Homo sapiens; identical to SEQ ID NO: 318524

SEQ ID NO: 1882140 - DNA, 4001 bp, Homo sapiens; identical to SEQ ID NO: 318542

SEQ ID NO: 1882141 - DNA, 4001 bp, Homo sapiens
taaacagacaacttacagaatgggagaaaatatttgcaaactatgtatctgataaagatctaatataacaaatccataaggaagaaaaaatgacaagcataaaacaaccccagttaaaaagggcaaagctaatacaggagcagaaaatcaaactccgcatcttctcacttataagtgggagctgaacaatgggaacacatggacacagggaggggaacaacacacaatggggaacaacacacaacacacactataattttctgtagggggttgaggagagggagagcatcaggaaaaatagctaatgcatgctgggcttaatacctaggtgatgggttgataggtgcagcaaaccaccaccacacacgtttatctatgtaacaaaactgcgcttcctgcacatgtaccccagaacttaaaatttaaatcaagaaaaggcaaaggacatgaacagatattttctcaaaagaagacactcaagtatatgaaaaaacactcatccttactaatcatcaaataaataaatgcaagcaaaaaccacagtaagatgccatctcacatcagtcacaacagctataattaaaaagtaaaaaaattagatgttggccaggctgcagagtaaagggaatgcttatacactactgttgatggaaatgtaaactggttcaggtactgtggaaagtattttggagatttctctaagaacttaaaacagagatacccttcgacccagcattcccattactgggtatatattcaaaggaaaataaattattctaccagaaaaatatatatgcactcgtacgttcatcagcatgttattcacaatagcacagacatggaatgaacctaggtgcccatcaaaggtggattggataaagaaaatgtggtacatatacactatggaatactatgcctccataaaaaagaatgaaattatgtcctttgcagcaacatggatggagctaaggacataatcctaagcaaattagtgctggaaaagaaaaccagataccacacattctcacttataagtggaacctaaacactgagcacacaggaacattaacatgggaacaagacatgctgcaggctatgggggtgggggagagaggggagcatgggctgaataactacctactgggtactatgctcactaccagggtgcactgtacaaaagtaacaaatctgcatatgcactgtgtctggaaaaaactgaaattataaaaaccaagagaatatgtttctaatgaatgtagactttatttgatggactggactagaatataatatttttttaaggggaaaggcattgggggatgcacaatgtctacaggtttctaaacctctctggtttctcacctaattcatagtctcttatgtcattttcatagttttcatattctgcctttccacctcttctttttaacaagtaaaattcctcatagcatacaaaaaaacaattttataaaaaacccatattatagatcagggacctgtggattatatgctattagaactatacaaaatgtctctatatagttttctgtatctttggaatatctttgggtgaagctgcagaccttcttggtgagtgttacagctctgcgcagagccaaacagtgagcagcagcaagactgcaaagagcaaaagaacaaagcctccacactgtggaaagggaccctagcacgttgctgttgctggctctggcagctgcttttattcccttatctcaccccacccacatcctgatgatcggtccatttcatagagagctgatgggttcattttacagagagctgcttggtctgtttacaatcctttagctagacacaaaagttctccaagtccccaccagattagctagacacagagcactgattagtgcgttcacataccttgagctagacacagcatgctgattggtgcatttacaatcctccagctagacgtagtaagttctccaagtacccaccggactcaggagcccagctggctttgcctagtgcatcccggccgcgggcggagctgcccgccagtctctggcgcgctgccgcactcctcagccgttgggcggttgacgggaccgggtgccgcgtagcaggaggtggcgcccgtcccctcggggtggcgcgcgggagcctgcggttggggggcggggggcggggggcaggggacgggggcggggaggagggtgagggctccagcatggcaggctgcaggtcccgagccctgcccccttgccccgcggggaggtggctgaggcccagcgaaaattcgagcgcggcgccggcgggccatcactgttggaggacccagtgcaccctccgcagctgctggcccgggtgctaagcctctcactgcccagggccggcggcgccagccgaccgctcaagagtgcggggcgcgccgagcccgcgcccacccggaagtcgcgccgagcccgcgcccacccggaagtcgcgctggaccggcgagccccgcaggcagcccaggttccggcccgcgcctctccctccacacctccccgccagcagagggagcccgctcaggcctcagccagcacagagaggggctcccacggtgcagctgcgggctgaagggctcctcaagcgcggccagagtgggctgaggccgaggaggtgccgagagccagcgagggatgccagcaagctgtcacctctcagaaatacaggaagaacatcaataatgttcgaagttataaagtagtaggtttctatcaagagtaaaacataaacgaagttataaagtagtaggtttctatcaagaataaaacataaacgatcaaagaattccttataaaaacattttttatttctaggaatcaaaacataaatataaaatttgagagtccaccaaaaaaaattagatgccagatttcactataattatcagggaagcgcccaaatgggttgtttacggcgcctcggggaaactttctgtttcgtgttaagggtcttgaaccatgatgtttagaaaaccatgggctgatgctttcagaacctctgtgatttttgcctccgacactgcatccaatagactagcatgttgattagggaaagctaaattcaataaaagacgactgtaagtggggtcaccaccttgaggggtcatgttagaaaagtagatgataaggtggtattgatagagtattgaagtctgggctcaaatggttgcccggggcctttcaagaccaatgactgataagaataggtaatgttcaggacatagagtttaggattgggggacactgtgagttaagggccatgacagaagtcttcataagtaaactgttaattgacacaagctgctacctgcccaggtgagcaatctgttggcccagaggagagttgcttactgacataaattgatttgcagaaatttcctgaagcaaacaataagttatttattggtttgcagccttactttcctgaaaaataattttctggaatgaattgtgaaatcatgttgacacagatggcctcaggtttcagttcggataattaagctgtgtaaatatagaaagtcgaaggtttctgggtgctgttgattcacagtatgcaacaatgatcatattacttttatttactatgagcttcagctgaaaatccaaaagaaactttaatttcagatatttaatgaaatcattatagctgtggtaatttcctttagctgggtgtgagtgtgtgatgtgagcgtgtgattgtgtgtgtgtgtgtgtgtgtgtgtgtgtgtgtactctggcagcatattccaaataatttctgtaaaatttcagtttgaaattaatagaagacatattaaattgtttaaactctttgttatttaaattctatattactttagtcgattactctgtattattacggcaaagctttgatatgttgccctgaatttaaagaaaaggctgttcggcctaaaaacaggaatattttattaccaaaaagaattaactaccatatgtcatttacagaaaaga

SEQ ID NO: 1882142 - DNA, 4001 bp, Homo sapiens
ttcacctgaggcgattctcctgcctcagcctacctggtagctggcattacagacgtccaccaccatgcccagctaatttttgtatttttagtagagacaggattcactacctgttgaccaggctggtctcgaactcctgacctcgggtgatccacccacctcagcctcccaaactgctgggattacaggcgtgacccaccgcatccggcctagaccgttgttgaagctggttttcttcttctttcctcagttcttttcttttacatcttccccccatcattgctctgcccatccgaaggctgtggctggcacaggacagaatagaacctcctagcctcaagttccaaacccacactctccaatagccaggctctcagatgggaagcttcaaagccttgtgacagcctggctgaacctctccagcctgggccctccctccatttcctgccccggaaacaggcatctcctctggccacctcccaaagcctgtctggaagcctcaggcacccgctcctggaagcctgtacgattcacaacaaacggcctgtccacccagtcgtgctgagcacacccctattcccccgagctctgaactgtcctttgcccaggctaggacaacatctcagagccttctgcctgctgcagactcggctcagcccaaatcactccatgaaattggggtgtggcatctgcctcaaggagcatttctacaacctctgctgcctctaccgcaaatgaaactggctctcacccactggctctcggtgacgggcacagtgcggagccccacagggagtgtgtagaagtcaaaggccccagtgacttctgtgcagtcagccgcacctacgacagccaaagcgccaggtgtgagcgccccgacagcctgagccccatctggcctgccctacagcaggaagacccctcgtgcatgcaccccagaagtcgccactgggcctgcagagaagcagcaaccagaggctctgcccttcactggctgaccctgggacctgcccttcaaaatcaggccttctccttgaccagacgaggtggctcatgcctggaatccctacactttgggaggctaaggcaggaggatcacctgagtccaggagttcaagaccagcctgggcaacctagtaagaccccaactctataaaaaggagtttttttttttttgagacagtctcactctgtcacccaggatagagtgctgcggcatgatctcaattcaccgcagcccctgcctcctgggttcaagcaattcccctgcctcagcctcccgagtagctgggattacagacgtgcaccatcatgccctgcaaattttcatattttagtagagacggggtttcaccatgttggccaggctggtctccaactcctggcctaaagtgatccgcccgcgtcagcctcccgaagtgctgggattacaggtgtgagccaccatgcccggcctacaaaaaaaatttttttaattagccaggcatggtggcatgtgcctgtagtcccagctactcaggaggccaaggtaggaggattgcagctcaaagctgcagtgagctgtgatcaggccattgcattccagcctgggtgacagagtgagaccatcacaaaaacaaataaataaataaataaataaataaataaataaataaataaataaaaaatctgggcctcccaccaagggtgggaaacatcagaaagctcagaggaccacacctgcccgttcacctgtcctgggctcctgctgaagccagggctaccagatgggggcaaaagacctcccttacgcaagtcccaaaccaccattacctcccacgagtacaggtaggcggggtgttcgtgcatcaggtacggccaccagaggttggcacccagcaccttcagctggccctgggtcccagcctggttgtccacgactttgttttctgcattcaaaagacacacttccaacttgaactggttactgcacttgacggagatctggtaattcaccagccctgcaggaggcaagagagaccagggcttagggagggacatgacctgggtcacacaaacgggaaggccccacaatgaccactcccaggcactctcatttgcttctgttgctttttttttttttttttttttttttgagatagaatctcgctctgtcacccaggctggagtgcagtggcatgatctggactcactgaaacctctgcctcccaggttcaagtgattctcctgcctcagcctctggaatagctgggattacaggcacctgccaccacatccagctaatttttgtattgttagtagagacggggtttcaccacattagccaggatggtcttgatctcctgacctcgtgatccgcctgcctcggcctcccaaagtgctgggattacaggcttgagccaccgtgcccggccctgaaccaatgcgcccagcccgcttttaatttaattttttaattttttttttttttttttttttttttttttttttttttgagatggagtctcactgtcacccaggctggagtgtagtgctgcgatcctgactcgctgcaacctccacctctggagttcaggtgattctcctgcctcagccttccgagtacctgggaatacaggaatgcaccaccatgcccggcgaatttttctattttcagtagagacggagttttgccatgttggccaggctggtctcgaactcctgaactcaggtgatccacccgcctcagtctcccaatagattacatatattattaatgaattgcttcctttaacaccctattcattgaattttccagtaaaccacaattactaattactcctgaaatcagaaaagaggttaaaaagattttataacagtatcctatgaaatctactactttcaagtaatagtagttgaattaccaaaacccgtcactcaagccaatgactacaattaagatatgagtaacatttcctagataaataaagtcaattaattatatttgcatctgggaaatagagaaagtacatataagccatgattttgaagtcaaaagagagagaatatttgccaaggaggggtgagttatagtatgtaattataacatacagaagttttttgtatgctggtaactaattttaatttcctacatttttatgtagatttctgctattcttgtcctattttcctaatcatctttctatatgaatgactacataattctgagaataccaaaagagacagacacagaaccaatcggattcctttcttcttgaagcttctgcacagcaaaagaaactatcaacagagtgaacagacaacctacagaatgggagaaaatttttgcaacaatgcatgtgacaaagatctaatgtccaacactgataaggaacttaaacaaatttacaagaaaaaaaaaaaatctcattagaaagtgggcacaggacataaacagacacttcaaaagaagacacacatgcggccaacaagcatatgagaaaaagctcaatatcactgatcattagagaaatgcaaatcaaaaccacaatggcataccatctcacaccagtcagtatggttattattaagaagtcaacgccgggcatggtggctcacgcctataatcccagcacttcaggaggccaaggcaggcagatcgcatgaggtcaggagttccagaccagcctggacaacctggcgaaaccccgtctctactaaaaatacaaaaattagcccagcgtggtggcgggtgcctgtaatcccagctactcaggatgctgaggcaggagaatcgcctgaacccgggaggcagaggttgtagtgagccgagatcataccactgcactctccagcttaggtgacagagcgagactctgtctcaaaaaaaaaaaaaaaaatatttgaattttgtttaaatcgctaacacatactgggcatttaataacaaaaaaaaaggacatgagattgtgatccttatgaaggtttgagaggcatttcactagggttcaacatacagcagt

SEQ ID NO: 1882143 - DNA, 4001 bp, Homo sapiens
cagacaacttacagaatgggagaaaatatttgcaaactatgcatctgataaagatctaatataacaaatccataaggaagaaaaaatgacaagcataaaacaaccccagttaaaaagggcaaagctaatacaggagcagaaaatcaaactccgcatcttctcacttataagtgggagctgaacaatgggaacacatggacacagggaggggaacaacacacaatggggaacaacacacaacacacactataattttctgtagggggttgaggagagggagagcatcaggaaaaatagctaatgcatgctgggcttaatacctaggtgatgggttgataggtgcagcaaaccaccaccacacacgtttatctatgtaacaaaactgcgcttcctgcacatgtaccccagaacttaaaatttaaatcaagaaaaggcaaaggacatgaacagatattttctcaaaagaagacactcaagtatatgaaaaaacactcatccttactaatcatcaaataaataaatgcaagcaaaaaccacagtaagatgccatctcacatcagtcacaacagctataattaaaaagtaaaaaaattagatgttggccaggctgcagagtaaagggaatgcttatacactactgttgatggaaatgtaaactggttcaggtactgtggaaagtattttggagatttctctaagaacttaaaacagagatacccttcgacccagcattcccattactgggtatatattcaaaggaaaataaattattctaccagaaaaatatacatgcactcgtacgttcatcagcatgttattcacaatagcacagacatggaatgaacctaggtgcccatcaaaggtggattggataaagaaaatgtggtacatatacactatggaatactatgcctccataaaaaagaatgaaattatgtcctttgcagcaacatggatggagctaaggacataatcctaagcaaattagtgctggaaaagaaaaccagataccacacattctcacttataagtggaacctaaacactgagcacacaggaacattaacatgggaacaagacatgctgcaggctacgggggtgggggaaagaggggagcatgggctgaataactacctactgggtactatgctcactaccagggtgcactgtacaaaagtaacaaatctgcatatgcactatctgtgtctgaaaaaaactgaaattataaaaaccaagagaatatgtttctaatgaacgtagactttatttgatggactggattagaatataattttttttaaggggaaaggcattgggggatgcacaatgtctacaggtttctaaacctctctggtttctcacctaattcatagtctcttatgtcattttcatagttttcatattctgcctttccacctcttctttttaacaagtaaaattcctcatagcatacaaaaaaacaattttataaaaaacccatattatagatcagggacctgtggattatatgctattagaactatacaaaatgtctctatatagttttctgtatctttggaatatctttgggtgaagctgcagaccttctcggtgagtgttacagctctgcgcagagccaaacagtgagcagcagcaagactgcaaagagcaaaagaacaaagcctccacactgtggaaagggaccctagcacgttgctgttgctggctctggcagctgcttttattcccttatctcaccccacccacatcctgatgatcggtccatttcatagagagctgatgggttcattttacagagagctgcttggtctgtttacaatcctttagctagacacaaaagttctccaagtccccaccagattagctagacacagagcactgattagtgcgttcacataccttgagctagacacagcatgctgattggtgcatttacaatcctccagctagacgtagtaagttctccaagtacccaccgaactcaggagcccagctggctttgcctagtgcatcccggccgcgggcggagctgcccgccagtctctggcgcgctgccgcactcctcagccgttgggcggttgacgggaccgggtgccgcgtagcaggaggtggcgcccgtcccctcggggtggcgcgcgggagcctgcggttggggggcggggggcggggggcggggggcaggggacgggggcggggaggagggtgagggctccagcatggcaggctgcaggtcccgagccctgcccccttgccccgcggggaggtggctgaggcccagcgaaaattcgagcgcggcgccggcgggccatcactgttggaggacccagtgcaccctccgcagctgctggcccgggtgctaagcctctcactgcccagggccggcggcgccagccgaccgctcaacagtgcggggcgcgccgagcccgcgcccacccggaagtcgcgctgagcccgcgcccacccggaagtcgcgctggacctgcgagcaccgcaggcagcccaggttccggcccgcgcctctccctccacacctccccgccagcagagggagcccgctcaggcctcagccagcacagagaggggctcccacggtgcagctgcgggctgaagggctcctcaagcgcggccagagtgggctgaggccgaggaggcgccgagagccagcgagggatgccagcaagctgtcacctctcagaaatacaggaagaacatcaataatgttcgaagttataaagtagtaggtttctatcaagagtaaaacataaacgaagttataaagtagtaggtttctatcaagaataaaacataaacgatcaaagaattccttataaaaacattttttatttctaggaatcaaaacataaatataaaatttgagagtccaccaaaaaaaattagatgccagatttcactataattatcagggaagcgcccaaatgggttgtttacggcgcctcggggaaactttctgtttcgtgttaagggtcttgaaccatgatgtttagaaaaccatgggctgatgctttcagaacctctgtgatttttgcctctgacactgcatccaatagactagcatgttgattagggaaagctaaattcaataaaagacgactgtaagtggggtcaccaccttgaggggtcatgttagaaaagtagatgataaggtggtattgatagagtattgaagtctgggctcagatggttgcccggggcctttcaagaccaatgactgataagaataggtaatgttcaggacatagagtttaggattgggggacactgtgagttaagggccatgacagaagtcttcataagtaaactgttaattgacacaagctgctacctgcccaggtgagcaatctgttggcccagaggagagttgcttactgacataaattgatttgcagaaatttcctgaagcaaacaataagttatttattggtttgcagccttactttcctgaaaaataattttctggaatgaattgtgaaatcatgttgacacagatggcctcaggtttcagttcggataattaagctgtgtaaatatagaaagtcgaaggtttctgggtgctgttgattcacagtatgcaacaatgatcatattacttttatttactatgagcttcagctgaaaatccaaaagaaactttaatttcagatatttaatgaaatcattatagctgtggtaatttcctttagctgggtgtgagtgtgtgatgtgagcgtgtgatgtgtgtgtgtgtgtgtgtgtgtgtgtgtactctggcagcatattccaaataatttctgtaaaatttcagtttgaaattaatagaagacatattaaattgtttaaactctttgttatttaaattctatattactttagtcgattactctgtattattacggcaaagctttgatatgttgccctgaatttaaatgaaaaggctgttcggcctaaaaacaggaatattttattaccaaaaagaattaactaccatatgtcatttacagaaaa

SEQ ID NO: 1882144 - DNA, 4001 bp, Homo sapiens
acagacaacttacagaatgggagaaaatatttgcaaactatgcatctgataaagatctaatataacaaatccataaggaagaaaaaatgacaagcataaaacaaccccagttaaaaagggcaaagctaatacaggagcagaaaatcaaactccgcatcttctcacttataagtgggagctgaacaatgggaacacatggacacagggaggggaacaacacacaatggggaacaacacacaacacacactataattttctgtagggggttgaggagagggagagcatcaggaaaaatagctaatgcatgctgggcttaatacctaggtgatgggttgataggtgcagcaaaccaccaccacacacgtttatctatgtaacaaaactgcgcttcctgcacatgtaccccagaacttaaaatttaaatcaagaaaaggcaaaggacatgaacagatattttctcaaaagaagacactcaagtatatgaaaaaacactcatccttactaatcatcaaataaataaatgcaagcaaaaaccacagtaagatgccatctcacatcagtcacaacagctataattaaaaagtaaaaaaattagatgttggccaggctgcagagtaaagggaatgcttatacactactgttgatggaaatgtaaactggttcaggtactgtggaaagtattttggagatttctctaagaacttaaaacagagatacccttcgacccagcattcccattactgggtatatattcaaaggaaaataaattattctaccagaaaaatatatatgcactcgtacgttcatcagcatgttattcacaatagcacagacatggaatgaacctaggtgcccatcaaaggtggattggataaagaaaatgtggtacatatacactatggaatactatgcctccataaaaaagaatgaaattatgtcctttgcagcaacatggatggagctaaggacataatcctaagcaaattagtgctggaaaagaaaaccagataccacacattctcacttataagtggaacctaaacactgagcacacaggaacattaacatgggaacaagacatgctgcaggctatgggggtgggggagagaggggagcatgggctgaataactacctactgggtactatgctcactaccagggtgcactgtacaaaagtaacaaatctgcatatgcactgtgtctggaaaaaactgaaattataaaaaccaagagaatatgtttctaatgaatgtagactttatttgatggactggactagaatataatatttttttaaggggaaaggcattgggggatgcacaatgtctacaggtttctaaacctctctggtttctcacctaattcatagtctcttatgtcattttcatagttttcatattctgcctttccacctcttctttttaacaagtaaaattcctcatagcatacaaaaaaacaattttataaaaaacccatattatagatcagggacctgtggattatatgctattagaactatacaaaatgtctctatatagttttctgtatctttggaatatctttgggtgaagctgcagaccttcttggtgagtgttacagctctgcgcagagccaaacagtgagcagcagcaagactgcaaagagcaaaagaacaaagcctccacactgtggaaagggaccctagcacgttgctgttgctggctctggcagctgcttttattcccttatctcaccccacccacatcctgatgatcggtccatttcatagagagctgatgggttcattttacagagagctgcttggtctgtttacaatcctttagctagacacaaaagttctccaagtccccaccagattagctagacacagagcactgattagtgcgttcacataccttgagctagacacagcatgctgattggtgcatttacaatcctccagctagacgtagtaagttctccaagtacccaccggactcaggagcccagctggctttgcctagtgcatcccggccgcgggcggagctgcccgccagtctctggcgcgctgccgcactcctcagccgttgggcggttgacgggaccgggtgccgcgtagcaggaggtggcgcccgtcccctcggggtggcgcgcgggagcctgcggttggggggcggggggcggggggcaggggacgggggcggggaggagggtgagggctccagcatggcaggctgcaggtcccgagccctgcccccttgccccgcggggaggtggctgaggcccagcgaaaattcgagcgcggcgccggcgggccatcactgttggaggacccagtgcaccctccgcagctgctggcccgggtgctaagcctctcactgcccagggccggcggcgccagccgaccgctcaagagtgcggggcgcgccgagcccgcgcccacccggaagtcgcgccgagcccgcgcccacccggaagtcgcgctggacctgcgagccccgcaggcagcccaggttccggcccgcgcctctccctccacacctccccgccagcagagggagcccgctcaggcctcagccagcacagagaggggctcccacggtgcagctgcgggctgaagggctcctcaagcgcggccagagtgggctgaggccgaggaggtgccgagagccagcgagggatgccagcaagctgtcacctctcagaaatacaggaagaacatcaataatgttcgaagttataaagtagtaggtttctatcaagagtaaaacataaacgaagttataaagtagtaggtttctatcaagaataaaacataaacgatcaaagaattccttataaaaacattttttatttctaggaatcaaaacataaatataaaatttgagagtccaccaaaaaaaattagatgccagatttcactataattatcagggaagcgcccaaatgggttgtttacggcgcctcggggaaactttctgtttcgtgttaagggtcttgaaccatgatgtttagaaaaccatgggctgatgctttcagaacctctgtgatttttgcctccgacactgcatccaatagactagcatgttgattagggaaagctaaattcaataaaagacgactgtaggtggggtcaccaccttgaggggtcatgttagaaaagtagatgataaggtggtattgatagagtattgaagtctgggctcaaatggttgcccggggcctttcaagaccaatgactgataagaataggtaatgttcaggacatagagtttaggattgggggacactgtgagttaagggccatgacagaagtcttcataagtaaactgttaattgacacaagctgctacctgcccaggtgagcaatctgttggcccagaggagagttgcttactgacataaattgatttgcagaaatttcctgaagcaaacaataagttatttattggtttgcagccttactttcctgaaaaataattttctggaatgaattgtgaaatcatgttgacacagatggcctcaggtttcagttcggataattaagctgtgtaaatatagaaagtcgaaggtttctgggtgctgttgattcacagtatgcaacaatgatcatattacttttatttactatgagcttcagctgaaaatccaaaagaaactttaatttcagatatttaatgaaatcattatagctgtggtaatttcctttagctgggtgtgagtgtgtgatgtgagcgtgtgattgtgtgtgtgtgtgtgtgtgtgtgtgtgtgtactctggcagcatattccaaataatttctgtaaaatttcagtttgaaattaatagaagacatattaaattgtttaaactctttgttatttaaattctatattactttagtcgattactctgtattattacggcaaagctttgatatgttgccctgaatttaaagaaaaggctgttcggcctaaaaacaggaatattttattaccaaaaagaattaactaccatatgtcatttacagaaaagagtaaa

SEQ ID NO: 1882145 - DNA, 4001 bp, Homo sapiens
agctgctaataaagttgcagcgaggagaagcgcagcgacggcgtcgggagagcgcgcctagccggctcgcgagtgagtgagggtccccggcgcgcgcgggcgaggggaactgggggctgcaggctctgccccggcggactcgggccgaggcgggggcgttcggccgcggacggagcggaaacgacccagggcctgtcgggcgggaggtaggccgagtcctggcctgccggggtcccggctggcggacacggtgcggcccagcggctgcggaggcctcgctggctgcccggggcgtcctgaggcggggccggggctggccctcgtcccagccccgctgttaccgcccagactttggagggaggcgtctgggacgccctggaggggaccccctgaccccgcgctgtcctggggagcggtttgctttcctaactcatcggatgtaccaccctggatacacacccttgataggactgcggtgctcggccgggcagcctgggctgctgcactgcgaagctgtccaatggcttgatgaatccgtgccgccgtcgctttgtgtttcaaagataaggatccgcgcttatcggtgggaattacactctgggcagttgtgaccggctactgcaatcagctggtagttagacctggtttctgccacttgccatgtcagttttcaccactgcaaggatttcttctacttcatgtaaacttctctgtgctgcaaagagaatgccaaagcagcgtctttttgccttcaccatattcagccgctggccgggtcctatacttcaatatcagggctcaaattaatattccagtctcttcccctccccttttcccctctcctcctttcagctgctgttactacgtggagtttggagcctaagctttgaaaactcccatgtggcgcgcccgtcttaagtctgagcatgctcagtagccaaaacagatttttggttgcagaactcgggcgaggatacttggggtatttggacgtttgccggcttcccaacagaatgttccggttctggtggtgatggcattggagaatggggcttaggcaagcctgtaggtgaggaatggctgaacaccctgagccagatgtttatcttgattgtaaagacaatgtttcctgaccagctggagctttggggggggggggggggtgttgcggggggagggagcaattttggttgcttgtgcatttaaatgggtgtggcgctaagtatatcttgtttaccttatctttctgtggaaaagttttgatgtctaggtttgtcacatcatgcctgttgcctagcactaccaaaagggttgttatctagcagcaaagattgaataggtggaggtcgtggcttggcctcacagaagttgagaggaaagggtacttgggttgcgtttttgaaaattcgtatttaaaactagagtacttgaatttccttagagtacctgaattgcccagagtgaattagtttttaattttaatttgaaagacaaaagattgaaaaccttagtcccagtaggtttagtaacattccaaatagcttacaatttctgctagatgccaatgcagtagtatccattgtggggaaaacagtacctacattcagtgtgacagtttcacatttatggatccaaatatcattatgaaattagtgttccaaatttaaggagctatttgcagatgtataacaaattattttagtcttttattcctttggtaactattaatatttttttctctacagtgaaaattgtaaaaatgcaaaacttagacaatttaacaaaacttaaccttcataaaggttgtagatactatgtttagatttataaagtttaattttgatgattatttgtgtgattgttcctatacagcttcctttccttccctttccacattgttgctccctcagtcttttttacattactgctgttaatttacccatgtatctttgttaaaaataccttattcatcattttgtgcttccattcctttcagatcatagctgaaataagcaagaaaagttagattaaccttctcaactgactttactctcaggttttaaaggcatccacatgatatggtctagttaaaaggaggaagagagcagcaaactggaaaaaaagaataaaatattttcgtaggttctgtacagatctggtagtattatctgcgtgtctggttcactgtggtaggcgccacagaaatgggtagattgataatgtgttggatttctttcccctctggcaaagtcagctattaatttcagtgggagacagtggcagaatgttgttactaatgaggtttgaatcagattgttgtttactgttggttatgtaacatgttgctgggagtattattaaaagttgcattctgcagcaaagtagaggcaagtaaattctgcttaccctcttcactgggttttaattcttggctgaacctgaaggcacattagattacaaccataattatacctgggcagcctgtctgtttcctgttttcatcatgaacccaaacattatgatttgcagtgatgatcttttttgtcctttgcattgaacggaggcagtgtgttttctccctctactgaaaacagatttgtaacttggtcaaattaaagattttagtgttttgaaaactaggcagtaaaataccagtttttcatttcttaatacagttacttaagttgaaataccatctaaaaaaatctatttcatatatattctttgtctttatgtaaattttaatattactagtactttgtagagttaaagaaactctttttgtttatgacatatcagtgtttattattaccagatgtatatgttggtctaggcaatgagccacacatctgggtgaatttcagagctgacttgagtacgcttgaggatataggtgtctattctcttggtttatcagtcttccctgtttttacttctagacgatctatattccttgtatctgtctgtctgtctctctgtctctctgtacactaaccacaaagaaggcaaatagtttatttcttcaaatgttacaagcagcttatagcctatgatttgcccgtcttctcatagggtcaaagacattgagtaagattcccttttataagggatactagtagcctgaggaatgattcttgtctccaccagtctggatattctagagaaaagaatacctggatattctagagaaaagaatattctagagaaaagaaaaggcccaaggaagctgggatgcaatatagggtgctttcccatcaaaacagatgatgaaggacccttggaagctgacccatggcatccccccgccactgggttctagctctgtcgcccaatctggagtccagtggcgcaatcttggctcactgcaacctccgcctcccgggttgaagcaattctcctgcctcagcctcccaagtagctgggattacaggcacccaccaccatacccggctaatttttgtatttttagtagagacggtgtttcaccatgttcgccaggctggtcttgaactcttaacataccttgtttttccacttctgaagttaatagaataatagtcattggaatttgcagttcattggtgttgtcacataccctttacctctaatcagaagtctgaatctgagaagtttgtttactaaatgggaggtaaagatttagaactcttttggaagaattgttaaaaactagattgttgttaggactaatctcataggccaccttaatattctaacagctttgttgttttccaacctggaaagatggggtaattacagagttcttaggtttttcataaataatcagctagttctgggctatttatttgagagtgtctctctctgtcgcccaggctggggttcagtgacgcgatcttgactcactgcaattctgcctcccggcttcaagcgattctcctgcctcagcctcctgagtagctgggattacaggcacccaccaccacgtccagctcattttttgaatttttaatagagatggagtt

SEQ ID NO: 1882146 - DNA, 4001 bp, Homo sapiens
aaaattatgtaatttatccagttaaatgttatgttatcagacctattgggtcatggtttagaaagctatcttcttcccactgcttagctctatatgccaagagtttttttgctttttttttttcttttcaagtattaacggcaatgttcagaggcaagaagaggattagctgaatacattgggttctaatttctgtctccctcaccctggccacgtaggctccacaggtccaggcaaaggctgcagatccaagcataaggcagcttcctccctacatctttccccctagaagcagccaggcaagaccttggcctgcctcttcctcccagggaggctcctaggcctctgtgccacgtaggcaagataatcggaatgtctggaatggaactagtgctctaagtgccaagcaagggaagggagaacggttaagcttttccttcaggtccccaggagcctgcagctgccacacagcaggccgggagcccccgccacaacccagggaggaatgcttgccaagaaggcctgcccagctactgacacttcctcccagaggtcttaaaggaaatcccagtaaggcctgagtacccaagacagccagatcacccgtgccagagactgggcatttggggatgggctgggctttcatagaaaccttcggaattgctttcacttaattcttttattttaaaaaaaagttctagaaaataaagacacatcgatagcaatttgtatttccattgtcctcttaggtctgcatggctactgtgcgagctatgacaccctgcagcctgcaatagcttctttgttttatggatgagctcaatggaacccttatggacgcaccggaccatgcccaggaccagcgaggcccatccataccccaccactggctggaagggcgctggtgtgaacgtgggtccttgcgggggtccctacctcactgcggtcaggagggggcaattcacacatttcctcatgcaggggaccttcaagcctccctctgaggcgcagactgagtaaaaagggcccagagatactgtcccgcacccccatccagtgggaaagggccactcaaggccagtcaggactcccaacccaagttttatgccttatactcctataactttaccatttgctcttttcgcgaggctgaccccctccctctccccccccaccgcctcctccagaaactgaagaactgcaacaaagtgtccaattatacacgtcttcaaaggtactttacttgcttcccaattatcaacttttcacctgagtacttagtaaggcccaaggatcctgcaaaagtgcaacaaggaataattgacacagaattggacgaatgactttgaccatacgggacttctctcttaacgctcagcgtggctacctggggacgccttctctggcctccctgattcgtcagatttgttcatttccttgacttaatcccgctgaaatcgacccgaactagccgggagtctcacccccaaagtgctcctccaagaacccgcaacgactgactctctcgtcttctttaaggagtttctccctcagaacggatgaggatgtcacacagaaagaacaaaatcacaaagttcgagttccggaggaccagacggcccctgccccccatcccccgggccagatttagccgagggaaccgcacgtacctgaagccgaggccggcagagagggagcgccacgtctcaggtctcggccggcgcccccctccggggtgcagccacgtctgaaccgggacagcgggcgggggagccgcagagggacccagtgagacgggggagggagcccccaaaagtcagcgctcggccgcactcgcactggggaggctggaatggaactcctggggtgcagcggggctcccaggagcgaaggtgggggtcctgtaccgggaaggggcggggcccggggaggggctcggggaggtcaggcgcgggtggggcgctcgagtttcaccccggcggggaggaggaggaggaggaggcggcgcggcggcgggggcggggcaggggcggggcggggcgggggtgggcccaggctgtcccccgctccccgcccagcgctctccgccccgcgctctccgcgcccgctcgccccgcgccgatctacttgccgggaaggcggcgccggtggcggctgctctccctgagcccgctcccgagcgctgctttcccgccgcgggtgggcttcgcagcctcaggccagccgcggcccttggcccgctgcagccccggccctccaccttccccgtgcaggggcggcccggccagtgtcgctcatcccgggacgctcccttctcccacccaggactgccccgcggagctggcttggacacccaactttgccacctcgagggtcgtctctgctgggcgcgaacctgcccacccaccggttggccgcgcgctcggggaccgtgctcgtggcccccaagccggtgcccccattctggaactcagcgagtagggggcggctctggggaagtggcagggggcggctgcagctgctgcctccacttccctagccaggtgctgaagaggatcctcggagccgctctggcccccaggcgctggatgactggcaccagcgctcctcgcacctggtgagcgacccccgcccgattcctgcgtggccttggcaggagcccctgaccgcgccgcgccgcgccgcgccgctggccgggacccggggactgcagcggtcggctggtgggtggtgccgatctcgggtgggatccatcagcaggcacctgggcgggggttgcgcgtacaggattaggacgaccgtcagtccgggggcgcccacagttgagctagtgcacgggctggaagtttgtgtacccgcctgtgccgaggtctgagcatggagaggtaaggagccggagtgtcgcggtgggcgagacgggacccctgcccaacacccggaaaggtgcgcacactggtctgtgcccgcccccggcgcgcctccaggctcgcactgccgcgagccgggggcaggggacacggaggtcgggacttggcggttcgggagcggccacctcgcagccccaccggcttgggcaggttttcctgctttccttacaggggaaccgggaggcaatgggacttgggctcaactccgccaagcgccttggttaatgaaagacactaaggcgggggatgcagaggcctggggaaccaccagccaggtgcgctgcagctaggcgagcccctttcaccaggcatccctccgctgctccacggattttgcacaccgcggctcagggtttcagaccccagggtttcgggcagatcgggctccagagggaatggtttctcccaagatgtgcgtgggaacggtcgtggaggagtgattcccccggctcgctccccgcggcggccggtgcctggcttggagcggtcacatccctgttcccctggctttggcgggaagcgcgttcacctcctcgccctttgcttgctttgtaccaggatgccgcggccggagttgggatttaactttcctgcgcctgcggcgtcctcgggattcccggcagggggcgctgcgagcgagcgctcggaggacgaggcgccacaggcagttgctgggtcctgggcgagtgggcgggagtcccaggcaacaaacagcagaaccaggcagatcttgcaataatttcattttgggggccgggggttgggggagctgatctggtggctatagagagctgtcagccttgctaggagaggggacaggaaaggtggtggccagacataaatgctctaactagaaaggtctcttccagagaaaaagatcgctgtaaagtcttccttgtctgggcatctgccttccttgtgactgttacatttactcagaaagaaatcgaaattgagggaagataacgtgagctttgtttaataccgttctgctttttaggggtactttagttaacacatcaggagtcacaaatgattgttctggtttgttttgaagaaagacaagttttacgt

SEQ ID NO: 1882147 - DNA, 4001 bp, Homo sapiens; identical to SEQ ID NO: 318179

SEQ ID NO: 1882148 - DNA, 4001 bp, Homo sapiens
taattagtggagtttctcaaacttcagaccctaggccctcttcctctaccaccagcagatctcatttatacccatggccttaaggtttatttctgtagtttagactactgagtaatgtgctactgcaaaaagaccatttgggtttctcaaaggtaatttaaaaattcagctgtttaaatgctgctccccagctgaatctagggtcattatgctcatcagtgtgcaagctggacacctagcagttatggacacctccactattaccacgtctagttggctctgtcatccaactataaacgatcttatttcactaattttactagtccaagctggtctcttgtctagacaacaataagcaacctagttcaactaccttttcttgcaaatctgattttccaccatggatttatcttgctttaataaagccagagggagcctgaagtggtctggcttctttacctacctcttcagcctcattttgtaacactctcacctcccataatagccatcttacaagcctcagtaaggactcagttctaaaacagggcactgaagagggaaagcagccaaaactgtctcaaaagtaagtggactaacggtatcttttttctagcccaagcctctgtatatgtcattcccccagttttgccttgtgaaaaatatgacacatacctttagtctcaactctttctcaggtttccctaagaaaatcctatcacggaactcatctcatagtgaagttttacatttgtgatgacattccctccacttatctatgtttccaaagggaagaactgtgttgtgctcatcatcgtgttctcagctcctagtacagtgctttcaataaattttttgaatacctctatacattatttgtcgtttcctgcaaagcaaaggcagaagatatggcaacattaaatgtacaatttagttggaggaaaaatacgcattgagtgcagtaaagcacacctgtcactagaaatcagtctagttctagccacgatttttgagtcactggaagaaagtacatttctctttgggccaaacacaagctattttaaggctattaattatggtgacagcagtgaatactgatcaaaaaagaacccctcctcccttataactttttagaaatagctgtttctggcagttaatcacttaaaacacaaatgccaaagtgcattaatatatttattcacatcctcactgtcttaaatgtgtatttacagactccagcaggtaattatgtcagtactcctcagactcccagaaatttcaaatgatccaggcaactcttgtgaagatcaaattttcaaaatcctcaccaaggacatcctaagagaaaaaataaagtactcaattcgacagcaaatatttttgtattacattttaatcaagaacttggtaatatgcctgcgatttcacaagcttttaaaaaactcaattactacacataaaaacaaatcttaaagagatgcagaatgccagtactatgcgtatttatttccctgggcttctcaggaagtatcagcaaaaccttcccaaaaataagctgtggaggctatcccatttattaactcaccttaatagctacagacagagcaacactacgaatgtaccactgacattaaaactcactagagaaggaaccccaatttaaaaggtgataaaaattcccattacaaagtgctttaagacatatcaccctaccttcaggtcacctttatgctcccagatggtattcagctagcagcagtctacacttcaggcatccatcttccacctgaacaaaaattagaactggctaagagaaaccatacacttaaggctagcagggtcaagatcacgcgtggaaacgtaaaagcagcaactgttacttatgcagctcctacaccaaaggtatcaaatttaagggcaggaaaaggctgcaaagcgtttaatttacgccttttttgacaccacattcactagtttccaaagtgaatgggcaacacaaaggctgacactgcgtgaggtaggctttatggcataaggttgctgactggctgacagtaatgccgattacagcctaaaaacggacaatacatttcagagaaattttctcacgatttaaaatccgacttaataatgaaaagtgaaatgcgatgcgttttaaatggcgactggtcttgcacgaacgtgaaaactcacctgtagggtaggtgatcactcccgacgagcaccgcacgtggaaacagctgtaaccaggcacgctgcttttaagttattttatacgggggcagggcaagcataaagtcagttatacggtaaggccttttcactgacgaaaataaaaccaggcttatctggagaactccctggcatagtcgatgatgtaaacacaaatcgacgaagctccccgtttccaaacgtgggaacgcaggcctgaggccaggccgctgcccttgttcacggccccggacacttcggacacaggccgccgcagtcgactcaccagactcagggtggccgcgttcccccgcccggcgcccctgcgtgagagaccacgcggccacagccaggcgccatcccagaggacccagagcaaaaaccacagcaagctcgcaccaaaaggaagaaaggacaggcttccgtcccacaatgcttttctacaagtggaaggacccactgtccgagagcgcgaggggggagcgggctgtaccatcggccgctgcgctatggcgagacgccgccgtgtggccggagggagaagtgccagtgagggaccgaggggcgtgtcaccaaagggaggaggagcctgggttctcagcccgagtcacctctgcggatgtgtggccagttctttccacagaggaggtatccagacatccccccacccgaccagggtcaagagcatatgatcagtgctggcagcggcaggagcccaaaggactttagaccacgtattttgggacccgacagaattcatgagtccagctgaggaagagtagagtcattcattcgaaagatatttagtcagcacttactatgctccaggccctggcctgagtgcctgggaatcaggtgtgggtgagccaggcaaggtttctgtggtacattctgcttgggtgagtaggccactgaccaagtgagcccggatgctgaaattctacaatgtaagtgccaggagggcagcaaaagagggtcatgccatagggtagcgctgtccgatggaaacagtgtgagccatgagtgtaattttaaattttccaattgccacataaaatgtgaaaagaacgccgggcgcggtggctcatgcctgtaatcccagcactttggcaggctgaggcaggtgatcacctgaagtcaggagttcaagaccagcctggccaacatggcaaaaccccgtctctactaaaaatacaaaaattacttgggcttggtggcgggcgtctataatcccagctacttgggaggctgaggcaggagaaatggcttgaacccgggcggggtgggggtggaggttgcggtgagccgagatcatgccacttgactccagcctggacaaaagggcgaaactccgtctcaaaaaaaaaaaaaaaaaagtaaaaagaaacagatcaaattaattttaataataacccaacatattttaaatatttcaacaggcaatcaatatgagattattaataagatatttcttttatatctactaagtcataaaaatccggtgtatattttatacttccagcacatttccgttcagactagacacatttcaagtgttcagtagctcatggggctaggaataggaagactggaagtgaactccgagcagatgtgtgaaggcggttatgcaagatctggagacagcaggccttggccagtgtggctggagtcgagtaaggagtgtagagtgacaagatgcagctggagagccaggcaggagcaaggcacttagggtcttgtcacacagggcaaggtgttgggattttatgctgaaatcttagagttgattaatt

SEQ ID NO: 1882149 - DNA, 4001 bp, Homo sapiens
aagcagcattctaaatttttacctttaaattagacagtgggtaatttcccaaggattctggggtccctgtcattgcctcagggtttccaaccatctcaggtgggtagaaacaatgcatgcaacacgattcctgagttctgaagaaccatcagcagtgctaggagtaaattcagaggacaggcaggccagtgaaagaaatgcattcaaaccaccttaaagacagatactagaaatactgagcagcgccatgccctggttcactttttctaaccctttcatagatacccaaggcataaaacaaataaaattagttttctttattgtttgtgctaactaaaagatcccctctacatatttgcaagatacaaagtttgctcaatacttttaattaaggaagaaaaagaaataaaataacgtcttgctttgttcaacacaaaatctgttaaaaggatccaaacataatgcaatgtcattgcacagtcttttttattaggaaactaattcactactgcaataacctattaaagaaaagggaatacagaaaaaggtgaagtttattagttaggaaataagttcacaaaggaccaaatgtgtgattctagataaatttgctttgaaagttgaaaaacaatgagaagaaaacacatgacagacttcttgagctcttctgagaacttagggagaaaatcaagggcaaggtgagacccaggcacagtgagatcaatgctgctcatactgtcagattttgaaccagcagccatggagatgacaaagttccagaatctttcttgttaaacacaactgggaaaaactgaagacaaagatgagaataggaaaaataagctgctatagttacagtagcatttagtgtaaactatgaattcagttgctaatagtcttgttgcagatgcactgtacttttctaaacctaagtattctttttcccaccaagcaagtccactccggatcaggtatgacatttaacatatcatttttttaaaaagataacaaatataccagaatcatcaaaaaagacaagtaccatgcgtcttctaacaaagaaatggctatttacatgtcttctgatacacaggcattgatttaaatatggtcactcatgataaagaccaattagcatagaaaatctttagaaattaaaggctacattttcccccaagagatgtattacattgctaaagtctcaaaagtgggggaaagtaggatgaggagttacagaccaccttcaagaatagtgtttttatggccagtaaatattatggttatataacattatggttgctaaacagagtaagatttaagtgttataaacatttttaattatctaactttacctaaaatttttcctatacttttttcttttttaaaatttctatttccttctatattgaatctgatctttcctgaggtccttttttattactggacaaacacaaaagtgcagagactattataatgaatctttacgactaatttactttataaattaaaagggatgtaaacgtttcctataacatcaagagtattgctttgcattctgatatgctttcttgagccaaagcttggaaactgcacataaacccgcagattctcttacttgtgccaaagtctgagagtcatccttactgatgtgcccctgatagtgccagaggtgactgattactgtcatgctttttacctctctgggtttccttaaaaactggaatgcccagagggagtgtcgcacaggtgaatgccatctgttaggagttaaagtgggcacaaggatgagaagcactgacttcgatgtcttaatccttttgacctagtggaagcctcacctgagccagggacaggctgcatcacaaatgtcggccagcacagcgctgcccctccaagggtggcaaggggacatcctctgcctgggcagcccttcgattttggaggtcttaaccggtggaaggcagcacggggcaaaactgcctcaccttctcagtcctccacatcatgcggctatattctagctcaatacaatcctcagtctcagtatctgctgagtgaccagcagtctatggccacaggccgtaacagcctggttagctgagcaaactatcacaaggacagaaaaccaaacaccgcatgttctcattcataggtgggaattgagcaatgagaacacgtggacacagggtggggaacatcacacacaggggcctgtcgtggggtggcgtgggagggatagcattaggagatatacctaatgtaaatgacgagttaacgggtgcagcacaccaacatggcacatgtatacatatgtaacaaacctgcacgttgtgcacatgtaccctagaacttaaagtataaacaaaaaacaaaaaactcgagtgcatttcagctgcccctgcaatgtggagggggagaaacctcttcagacacttcagccacaaccgtaacacacaaagagctcttcaaacacaataaaaagacaaaaagaccgacagaaaaacagacgagaaatatgagtaggcaaatgacctaacagctccactggccaggaaatttatgaaaaggtgcacaacatcacttatattcagggaaatgctattaaagtagcaataaggtatcgttttacatccatcacaccaagaaacattaagaggtctaacagccaaagttacaagggaggtagagaaaaggcacactcctcaattactagtgaagatgggatggattttaggaaagcattctggccatttcttttctttctttcttttttttttttttttaattttttttaagacagggtcttgctctgtcacccaggctggagtgcagtggcacaatcatggctcactgcaacctctgcttcccaggctcaagaagtgatcctcccacctcagcctccaaagtagctgggactacaggtgcatgccaccatgcttggctaatttttgtattttttgtagagacagggtctctgttgcccaggctggtcttccttgaacacctgggctcaagtgatacacctgcctcggcctcccaaagtgctgggattacagtcgtgagcatacccaatgagaatgcatgtcattaattctgtggttagctaataagaagaaaatgaaaagtaagagatccctcaatttttccttgaacattttttaaaactaacacaaaggtgccaatgaatttgagtattttgcttacatccatccactccatccaactctcattcaaatgctcattgtgcacctgctaaggtcaggtgcgtgctttctgccaagcattccaagaggaatgtcacatagtctctgccctcaggaagcgtaccatctggtggggaaagagatgcttccaacaattctgatacctgtgtgatagggccagctgcaatttctatattaattaaaaatagaggctgggctcggtggctcacgcctgtaatcccaacactttgggagttccaagcaggtggatcacctgaggtcaggagttcgagaccagcttggccaacatggtgaaaccctgtctctactaaaaatacaaaaattagctgggcatggtggcgggtgcctataatcccagctacttgggaggctgaggcaggagaatggcttgatcctgggaggtggagattgcagtgagccgagatagcaccattgcattccagcctgggtgacaacagcgaaatgctgtattgaaaaaaaaaaaaaaaagataacctgagattctactcctggggatctcttctatagaactatcagcaccaataaacacagtcttgtatcaggatgttcacgtagaatgacatcagaatctacatcagaatcatgtagaatgacaagaaactggaagcaagggaatgcctaccaccaggaaaatggctgagtatataacatatgttcataccagggaatattatacagccattaaagaggaaaaggatgaagttctgttcaatgtcttacaaggatatctggaggaactgttcagggagaaaagag

SEQ ID NO: 1882150 - DNA, 4001 bp, Homo sapiens
tgtagtcaggaagacaacctgtatgcttagaacttgaggcctcagatttaaagtactgtgactattcatgacataaaattttcctctttccttaggagccatttcggttttaccaactcagactgagattgtggctgagtttgataagtgcagactgctattctttcttaagacctctccctttggagcacattaaaagtggagagaactgctgtaagtaacccatgcaaaaaaacacataaacaaatcccaaacacacaaaaaacagactatttttactactggttaatttcttgcagtcaccttagtgccctaaaagatgaagagtatgatgctctaaggcaaagctattgataacattaaacttttcagaaagacacattgctattggctctgaacctgtcactaatgagctgttcaactttcaaggcctgaatttcattctccaggacagaggttggcaaaccatagcctatgggccaattccagcctgctgtttttgtatggctctcaaaataagaatggtctttaaatttgtaaatcattgaaaacaattttgacactgaaaattttatgaaattctaattcagtgtccataaataatgttctattagaactatagacttgctcatgtgttgatattgtctaaggctgtgtttgcactagagctgcaaaaatagttgcaaaaaccacatggctgaacaagcataatattatattacctggctctttacagcaagtttgctgatccctgctctagaacagcagtgcataataaactttctgaattggtggaaatgttctctaatattggagttgtccaatagggtagtcagcagccagattctgagattaagaaattgattaatttttatcaacttacacagccacatgtagcatatacctactgcacagcagagctccagaaaagtgagggatggactttagatcctaagaattctctaaaattctgatacttggctgggcgcggtggctcatgcctgtactcccatcactttaggaggccaaggcaggtggatcacgaggtcaggagttcgagaccagcctgaccaacatggtgaaaccccatctctactaaaaatacaaaaattagctgggcgtggtagtgcacgcctataatcccagctactcaggaggccgaggcaggagaatcgcttgaacccaggaggtagaggttgtagtgagccgagattgcgccattgcactccagcctgggagacagtgagactccgtctcaaaaaacaaacaaaaaaacctgtaatcccagcattttgggaggccaaggcaggcaaatcgcaaggtcaggagtttcagaccagcctggccaatatggtgaaacctcgtctctacttaaaataaaaaaattagcctggcatggtggcaggtgcctgtagtcccagctactcgggaggctgaggcaggagaatcgcttgaacccaggaggcagaggttgcagtgagccgagatcgagccactgtactctagcctgggcaactgagcaagactccgtccccccccaaaaaaaagtctgatactctacataatttttcacatcataattttaagtcccctacccccatctgagctatagtaatttaattgggacctacatgacaagaagactacatacgttacttatcttggtgtcacacagggctgtcagacatctggggtcctgatggaggtagatgtcattcaggtgaaggcatctaggattcaaagaggtaaagaatgacaggctgtccctaagacaacctgtctttttctgcaaacagaaaaaaattgtttgcacccagactaggatcaactccacaggagtcattccactctcagaggtgcaaaacactgcccaaaggtactcagctacaacaccaaaacagtgcttggagccaaacctcaataaagacagtgtttgctcttccaacagtgtaacaccatcacaggcaccacatgagcctggatagctgacaaccgctggatgattcctgaaacagctttctcattatttgtttcagatacctaggcactccaggtagaagacgtatcagttgaatattgactgcaaaacaggcgtggaagcactaattgcagaccctgttgtcaaaccctttaacaggaatccccttctgtgttttcagttgttttatgcaacattcagggaggtcctgccatgtgccaagcactgcgattgggatctagcagtgaataaaacaagatatattgtcctttccttcatggatcttacaaatacaggttaatttacctcccatttgtttcctgatagataccaactagcccacaggcctggcacagaggaggtagtcaatgttggaatgaatagggatatttacctgaaaactgcacatgcagactgtcacctgccactatttcctcccttcagatgggtgaaggatgccctactttcaagtcatcctaaaaaggaagacaagcaaacttagtgatctagtacacagaatataataaatagcaatgcattgtgtgtgtgtgtgtatatatatatatatattttttgagatagggtctcactctgtctagactgagtgcagtggcatgaccatggttcactgtagtctcaatctcctgggtcaagtgatcctcccagcttagcctcccaagcagctgggactacaggtgcatgccaacacacccacctaatttcttttttgttttttatagagatgagatctctttctgttgcccaggcttgtctcaaactcctgggttcaaatgatcctcccacctcagcctcccaaagtgctgggaatacaggtgcgagccaccgtgcctggcctgtatatttcaaaattgctaaaagatactaaatgttttcaccacaacaaaatataagtatgtgaggtgctagatgtgttaactagcatgatttactcattccacaatgtaaacatgtatgaaaacctcatgttgtaccccatataacatatacaattactgtcaattaaaaaaaaaaaaaaaaaaagacgagcagacatgatatatttcccatgaatttgaatgtttggcaccctggtctaaaatagcagctcctaaggacccttatctggagagatggaaatagaatgctgcttgccatttaccccaatttctatagcctcaggaattattttatttaccattatttgccttttccctgcctatagtactataaagctaaccatcccccaagccctacagatatcactagccttaagaccccatatgtaaaaggctattcacagttgaggcattcacacaaagcactcacatttagttgagagaatcctattaagggaatgccaactgatctaacaaaacaagctttgataaacaactcccctgccccccaacatcctccccatttcctcctgtggaaactagtatgtcacttttcacagcaaccgagggtcatctcttctcaaaagattagcattccaggccaggcacggtgcagtggctcatgcctgtaaccccagcactttgagaggcaggagatcacttgagcccaggagttcgagaccagcctggacaacgtcgtgaaaccttgtctctactaaagcctgggcaacataatgagactttgtctctacaaattaaaaaaaaaaaaattatctggttgtggtggcacacacctatcatcccaactacttgggaaaaagcattccaaaacaaaattactacaaagggaactcaatatctaccactttaatggggcaacaactgttcatttctgaaaatcagtaagcaactaaagcaaatatactgtcagcccaaaggagaaattagtgtggttgtagttgttcagttcccagagccccctcaatcaatattttaatattttattaaacagctagagaatgcccataattttaaagtgaattaccatcaatgtttccctaatagggaatccatccctctacaaagggtgtcatgactagcttttatggtgggtagtaggagccatg

SEQ ID NO: 1882151 - DNA, 4001 bp, Homo sapiens
aggagtgtgaggctgcagtaagccatgatggtgccactgcattccagctgggtgacagagactctctttcaaaaacaaaaaagttagggtatggtggctcatgactgtaattccagctacttgggaggctggggcaggaggattgcttaatcccaggaggtcaagactgcagttagccgtgattgtgcaactgtactccagcctaggtgacaagaatgagattctgtctcaattaaaaacaaaaacaaaaacaaaaaacagcagcagcagcaaatcaccatttgccatttcaactaaaatgattaattcaggctatgatcatcaatggataaaatcacttgataaaaaggactttacaaatgaaggaaccaggctgtcattacctgaacccagtgatcacatcagccttactaaacataggagagccagagccagacatcctgtttctccagatgggaggcaatacacagtttacagtaacacctaaagagccaaaaaacttgaacctaaatctagtcaaggcatttaaagctaacttccatttaacaaaataatgaaaacaacgaacagattaaataagaggtttcctgactctcggccagtgaataaatctttccactataccactactaacctctctgaccctcaggacaaatagaagctgcaaccttaagactgattttcctttttctgagacggagtcttgctctgtcgcccaggctggagtgcagtggcgcgatctcgcctcactgcaagctctgcctcctgggttcaagccattctcctgcctcagcctcccgagtagctgggactacatgcgcccaccactgtgcccagctaattttttgtatttttagtagagatgggtttcaccgtggtctcgatctcgtgacctcgtgatccacctgcctcagcctcccaaagtgctgggattacaggcgtgagccaccgcgcacgaccaaagactgattttcaaaaggcactgatatggcttggattatatgtcccctccaaatctcatgttgaaatgtgatccccaatgatggaggtggggcctggtgggaggtgtttgggtcatgggggtggattcctcatgaatggcttggtaccctcctgatatggtttggctgtgtccccacccaaatctcatcttgaattgtagcttccataatttccacgtgttgtgggagggacctggtgggagataactgaatcatgggggcagttcccccatactgttctcatggtagtgaataagtctcacgagatctgatggttttataaggggagaccccttttgcttggttctgattctctcttgctgctaccatgtaagaactgcctttcatcctccgccattattgtgaggcctccccagccacgaggaactgtgagtccattaaacctctctttctttataaattacccagtcttgggtatgtctttatcagcagcgtgaaaatgggctaatatacctccccatagtaacgagtgaagtagttgttagtgcacacaagagctgcttgtttaaaggagcctggcacctccttctctctctcttgctccctctctggccatatgacacggctgccccccttttgctttctgccataagtaaaaacctcctgaggcctcaccagaagccaaacagatacgggtgtcatgtttatacagcctgcagaactgcgagccaaatataaattacccagtctcatgtattcctttatagcaacacaaaacaaacggacgcaggcacctttctccatccaaagcattcaaaaaccttaattttgttttctctgtctgctcccagactagaactaagcagccaaagtgaatgcttagcacactctcggggaagcacagctctgtcttgcaccagtgccagacgccaccagaacagtggcgcaggcaaccggatgaagacaagacattcctctcccagcagtgtaacaccatcacaggaacggttctgtccggatggctgactactgctggaaagaaacctgctcaattttaaatctgccagccactttttaaagttgctggatctcacaatgccaagtataaacagttacttttttgatctgcgtctgaaagagtgcatgcaagcttaattttgtaaattaaactgtatttatttaaaaaggcagggtgatagcagaatctaaaaagaatcttaatgagatttaggtaagctaaggcttaagttccaattttatttctgctcttcagatcgtgtttgcattcagcagcttgcccttgccacgtgttaaaatggccataaaatgtgagaaaaagtcaaggcaaactctgactgcctgaccatactgataagaaaggtcacaagcatagtcacctcaaagactgagcactgtagagcatgtcttcttcctcaaggccaatgatacttcagataccagatggtttcatttttcaattgcggtccaaagagagggttgagttgggccagaattgcaatcagccaactaaaagaaggatgggagagaaacaacgaagcggtgaaatcatgttggaacatgaccattttcaattagcatggaaaaagtacactagcaaaacttaaatctactgcattcacaccaaactttccatatacattgtgttaacagcagcatgtctgataacaaaatgtttcccaggacgtagcctgccttcatcttgagacatatcacaaagcagtgaggctttgtcacagtaagtctctgacttttctctcattacctgattatctttccaagtatccaagatttcctgaattcatgatatcttcgcttcaaagcgttttcacttaatctcaatttatcatcatcacaacttccaacctcagggaaaatgtgtcttattttatccattctccaaatgttaagacccacaacctacatgacacacccatttttactggtacaggcaaggtttgattgtagcttatcatcttcctattagactataacatgtaaggtccccttttctaatccccatcaccaccaaaatatgtaacacatcctactgtggaacttaacagaatgggcatttaccttctccccagtttacttcagaatctaaataatgaggtattcctctgtattacagactaaactataaaggaagtaaaatggtgtcacatcttacttcagggtttttttttttttgagatggagtctcgctctttcgcccagtccagactgcagtggtgcaatctcggcttgctgcaagctccgcctcccgagttcacccattctcctgcctcagcctcccgagtagctgggactacaggcgcccgccaccacgcccagctcattttttgtatttttagtagagatgggttttcaccgtgttagccaggatggtctccatctcctgacctcgtgatgtgcccgcctcggcctcccaaagtgctgggattacagacgtgagccacctcgcccagccgacttcagggttaaaagtgaaaaacaggttgggtgcggtggctcatgcctataatcccgcactttgggaggataaggatcactcgaagccaggagttgatgaccagtctgggcaacacagtgagaacccgtctctataaaaaaattttaaaaattcactgtgtttgctgacttgcacttgtagccacagctacccaggaggctgaggtgggagcatcccttgagcctgggagttcaaggctgcagtgctatagttacatcactgcactccagcctgggcaacagagtgagaccctgtctctaaaaaaagaaaagaaaaatagcatagatttatctttaaaattttcttatatagctcacaaagttctgtataaagggtcttatatatgatacggtaattcatatgccaaataaagttttgagaatcacttagctcagacaaaagcaaacaacaaaaaaatatgcaaatgtctgagtattcaaaccattcttcacttactaaagaaatatttaatgagcacctactaagttctaggcctcagaaataca

SEQ ID NO: 1882152 - DNA, 4001 bp, Homo sapiens
ttacttttgggtttaatttcacttaatcatcttttcattaactcaaggttattttgagttaatctctctggtaaataatgaagtaaactaaggcagagtaatctgtgcttctaaatctaagcaggatgaatattatttttgaaaacatatttccaaaggtacttattttcccccaaagctctattttcaaaggcagaggaatagagaggacattggttaataagtataaaacatatctttttaaaaacagtatagccattctttgcttatagacattcaagatatatacaagactcaatgtcggaaaataacaccctggaaaccatccagaggcttcatctccattacaagctatctgtattttcttcagatattccaaaaatcttttaaacttagcatttttttcttctccccagaccacacttataaaagatgacttgggcttttttgacacaacaattttgtttaagcaaattgagttgctagacaatatatccagaaatttaaccaagaggacaaggcaaaacactttcagatttctagaatcctttaattgtctgcacccatagctgaagtaaaatacaatatcttattaaaaggcccgtactgaaagaagaatcagtaaactcttcttaagaagagtcagctgctcctgcgagtcagcgcatcttcttaaatgcgtgctctgcttctggtatccttgagtcattgctttagccaggctgcttccttgaacttggctgtgaggtgggggaatgtggttctcccttgagaaatgggttccagagagctcgaagatgagcagagtttgcctgggttaggtgaggtccaggtcatgctgtgccaacctctgggaacatgtagcagtggcaaagtgcaaccctctgaccagacatgggcagaggcagactctgacattgggtcttgtatatatatgtgaggcaggccctggtggacttgagtggaagctcagactgcagagtggggcacatgatggggtcccaggctgtgcctggaggagcagactgacctggcccttcagtttaagggccaggaaactgcacttgctatgcacatttgtgctcattctcatctgtgcctcaagtattttctgtctaagtttctgggtggctcctttttagtaaaactggtctgcttaactttgccaatagagtgggctgccacactaaagaggaatgcgtgtttcttggggtaagagaaccctaaagacgttttggtgaaatccaagtggaggggctatttccctaaaatctccccacttgtaggttcctaatccatcaaaagaacctgacaaaagaaacctgtctgggggcaacacagcatcacctgtacccataatcatgttttcccaatactttgaagtaggtgagcaataaagcagccctaggcaatcttagtgagacatcaaacttcacgtctttgtaccaatgtttagcattaggaaaaagactgatgggcctgatcagatgatctttccatttcttcagtttttaaatgtcatggatctaaaagaatggaaacaggggtaaaaagagaacacttatggaggatgattgtaatgcatctcattggtaggaaaatgcagttaagatgtaaatgtcaagaggccacgatttctggattgaggtttttttctataattttaatacaatcttaccacatcttaaagaccacagatacccggctttcctttgaaggtcactcatggcccacagtcatgtcctgatttcttccaggtgatgttctttccagaaagcccccctccctgttcctctggtctgagatggcagcttagggatgtggctgaaattcaagcactagggagggaagtaaagacaagacaaaattggtcaattagtgcagaaacataaatgatctttcatagttccgaacagaattgaggtgaatcaggaaatggatggcatttttcaagtcacatgaatcagcgccccagaattcatcattttcaccaagtgttttgttggtttcttcattctttcacattgtgtgcatggctcacctaaaacagtttagggaaagctatattttactttgaaaagataactaaatacttttgtttgtttaaaaatgatcatccttagttttataatgtgatgagaagcagcttaatgcagatagctttctagcaagcaagacctttgcaaagcaaaacaaacaaaaaacaaagaaattttgtttagaaaaaagaaatacttgtggatacctcaaaatgactttatgaagagcctgcttatatgttgggtgctcggtgagtatttcacacagattactgtctttctcctttcaagcagacagctgacatacccctgccaggctggtgtgtctaagctccaggtgaagagactgtagctcagaaaagttaaagaactttccccagattaaaactcaaaattatatcctcaatttagatccatttcactttaaacaaaggatgcactctaaattataatttggtttatttacctgcttattagcaattattttgtaattaatcacaattatcactaaaatatacatcttttaacaatgcattggtgcagcctgtaaacagcaaaactgaattcaactcccccctacatatatacaaaattatgtaatttatccagttaaatgttatgttatcagacctattgggtcatggtttagaaagctatcttcttcccactgcttagctctatatgccaagagtttttttgctttttttttttcttttcaagtattaacggcaatgttcagaggcaagaagaggattagctgaatacattgggttctaatttctgtctccctcaccctggccacgtaggctccacaggtccaggcaaaggctgcagatccaagcataaggcagcttcctccctacatctttccccctagaagcagccaggcaagaccttggcctgcctcttcctcccagggaggctcctaggcctctgtgccacgtaggcaagataatcggaatgtctggaatggaactagtgctctaagtgccaagcaagggaagggagaacggttaagcttttccttcaggtccccaggagcctgcagctgccacacagcaggccgggagcccccgccacaacccagggaggaatgcttgccaagaaggcctgcccagctactgacacttcctcccagaggtcttaaaggaaatcccagtaaggcctgagtacccaagacagccagatcacccgtgccagagactgggcatttggggatgggctgggctttcatagaaaccttcggaattgctttcacttaattcttttattttaaaaaaaagttctagaaaataaagacacatcgatagcaatttgtatttccattgtcctcttaggtctgcatggctactgtgcgagctatgacaccctgcagcctgcaatagcttctttgttttatggatgagctcaatggaacccttatggacgcaccggaccatgcccaggaccagcgaggcccatccataccccaccactggctggaagggcgctggtgtgaacgtgggtccttgcgggggtccctacctcactgcggtcaggagggggcaattcacacatttcctcatgcaggggaccttcaagcctccctctgaggcgcagactgagtaaaaagggcccagagatactgtcccgcacccccatccagtgggaaagggccactcaaggccagtcaggactcccaacccaagttttatgccttatactcctataactttaccatttgctcttttcgcgaggctgaccccctccctctccccccccaccgcctcctccagaaactgaagaactgcaacaaagtgtccaattatacacgtcttcaaaggtactttacttgcttcccaattatcaacttttcacctgagtacttagtaaggcccaaggatcctgcaaaagtgcaacaaggaataattgacacagaattggacgaatgactttgaccatacgggacttctctcttaacgc

SEQ ID NO: 1882153 - DNA, 4001 bp, Homo sapiens
ttttttttgagacaagacctcacttcatactgtcgcccaggctggagtgcagtggcatgacctcagctcattgcaacctctgcctcccatgctcaagtgatccacccacctcagcctcctgagtagctgggactacaggtacacagcaccatgcctggctaatttaactttttggagagagggagcttcaccatgttacccaggctggtctcaaactcctcagctcaagtaatcctctcgccacagcctcccaaagtgctgggattacaggcatgagccacggtgcccagccagaaataattcctacttcaagaacaagccatgtccaagtagccctgcttggtatctcggcaccctcataccacccccttcattcatccataagataagaacactcccctaagtctggtccagactaccctttttactgtctttgagaacagaagactacaggaaattcagtctcaaatgactgagatcccttttagcaaattatgttaatcctgtggaggagactactgatgtccttcttataatcatcactaccagctaacatgtaagaacttttctggtaacaaaaaaacaaaaaacaaaacacaggattctcaccacccacagttaactgtttaatattctaaactgtaaaacagataaaaatgaagttttctagaaaaaactcatgaaagtggctgcaattacatccgtcatagaacctaaaacccatgtgacaaggtaggaagtgatggctcttacctggctcttcttggttggaatagtggtattcctattaataagtttggtaaagacacctcctagagtttcaatacccagagacaggggagtgacatcaaggagcagcacatccgtgacatcgccggccaacacacctccctgaatggcagctccaatggccacagcctcatcaggattgacagctttacttggggctctgccaaaaagatcctgtacagtctgctgaacctgaacatcaaggaaaaagaacctgtcggcccacacttgggaactacctgagcagaacaaaagggagcacgtgtcctacgctcccagccagatctcaagacaggctaactcaaatctgagaatgtttattcaaataaccatttcgtacttgggttcctgctaatgatcttctaacactcatacactttatacctatagaagtatctccttcatgacccttgtaaatctgggaaggattctcctaagttttattatctgctttcctacacaacacattaaatcatttgaaacagaggatgcaaggcaaggggacttagaagtccacattctcttgtatattatcaactaaagaccaaattatcataggcagctgtagcaataatttgcattgctaacatggggcatggtcttcccttgtgtttattagtgataaagttccatttgaatagtatcggggatactttttcttcttcttttttttttttttgagacggagtctcgctgtgtcgctcaggctggagtgcggtggcgcaatctccactcaccgcaagctccacctcctgcgttcacgccattctcctacctcagcctcccaagtagctgggactacaggcgcccaccaaattttttatatttttagtagagacagggtttcaccgtgttagccaggatggtctcgatctcttgacctcgtgatccgcccgccttggcctcccaaagtgctgggattacaggcgtaagccactgtacccggcctcggggatttcttaatatatgaggcatccacctggtccaggaccttttttttccaggttcattttttttttttttgcatatttccttaaggccatgtatttcaatggaaaaattaagaaaaaaaacaaggtcactatcttaggtccaagataatcctatttaggctaccaagaagaactgcatcttcaacaggtttgtgctcagtcattagttttccacacgttctttcagaatgatgtgttgaataaaatacatcattgcacaaatctttgtcaaagagatgcactaagctgcaaagacacatgtacaaagatggtggccgggggcggggtattaccaaggttttatgttcccctctgacctcaaactttgtttcaatcctaaaaattctatgactgagttcgggatcctccctgctactgcccctaaagaaattctgcccctccctaatttttcatacatacatacatacatatatatatataaattagactcatgtgatctgcccgcctcagcctcccgaagtgttgggattataggcgtgaaccaccatgcccagcctatttttcaattttaacaaaacaaacagaaaagaattctttagtgagtatataatctcatctcccttttaggtcaccccagcagaatgggccatatatttgtgccacctgtcccaagaatacactatgcgccagccctctctctccacgacagaattccactggtccataccttgggcatcctagtcatgccacccacaagaatcacttctcctatgtcactcttgctgacttctgcatcttgcatagctttttggcatggagcgatagtccttctgattagatcagtgacaatcccttcaaattgagcacgggtcaacttcatattcaaatgcttgggtccagaagaatccattgtaagatagggcaaattgatgtcagtctgcaaaggaaatgtttaattgcatgtcagcgagcaggccaaatgacggttacatttattatttcaactaaaatatgaccatgccctaggacagaagacttgcaaaaccaaagggagggtgagatctaatttaaatgaatagtcaccaagaatactttttttttttttgagacagagtctcattctatcgccaggctggagtgcagtggcatgatcttggctcactgcaacctccgcctcccaggttcaagcgattctcctgcctcagcctcccaagtagctgggactacaggcatgtgccaccatgcccagctaatttttgtatttttagtagagacagggtttcagcatgttggccaggatggtctcgatctcttgacctcgtgatccgcctgcctcagcctcccaaagtgctgggattacaggcgtgagccaccccacccggccaagaatagttactctttaagatgcaatgttttgccgggtgcagtggctcacgcctgtaatcccagcactttgggagggcgaggcgggtggatcacgaggtcaggagatcgagaccatcctggctaacatggtgaaaccccgtctctactaaaaatacaaaaaaaattagccgggcgtggtggcacatgcctgtaatcccagctacttgggaggctgaggcaggagaatcgcttgaacccgggaggtggaggttgcggtgagccgagattgtgccactgcactccagcctgggcaacaagagtgaaactccgtctcaaaaaaacaaaaaaacaatgttttatctccccagagataagcactatagaatgttttaataaagtttatagttattaacaagaatgcagcagataagcaggaaaaaaatccccattcagaagataaagaactattctgccactacatattcattagaaccacactactgatgttttccttcaccaagttttaaaaatatcccatgtaggtgaagagaaatgtcaaagttatgttctgaaccaaataacatgccattaaccctgggctctgtaagttccaggacgtttacaagtgatacgaaagctacagacatgctctcattaatgtatgaggactgacttgtatggccatcacatccatggagagcagctgacagtcacaccatgtaatatccagtatttaataaatcccaaatcccagtacaacatgggatcttacagtgtgtaactgagagtgagtccttaaccacctttcttcaggagaagtatcctaaacatttgaatacttaataaatagagttaacacaccatctgtagaatagtgatacctaaatattattg

SEQ ID NO: 1882154 - DNA, 4001 bp, Homo sapiens
ccgcccacctcggcctcccaaagtgccaggattacagccgtgagccaccacaccggcctcaagggttgtttatatgggggtcagggtaccttcactagacttagacttctgaagcccaaactggccaaacttcaccagctttacattatacccacagcaactcagctgtctttcaaggtcattgttcaatcttcaacagactatcttcacttgaaaatttgatgatgacagccgggagtggtggctcacgcctgtaatcctagcactttgggaggccgaggcggcggatcacgaggtcgagttcgagaccagcctggtcaacatgttgaaacccagtctctactaagaatacaaaaagaattagtcgagtgaatctccatctctacaaaaaacacaaaaattagccaggtgtggtggtgtgcatctgtagtcccagctactcagaaggctgaggcaggagaaccacttgacttgagcccaggaattagaggctgcagtgagccaggattgcgccattgcactatctgtaaacaagaaaggcaatggcaattggactctaaccatacatctttaaagtatagtctcacatttcgggaggaagcccaagagagatttaatcagcagggtttctttataagtgaatgttctgaagctgagacctgaagggtaaattaggagttaaaatacaagatgagagtagcaattagctagcacattataaagccattccaggttacaagtaaaagtgatacccttccaaggccaggttaagaacctcagatgttattctaaacacagtggagaattataatttaaatagcatgacttggctacatcactattttatgtagctgttccagcaattcatgttcccttcaactgcccctgccctctcactcagcagtccagttgactttgtcccttcattttaaaaaaacaaaaaaaacccccaaccctgtcaataaaccacgaaaactaggaaggcacgacagcaagtttcagtgctttaacacagaaacacccaattaccaagttgagggctaaaaaaattcgaccaagtagtcccacatcattgcctttagtctacaaatctcagggattatacttgattttcctttatttcctgctcaatctttacttgcacccaagccctactttttctcaaacctatttacatattcttaagttgactcacacctagcaggcttttttcacttagctagccaccttacacacagcccacaagtcaggtgtgccaagtgagcattacagatactaggataagatcatcttttgaaaaacagaagccacctaaactcctacccatacgtttccagtggtactcccaagctctatgtgactaataatcatccccctagtcatgacagcatagcagatgaacatgttgctaaaggtaatttaaacatcatactctttcaaatttactcaaacatctaaaatacccacctatgccacatgagctgtgctattttaatctgctatattgtcttccagtgccctctgcttcaaggactcctggaattctgcttgtttctcattgcctttaaccgtgttacaaacccagtccaaaagtaaacattccaaaacagtcacttaacaagtaaatctgatatgaagctagcccagtccctaaacctacagtatttcactgatactacaagcctaattgattaaaaataccttaccaaaaccagatatgtattttttaaaaccagaacatttattgcatgactaatcgttgacattcttaagatgaactggatgctgcaacagctgccctcttgggtttaggtgttgttccttcacggaatccatgcctgcaggatgtcaaaaacaagaacaagttacttcagcaacatcgatgcatacattttaatttttgttaaacagatttcaatgcgcttatctcagttaaatgctgaaatcaatactgcattcatatgttcagacatttatttttacaacatcactgataagctgaaattcttcactttgcttaaagatacccattttcggatatagttaactgcaactgcaataaaggctcaaaaacttatttggctatactagtcattgggccagtatgtttgttcatatttggcaagagatcacagattatttgtgaaaatggttccctatactgagaatagatcccaactactttcactaagcaaggaaaaaacaattagcatgtttaatggcagacattttctaaaccaagagctttgcattttaacttatttaacatctgtatctactctaagaagtatctactctaagaaaggtcaactatcctacttttaaaagcctggcttcagttcaagctcttaactcctatattgtactaacagaccactcaacattaagcccacaaaaacgttatgaccctaaatgcaaagaaagttgcttcagcacatgaacacacctatgggtgtctacaaagccctgaactgtcttgctatctttaaaactggacactccggagactgagtgggtagaggctagggattctgcaaaatattcaattttgcactggacaatcccaccacaaagaattatccagcccaaagtatcaatagctgagaattgctgaaatagaacatagtaacggaaggagcaccagctttatagttaagtctgcatcattctgaatcttagctgagatcttagatgggttaatctcttagaaactactctttaatatgcaggttctctcagctaagtctacggcggagctgagattctgcatttataactctaaggccaagacttgagtaacaagagcccaaggcaacagcagcaaccagggcaattttctacagcactcttgcccacagccactatactaaaggttgaaccaagcctgactccagaccttattcactactgtcttgacaaattttgacaccaattaaacctaataaatatcaacactttgggaccctagttcaaacaatgctcctgttatttaatttatactactgtttagtgaaaaaactactaataaaatccaaactaactgatgtcaaggttacagcggcagaagataaaagctttcaacatctggcctgagcccaggagttccgagattatcctgggtaacatgacaatatcccattctctacaataaatacaaaaattagctgggcatgtggcagcgcacacctgtagtcccgggtactcgggcggctgagatgagattacctgaggctggggagactgaggctgcactgagccgtgatcgtgccactacactcaagcctgggcaacatagtgaaaccctgcctcaaaaacaacaataaataaaaagcttccaacatctcatccccagtaaccatcagggtactgttatctttttacaagtaaacacgagggtttcattcaagcccactggaccaattatgatcgaacatacaaactgtacctgaatctgcggtatacaatttttaggtgcctcattcgaccagttccggtggtatttcgtcttttagccttggcactccagttatctaaaacataagttcagaaaagatttcaaacggtgttctcccacacaccttgtaggtgttgttaacacacgagttttatgccacctcatcggcatacagatgtacgagttttaagataggcaccaaataaagttcaaacctatgcccccacttaagtgcaatacaaacaaaagctaacacagttggcctgaaaaatgttacttacactttctcttgcgcttggcagggtagccacatttgccacaggtcgacttctgaaggtggtaggccttagagccacagcggcggcacaacgtgtgcgtcttattgcgacgctttccaaacgatgacgttcccttcgtctgcacattaaaggaataaatagttctgaaacctggcaacttctagatttactcgagttctccgggaaaccaattactgataaaatttaaaggcaatcgtaaagatcgaaactgcgggagaagcctcttt

SEQ ID NO: 1882155 - DNA, 4001 bp, Homo sapiens
ccgagactgcgccactgcactccagcttgggcaagagtgagactgtcgccaaaaaaaaaaaaaaaaagcaaagtttaagagggtggaagagatccttggagatggctcactttacctggacagtgtatttgcacacacccagggtattccatagcttgatggttttatctcgagatccagagacaatctgccggttgtcagaggagaaggccacactcagcacatccttggtatggcccacaaatcgcctcgtggtggtgcccctgagagggaggagtttgtcattctcagacttagcaaacactctcattcaacggtcagactcatttcctgggctttgtctctgtctcattgcatcactcatacaaccctggatttggctctgatcacagagtcaagtgactgagtatatgaaagagaagagccaagtgacagagaatcccttcagaattgcaggacatgtcctcactcccacttggggattggctgacaatgccatctgtcatcaccaggaccctctaattccacctgccaattacctgagctttcaaggtaaaacatgttcaaactgctgcccactcagaacttttgcacctggcaaaaatgttcagccacactcctcagcaatgctgagtaacttatttaaagtgagggaggccaaacatcttctgtaggtgtgctctgctttccagttcccaaatggactggatctcccctgggaaaccagccaattgcatccacctcacttctgcccagattcttcccaaggccccagagctaagtgagcagctacttgcgttgtgagatcccagaggcgcagggttccatcccaggagcctgagagggcaaactggccatctgaggagataaccacatcactaacaaagtgggagtgaccccgcagagcacgctgtggaattccatagttggtctcatccctggtcagtttccacatgatgatggtcttatctaaaggaggtaaaacagaagaaaaatcagtgaggaacccgcagcccgtttaacacactggataattcactaagtgtcaaggtcatgagtgggttaacaacaactaaggacgcttaaggagggatggaaacaacagacaagagcagttacagaccaggactgagtggctctattccagactaaaaacgcacgtagaggtaaactgtaccctgataacttttttttttcttgagatggagtctcgctctgtcgcccaggctggagtgcagtggcatgatctcggctcactccaaactccacctcccgtgttcaagcaattctcccgcctcagcctcccaagtagctgggattacttggccagctggcacctgccagcacgtctggctaattttttaactagagatgcggtttcaccattggccaggctagtctctaactcctgatctcaagtgatccactcgcctctgccttccaaagtgctgggattataggcgtgagccaccgcgcccagcctgtatcctgagaacttaatttaggtgccagaaatacagacaccctttcctgaaactcagacgaactcaacagccactttgtgtcttctctgcaaccaaatgcacagcagtttgtggctgtagagtagctggggcctcctatgcctacctctgagggccgacagaaatgtagtaatgaatgctggaaaagccacttcaggcgctacaggattggatgcttttactgaaacctgtcccactcaacaaattttacgattaacagccagacatgattcaaaagtcagacaattcttaacagtgtagcagcaaagcggaagcacaagaagcgtctaaacgcagtcaggaacacagggatagggacggggagaaccaggggcagaaaaagtaggccgacacttgagccacgaggtcctctggagtccacctgcctccccacgagccttgggccgggcggcagctcagaaacagcctctggatttcagcaccgacactcagatggcatgttggggtcatcaccgccccgcccggcccgtaggcccccggccacactacgaaggagaaggcaaaagatattttaaaagtttccaactctccaaccctcctagcagctgcgagctgatgtacacgtaggttctcatctgcaatgtggttcgcccgggttgaggcctaggctcgggtccgcacgccccaattcacaatggggcagagaagtctgtcagtccccgccaactcgcgcgccaccggcctgccacaccacacgcggaattccctacacgacacgcggaatcccccagccctgcaatctcgggtcctgaaatctaccttagtccgtacctcgagaggcggagaggatcatgtccgggaactgcggggtagtagcgatctgggttacccagccgttgtggcccttgagggtgccacgaagggtcatctgctcagtcatggcggcggcgagagcgtgtgtcgctgcagcgacgaggatggcactggatggcttagagaaactagcaccacaacctctcctgccgccgccttgcagtgaaagagagagagaaaagccccccgccggaaccggaaatacccgctcgaccatgcaaaatggcgagccccatgatacatttctgctcaagatggcggcgccatgtaatgcaaaaggcagagggaaattgcaaggcatcacagtcccgtcttccgtacaacaaaatctgactgcactttacaaatacactctgaaacaagcacattcaagtgtttaaaaaggcttctcagggatgatgtagagcgagaagcgaaagaggtgaagtgtacggcacattcccatgaggaccgccgggctgcttccccgcccctatgtggcatagctcgagctccgcctgttccacttggtgcggggagggttgacggggcaaccccaggggagcttaattttcatttcactatcgtgggtaacgatgggcaatttaaaaagtagagtattaaaatgttaaaaataaactttaaaactgtgcttccggagggtgttctcccctcacgaggtttttgttctgatgcacaccaactccggaaggacttagtccaggctggactaaggcaggagagggttactctggatgaactaagaattggtctctttttcccgggcgcggtggctcatgcctgtaatcctaccactttgagaggccgaggcgggtggatcacttaaggtcaggagttcaagactagcctggccaacatgatgcaacctctttccaaataaataaataaaaaaaattaaaattagccaggcgtggtggggggtgcctgtaatcccagttactcgggaggctgaggcaggagaatcccttgaacctgagaggcggaggttgcagtgaaccgagatcgcgccactgcactccagcctgggcagcagagcgagactccgactcaaataaataaatacatacatacaataaaataataaagtaaaaattgccctgtgtgttgctagactgccaatccgttcctgcctaggccagaacacgggaagctctcgcagaaacggaaatgcccaaaggaggaccttaaggttctgacttctggggacatctagtggaaagctctctctgggcccagccagcgtacacaaaagcccaggggtctgggggtccaactgtgccctgaaggacgtgcccagacagggaagcggtggaacacggatacctaactgtccttctgccttccgctcgaccgcaggaatttaaataagtaatggctcccattctcacccatctctgactataagagacagtgttggcaccatgtctattcaagtagttttaaacaggggcacagatcaggatgatagcagccaccaacatctatgcaaaataaagggggcattatacctaagtatatacttttctatttgtgacatctatcaactttcgtttctcatctgtgaaatgagattggaaataatattagtatctacattacatggtggtgtggaaagtgaagaagcaaatgtaaagcgccctgaac

SEQ ID NO: 1882156 - DNA, 4001 bp, Homo sapiens
caaaaattaaccaggtgtggcggcgggtgcctgtaatcccagctactggggaggctcaggcaggaacactgcttaaacccaggaagcgaagggtgcaatgagccaagattgtgccattgcactccagcctgggcaacgaacaagtgaaacttcatctccaaaaaaaatataataataataatagggcctggtgtggtggctcacgcctgtaatcccagcactttaggaagccaaggtggatggatcatgaggtcaggagatcaagaccatcttggctaacatggtgaaaccctgtctctactaaaaatacaaaaaattagccagacctgatggcaggcgcctgtagtcccagcgactcgggaggctgaggcaggagaatggcgtgaacccgggaagcagagcttgcagtgagccgagatcgcactactgcactccagcctgggcgacagaatgagactgtctcaaaacaaaacaaaatagtagtgataaggccgggcacggtgactcacgcctgttatcacagcagtttgggaggctgaggcgggcggatcacctgaggtcaggagtttgagaccagcctggccaacatggtgaaaccccatctctactaaaaatacaaaaattagctgggcatgatggcacacgcctgtaatcttctcagacacccaaccatcggcttctgagctgcggcaactccctttcaccttttcaccgccccccacccatccccaaatccccgatccagcccccaatctgcgatcccaaatctgcgatctagcccagaatccatctcaaaaaagaaaaaaaataaataaaattttgtttaaatagatggggtctcactatgttggccaggctgctctcctgtcctcaagcagtcctcccaccttggcctaccagagagctaggattacaggcgtgagcccagcccagacaagactttaaaaaggcaaagaaagcgggggacggtggctcacgcttataatcccagcactttgggaggctgaggcgggcagatcacctgaggttgggagttcaagaccagcctgaccaacatggagaaaccctgtctctactaaaaatacaaaaccgggcatggtggcgcatgcctctaatcccagctacttgggaggctgaggcaggagaactgcttgaacccaggaggcggaggttgtggtcagccgagatcacgccattgtacttcagcctggggaacaagcgaaactgtctccgagaaaaaaaaaaaaaaaggcaaagataggcaggtgggggctcacgcctgtaatcccaacactttgggagggcgaggcaggcaaatcgcctgagcccaggagtttgagaccaccctgggcaacatggtgaaaccctgtctctactaaaacacaaaaaattagctaggcgtggtggctgcgcacctgtagtaccagctactcgggagactgaggcaccagaatcccttgagcccgggaggcagaggttgcagtgagccgagactgcgccactgcactccagcttgggcaagagtgagactgtcgccaaaaaaaaaaaaaaaaagcaaagtttaagagggtggaagagatccttggagatggctcactttacctggacagtgtatttgcacacacccagggtattccatagcttgatggttttatctcgagatccagagacaatctgccggttgtcagaggagaaggccacactcagcacatccttggtatggcccacaaatcgcctcgtggtggtgcccctgagagggaggagtttgtcattctcagacttagcaaacactctcattcaacggtcagactcatttcctgggctttgtctctgtctcattgcatcactcatacaaccctggatttggctctgatcacagagtcaagtgactgagtatatgaaagagaagagccaagtgacagagaatcccttcagaattgcaggacatgtcctcactcccacttggggattggctgacaatgccatctgtcatcaccaggaccctctaattccacctgccaattacctgagctttcaaggtaaaacatgttcaaactgctgcccactcagaacttttgcacctggcaaaaatgttcagccacactcctcagcaatgctgagtaacttatttaaagtgagggaggccaaacatcttctgtaggtgtgctctgctttccagttcccaaatggactggatctcccctgggaaaccagccaattgcatccacctcacttctgcccagattcttcccaaggccccagagctaagtgagcagctacttgcgttgtgagatcccagaggcgcagggttccatcccaggagcctgagagggcaaactggccatctgaggagataaccacatcactaacaaagtgggagtgaccccgcagagcacgctgtggaattccatagttggtctcatccctggtcagtttccacatgatgatggtcttatctaaaggaggtaaaacagaagaaaaatcagtgaggaacccgcagcccgtttaacacactggataattcactaagtgtcaaggtcatgagtgggttaacaacaactaaggacgcttaaggagggatggaaacaacagacaagagcagttacagaccaggactgagtggctctattccagactaaaaacgcacgtagaggtaaactgtaccctgataacttttttttttcttgagatggagtctcgctctgtcgcccaggctggagtgcagtggcatgatctcggctcactccaaactccacctcccgtgttcaagcaattctcccgcctcagcctcccaagtagctgggattacttggccagctggcacctgccagcacgtctggctaattttttaactagagatgcggtttcaccattggccaggctagtctctaactcctgatctcaagtgatccactcgcctctgccttccaaagtgctgggattataggcgtgagccaccgcgcccagcctgtatcctgagaacttaatttaggtgccagaaatacagacaccctttcctgaaactcagacgaactcaacagccactttgtgtcttctctgcaaccaaatgcacagcagtttgtggctgtagagtagctggggcctcctatgcctacctctgagggccgacagaaatgtagtaatgaatgctggaaaagccacttcaggcgctacaggattggatgcttttactgaaacctgtcccactcaacaaattttacgattaacagccagacatgattcaaaagtcagacaattcttaacagtgtagcagcaaagcggaagcacaagaagcgtctaaacgcagtcaggaacacagggatagggacggggagaaccaggggcagaaaaagtaggccgacacttgagccacgaggtcctctggagtccacctgcctccccacgagccttgggccgggcggcagctcagaaacagcctctggatttcagcaccgacactcagatggcatgttggggtcatcaccgccccgcccggcccgtaggcccccggccacactacgaaggagaaggcaaaagatattttaaaagtttccaactctccaaccctcctagcagctgcgagctgatgtacacgtaggttctcatctgcaatgtggttcgcccgggttgaggcctaggctcgggtccgcacgccccaattcacaatggggcagagaagtctgtcagtccccgccaactcgcgcgccaccggcctgccacaccacacgcggaattccctacacgacacgcggaatcccccagccctgcaatctcgggtcctgaaatctaccttagtccgtacctcgagaggcggagaggatcatgtccgggaactgcggggtagtagcgatctgggttacccagccgttgtggcccttgagggtgccacgaagggtcatctgctcagtcatggcggcggcgagagcgtgtgtcgctgcagcgacgaggatggcactggatggcttagagaaactagcaccacaacctctcctgccgccgcc

SEQ ID NO: 1882157 - DNA, 4001 bp, Homo sapiens; identical to SEQ ID NO: 318573

SEQ ID NO: 1882158 - DNA, 4001 bp, Homo sapiens; identical to SEQ ID NO: 318591

SEQ ID NO: 1882159 - DNA, 4001 bp, Homo sapiens; identical to SEQ ID NO: 318590

SEQ ID NO: 1882160 - DNA, 4001 bp, Homo sapiens
aaaaagccaagttaattttgttttaaacatgttttacaccatcctgcaagagaatatatagactgttgagcaaagtatccagaactgaatcctaataatgacagatacaacttttttacttttttgaaatagatacgtggatttattcctctccaccattaaacctgtgtaaaccctcacagtaggaattaggcctttcatttatggtcccagtggtcttcacaggtgccttgacaaagagctaccaagcaccatctgaattttatggagactaagagcccagtttcagagtccagcagacctcagccaaattccagtttctccactcagtaattaagcaacctgccttaagatttatgtctggggctcctcgcctgtaaaacacacctaccttagggggctgttaagaggattcaatgtaattgaattaagtaggtacaacttaattacaaagcacttttccccaaccatttcaaattatttatctacgtattcatccatccatccaaagcacctcaataattggccaataattcctaagtgaaaggagctttacaacacacgaagaactcttctattatgtcacacgaaattataaatataaatataaaacaaattattttacatataaacgatggaggtaaaaaataaatcggccaataataactagcaagtagtatttggtaattcttttggtgaggccgacttaaaaatttacgaaatattatttattttcattgcaagtctatcagaaatcactaatggtgtagcactgcattcttccctgcttttggttctcaaactacgtatcttagtaaacgcaatttgcagacaaaccaagcctcgctaatcagtgcatcatggctactctggtaaaggaagaaattcactgtttgccaagcatcccatcagatgggtgacttcacagccactggaagaaatctttctcatgttcgagtagatggaaactccaaaactgtgcagttgctaaatccacttgtcacacctcctccttttctctgcttctaaggttgccctctaaactctttatctgaggatggaaacacacacacgcacccacacacacccacacccacacacacacaaacgtatttggctaaaggtcaattcacatagtggcagggactttcgtttatatgcattttccttcccagctctctcagttctgagtcaggctaagcaggaggcagagagctcgtcctcctctgcatgggcgctttttcttatttgacttttagtcctgggaggagtagcgtagttgcgagatactaggatatccacaagcgggatgaatttggaccttatccctcactgtgatccttcacttcgccttctgtttcaatttctcccagtcggtttactgcttgacaaaattctttcacaattaagtgatcacaggacaacccaacccaaccaatccaaacctgcaggcaaccccagacatccagggaaccctggcgcggctcgggccagcccacacccacgcggaatcattccatttatcggccaccaatcagccctccacacgctcccgcgccagccaatccgaacaagcgcacgttgttccggccacctcctctcagccccccctccccggagcccccgggatcgggccagggggcggggctgggggctcggcccgccttgccctgaggcgctgggtgccttccagttggctgcgaccagcggtgacttacaagttggctgctgtcgcctgcgcatcggcgggccgggaggctgagcagtactgttgagagcggtgtgaggtgcttggtagcgcgccgtagctgcttccacgtccttgcttcacctcaggtaaaggtaaggagagccacggagccgcggcaggattggggtggcccgtgtggagggcgactgtggcgcccggggcgtcctgccaggtgcgtcttctggacctgctccagaccatggatctggggagctcgcggtggacgttggggatggcgggccccggcgtccgggcgggagaggacctcacagatgaaagagaaacctgagcccctgggaggggaagcggcgagctggaaggatcccagggcttgcaactcgcccctgcgcgccgctcacctatttaagtacttggaatccattagacctcagtgtcctcagctgttaaatgggagaggggcggtggtaatcccgcttgatttgggacagtcctgttctttggaggtcaccgcgcttcctggttcttaggaggtgcacagacagcgcaggggcagccgcgtcccaccaggcttcgcggaggtgatgccaaagacaagagacaaagttttcccagggcttactgccttccaaggtccctgctaaatgtattaactcaaataatttctcaccaaatcagtgtcattgttttcccgaatttacacttgagaaagattaccttagatttttaggttcagcagccaggacaaaacttgacaaatatttggtgggcccaggttttttatatgaagtcttttccagcctgtgatcagcttccacagttttacaagagagagctttaggctctgaagtcagacgccctgggttggaattctggctccatcacttatgaactgtgtgatcttggacaagtgactcaaccttcctgttgctattttccctttctgtaaaacagggaaaatgtatagacattaagctactattctcacttatggaagacctcaagatatctaaagtatgcccatttacaccaatcctagagcttctgaataactaaaattcctttaccataatgaaacacattttctcaaggaggactattactgttgtgaggattaaataaaataaatgcaatgtaaagcagccagaaggactgaccatgtagtaagtgatcaataaatgttattgttattttttaaaatcaagtacagagcattaggttttttttttaatcaagtattagagcattaggggtttgaacagtaagttggctcactattcatattgtagaaatatacttccatgttgcatttctttaaatagtgagctcctgccagagccagtctcaaaaaatgagaagctgctgtacttgtctgagttagaaaacttaacagttcaacattgattggaaatcaagcatatgctgaaatttttatgttagttagaaaatataatttaatttacaaagctttggtttgtatgacattggggaaagtccatggcatgttaaactgaagctgttgacggaagtgaaaaccatattaatcaagtaatgcaaggttagaccgttctgatacctgcatttctttaacaagtgaattctgacctagtcgtactacaaaagtccaaacagatttttatggcattcactttacattacaggttaaatgttttattatgttccatatttaaaatagaacctatgccatctcactgtgacagatatttgagaataattggagttggattggtcaagactatggtgctgatagatggcctcaagaaaagtaacttgagacagctgccctccctatgatggcagccactatcaccactagtgatagcttcaaaagcatgggcatagaaaacatgaacaaaaagattaaaggaaaaacatggaggtggacattactcagcatttggccatgggactgacaagagtataaaatcttttatatgaacctattatattctgataaggttaagtggtgcctgttctctctgacgtgtaaatgttagagttggataatttcctgatataaggtcaagataagggaataaaagactgaattagtaaaaggaagttcagaatgggttcagaatggcatttaaaacatttacctgacattctccacagttggagattgcaggagggcaaattaggtgttttcctctcaattaatgtcagtaccctgttatattaggagagagagccaagaccttgataacccatctcccccaaccctcttggttctagaatatattaatattttgagaaatgctcaattatgcct

SEQ ID NO: 1882161 - DNA, 4001 bp, Homo sapiens; identical to SEQ ID NO: 318613

SEQ ID NO: 1882162 - DNA, 4001 bp, Homo sapiens
acaccaaatggtcccatcacccataccctgacagcagaacgaagccctccctgctccagatactctcccagcacttgcccacaccatgagatgacctccgaaaggaagccttttccctgtgctgctgtggagccccgggaggctggagtagagccttgggcctaggccttttgtctaatcatggttccacggtgaccccagcccctatgcaagtggcacacctgttggaagtttggcactggtgggttatgtcaacctagtcccaaatctaagggtttatttacatcttgtagggatccaaaacgcatctttgttaagcatgggctcacacagggtgagttctctggatgtagtcactacatcagcgggggaatgctggggggcacaccccccatctcacagacttggaaggaagtgaaccacctcatataccaagccaccccagagcagaaagtcggatacagagactactcgaaaaacatactcattttacagataagggcccaaagggcaaggagctcatttctagagctagccatagaataggctttccagcctaggcttctggaaagaagcctatatgtcttctcattcccactggcttggcatgcagcagctctcagaaccaccctcttcactcctggtctgaaatagcctagcacttaactctcctccctctggtgaccccactgtagccatgcgagcctccagcctgccagccccacctgcactgggcttacattcacacccaacactcacttaccacagtcctccaaaccttccacgtaccttcaccccaacttggaccaactgaggagagtgtgaaacacgaataggaatttctttaaaagcgcagctgtactgctccaaaacactcagaataggctcttcacactttaggtcatctgtaccaatgggcatggtttgtaaagatcatgaaatcttttcaaagcactgggacttaaaaatatttaattcacgaattaattaaactggtcccttctcaacatcactgatttgtagcacctttgccaacccttcctggtatgtctgagaccaagccagtttcctaagaacccactttccacacatggtgttcagggtccttctttggcaacggtacactcacgcccgtcaggacacagccgaccgaacacagcacgtttctcctgcacaaccaggggacctgaacagatcagctttcctgcccattcctccaagcgccaaggaggctcagggtttcctgggctagttagaaagttaattgcaaagctctgagctcagatcagagcagcgaggagcaagggtggtctcggctcaaaagttctctaagaagaccccaccctggcatcacccagcaccaggacagagcctgcacctgcttatgagcaagctgggaagacaaaagccaagaggcagagggcaggggggtgccccagggcggcccctccttccttcagcaaagttctccttttggttcagatcccaccgggtgtgtatgggagaaaagaccagcacaggagtctcgtctattttgttccaggcagaagtctcttgccggtgcctcacctacctggtcaaggaggctgcaagcacagggcggcactggctgcggggtccacttaccagcgggggctgcggctgggggtgctgccctgctcccgaggggggtgggtaatgcatgagcagattgaaggcggagtagacggtctctttgtacatgccgctggtgcactccggggccttcaggcctggaaaaaccacagctgggtcagacacaccagccctggcagcggctgggactgaaggctgtctgctcttgagagaaaaagaattgccaaggggtcccctgcaagttcctgacttgggaaggaacgggctgggagtatcggcagtgccaagttttaggggaaggacctggagggcaggcctccccgaggtggcccctacttgacctcccaccccccgccctccaaccaagaaaccttggccaattctgtctcctgaaggcggcggattagtcagtcacctgggcaggaggggaggcggggatggcgggggtctgtttactcctataaaggtcagggcaccggaagtgactcgacccggcggcgcccgggaagcccgccccccactctccacccctgggttctgccgcctcctgagctgcggtgggggaggcacccggctccccgcggtccttggcgtccccgtcccaccgaggccagggcctgagcgcgacgaagggaagccgggccgggcagaaactcaccgtcctccaggggctctggaagtttgtccgggaagagtctctgcgcagcgtgttcccgcccgagagcctggagggagaaccggaggggagtgaggggcggtgggaccgcgggggtcggggccgacgccggggcagggacgctctgcgcgctggagaccccgagggccgcgcgcaactggggcggcgcggcgcggcgaccgcgggggaggagccggcgccggcgggggctcacctcggcctcgccgcgggccccggcgccggcccccgggacccccgggatccctgcgccgccggccgcgccctcggactcgttcacgagcgacgacttgagctcggccaggtcgcgctcgggaccggcggcgctgtcgcggctcttgtcgtcctgctcctcgccttcatcctggaaggccagcagctcgtccggcgcgccgaggtcgtcgccgccgcccgcgccgcccccgccggagtccagctgcggcatggtgcgctccgcccgccggggcgcggggcgctgggcgccgggagtgcggggcgcggagccggcccggggggcggcgagcccggagtccgaacctccgagctcggatcgcggcgggcggagcgcgggctgactccgcctgggcgggctgcaggcgcgggctagggcgcggggcagagcggctccgcgagctggcgggtcggaacatcaaaggcgccgccggccgagtgccgggggcggggcgggcactgggggcgggccgggccgggggcgggacacaggtccgccccgcctctcctctcccgggagaggccgggacgcgcccactcggcatagccttaaagggctcgctcttccggagcgcaccctgagagagacgtcggacaagcctgggaatgatcacccttctcccgaaacgcagagactctaacgggaactcctgaccccgcttactcacctacaaccagatattccccctgctttctgcgcccaggtttctcctccggctgtggagggcgggggtcccctaggcccttgggacttgggcgtggcttaccatcgcagccgtggtgtgaactgtatcgtgcccaggctccaatgcgccctgtgctttgaactgggggcttcctagggcttgaggctgcttgaggctgtgctcgtaccccagggaaccggcagcgttggaactccgcggcgctgttgcggctcttgccccatcctccatccctgtgccaatcagggacttccttctaggccgcctgcatacagtgcgaacataagtataccccccttcgcacatttattgagctcctgttgcgtgcagagcttatacatcacacatctgtgacgggcccctcagtcaggcgacggctccgagccgcgaacacagccaagagcaccggacctcagccgatcctccaagtcccagcccctatgactctcccaactcggttccgtgactagaacctgcagcccggagactcggaactttgggcagccacgtgggcgcgggattccgacatgggtcgctcgtccacagcaactcaaccctagaagtcgcatttagggagcccatgactctgaagttgaccctggcctgactaaccctctaaccctcgctcgatccaggctgaaacatctagatttgcggagcgcgggaaagtgcctggattccagcgcatctgtatggcacccgggtctgcgtccacgcgggcctccacggcgcgcttggcctggctcagcccctgcatc

SEQ ID NO: 1882163 - DNA, 4001 bp, Homo sapiens; identical to SEQ ID NO: 318638

SEQ ID NO: 1882164 - DNA, 4001 bp, Homo sapiens
aaagagtacaacttcacagaatgtgttgtctctgacaggttgatagccacttaccttctccatcttttcttcctcaaggatagcagctgcttcccacagatacaccaacaggcaattccagcccctctctaccacacttaccatttgcaggtgcctgtggcttgtctatttacaaccttgtccctacacagcagaagcggaacccttcaggaagttctggattcatcctcagcaggatctgtttcacaaactattctccagtcccaccttccctccaggtattctgtcagtacttacgattcccagatcttcttttaattgtcacgctgttcgtcccctcacaaaatcaagtttaaactaaaaaaaaaaaacaaaaaaaaaaaccctcatacactcagtctgtgtcccctttcctgacataaaataactggccctgtgcatgcttcttttggatggctgagaaccccgattcctttgggccatttacagcttggataccatacgctccaggtactttgataagcagggtgaaatttaatatctataacaacgcctgcctactcaaccttcttaacttctcccaaaacttcctagtttcccttcccaattccaacttcataacaaaacatcacactatggcacaaagtgaattcatggatgaaattactaacagctacaacttaagtaaggaccccaagtcgtgagacaaatttctgggttgaaagtgctctgtatatccatttcaagcctgcctccagtacgatgtctcattataatcaaataaaaaggcagaaaaagttgaatggaatagagtttggaaaaaacacaaaattaaaagttgtatgagagtttcacttatttgcatctgatataaatatctatacatctatagaaaaaaaaaaccctcatacactcagtctgtgtcccttttcctgacataaagcaactggccctgtgcaagcttctttgggatggctgagaaccccgatatatcgatatatttatagatagacgtctacatatctatccaaatatctatatctatccatatatctacctatctatctatctatatatatatctatatctatcgatcgatatctatctatatctatctatctagacttccctggtgagggagtgaaccgctgcctgacgggggccaagactggcagagcagagacgcggtttgtacatgaggggaggtggtggccagagcaaaagtgaaccgcaggctaggcaaagaccacagcacacagccatacaggtgtccaggaccgtcagatcccagagcatctatctatatagataggtatctatatggaaaacgtccatattggaacgtattaaagaggcagaattttcttcctgggttctctgctcttggtagatgttcttccggcttcaattgccacctgtgaatagtgaagaaacttctcactatgagattccattgcccggaaggagggtagagctacggtacccactaaggcagggaacagaagcaacagacggacaggtctgtggaaatgaggatatgctaataagggaccgagtcaggaaaactagagggtaacaagagggcgtcagttaagctgagacaaaatgacggccaaaggtggtctttactctctctaaatcacctgggtctggagtcgactcccatcgcgcaccctcactcccacccctggccccctcccgccccccacccgcccccctccctctcccctcccgctccccacaccaacgtgtgcctccgtcacctctcagacagtggatgcgttcctgttgaaaccacccaatctacctcagggtcctcgcaagcgcagccaccacgatccgcccgcccacgtacctgtgctgcgcctgcgcctcctccgctctctcaaggtcagcaccgcccccagcccacaacctggcacccacggaagttgctttagaggacgtcctgcgtatcttcacctctgcgtggcgtggggtcgacggcgctctggagaagggaggaacttcctgtcccgcgcgcgcacaacttccggcagagccggaagaccctctctttcgctgtttgagagtctctcggctcaaggaccgggaggtaagaggtttgggactgccccggcaactccagggtgtctggtccacgacctatcctaggcgccatggtgagttcttctgtgagggcaggagtgacaacggtggggcgaaaagggcggggaggtcagtactgtgaaaagagccatcaggtgctctgctcagaatggagttgagacgttgggatgagctgctgggtaggacccaccacctatctcagggtgtctgagcccctgaggaagcagcattacgcctacctgtctgggagactagcgggccggaggcaggggcgtatctgtcagggagtatggactgggtagcctgcctgttcatggcccatttactgtgtatggcctgtggcgccaggtgatcccagagttgaccttgccgggtcagtcacctcttctgcgcccccttctccatccgcggaacagtggccaagaacttcagatcttagaaatgcttttagcctctccaggtggacacaacgggtctccttgtataagatcaacacctgtcatttaaagaaacggtagtccccttattctttacacttagccatttcataattgaaaagggtgtcaaataaaaaacccgagtttagtaaggacagactttattcgaaaggaatattgcaggggtgtggaggaaggttgaaggaactgttgcagtagggagaatgaccgtaagatttgcatgcaccttaaaggttaggcagaaagggtttgtcttttgttggtaggggtaaataagatgtcaggaattgggatgaaaatatgggtatgatccggcagtaaccagataatgttttaccctgagcccatgtattctgaggaggagctgttaggagaggtttgtatatgttgtttcagactgagggaaggacaaaattcaggtacccgagagaagagaatcttaaagtttggttaataagtattttgttccgattgatctgtgggacaggtacttcagcaagtcatttacgaagcaaaggatgggaattagaagggtctagttatggccttgttataggtaaacaaggggtaggggggtatggatcaacccttagtcttatctaagttctacaggaaagatgattctttgcagtaagccaatttctcagaacacaaacgggggcaaggggtttcttaacctttgctgtttttcaagatcacggggctctggtgaagttcattattgtcagtttcttcaccgtatacaagatttcaaaccctcacttgcagaggcttctgtcctggaatttagcttcagtttgtcttatattttcagggccaaatattgccaacattcagttaatgtgtgtggtgattggcttttgaatgacttttagaaacttagctgaatgtagaacaaagaccttcaaaataatgtagttcctggtgcactttaccagataacctatctctttaaagtttttttttttaagcctcagtgaataatatggtttgtattaagaaagttgtttttcttttgtatcagtgaaattagacaaggatagggaaaacagaactgggagaaaccaaagcctagtaatcactcttccatccccatttttacagaagaaagaatctggggtctagaaattgacagtgatttttctaaagtaacagtagtttggcagtctggactaaaactcatattttcattttttaaatttaagattaatttttgactttttggtctgaaaagttgaaggtaaagtataattaaaatacttaagttcatcatagtcacagaaaagctgaacatgaacttgttctcagtgttttggaatactagaagtagaatcctgcttatcctgtcggttcaaaagagatggttaatgtttggaactaatgtaatcttatgctgtttttctgaatgtcattttggaactaactagttggctc

SEQ ID NO: 1882165 - DNA, 4001 bp, Homo sapiens
ggttttactctagcaggaatggattccattctgatagtaattccagttttactgtcacatagaaggagatactttgcgaacctcaatgactgccaggtttaggacagatattaagaaccacagtgtcagaaatgaaagagtacaacttcacagaatgtgttgtctctgacaggttgatagccacttaccttctccatcttttcttcctcaaggatagcagctgcttcccacagatacaccaacaggcaattccagcccctctctaccacacttaccatttgcaggtgcctgtggcttgtctatttacaaccttgtccctacacagcagaagcggaacccttcaggaagttctggattcatcctcagcaggatctgtttcacaaactattctccagtcccaccttccctccaggtattctgtcagtacttacgattcccagatcttcttttaattgtcacgctgttcgtcccctcacaaaatcaagtttaaactaaaaaaaaaaaacaaaaaaaaaaaccctcatacactcagtctgtgtcccctttcctgacataaaataactggccctgtgcatgcttcttttggatggctgagaaccccgattcctttgggccatttacagcttggataccatacgctccaggtactttgataagcagggtgaaatttaatatctataacaacgcctgcctactcaaccttcttaacttctcccaaaacttcctagtttcccttcccaattccaacttcataacaaaacatcacactatggcacaaagtgaattcatggatgaaattactaacagctacaacttaagtaaggaccccaagtcgtgagacaaatttctgggttgaaagtgctctgtatatccatttcaagcctgcctccagtacgatgtctcattataatcaaataaaaaggcagaaaaagttgaatggaatagagtttggaaaaaacacaaaattaaaagttgtatgagagtttcacttatttgcatctgatataaatatctatacatctatagaaaaaaaaaaccctcatacactcagtctgtgtcccttttcctgacataaagcaactggccctgtgcaagcttctttgggatggctgagaaccccgatatatcgatatatttatagatagacgtctacatatctatccaaatatctatatctatccatatatctacctatctatctatctatatatatatctatatctatcgatcgatatctatctatatctatctatctagacttccctggtgagggagtgaaccgctgcctgacgggggccaagactggcagagcagagacgcggtttgtacatgaggggaggtggtggccagagcaaaagtgaaccgcaggctaggcaaagaccacagcacacagccatacaggtgtccaggaccgtcagatcccagagcatctatctatatagataggtatctatatggaaaacgtccatattggaacgtattaaagaggcagaattttcttcctgggttctctgctcttggtagatgttcttccggcttcaattgccacctgtgaatagtgaagaaacttctcactatgagattccattgcccggaaggagggtagagctacggtacccactaaggcagggaacagaagcaacagacggacaggtctgtggaaatgaggatatgctaataagggaccgagtcaggaaaactagagggtaacaagagggcgtcagttaagctgagacaaaatgacggccaaaggtggtctttactctctctaaatcacctgggtctggagtcgactcccatcgcgcaccctcactcccacccctggccccctcccgccccccacccgcccccctccctctcccctcccgctccccacaccaacgtgtgcctccgtcacctctcagacagtggatgcgttcctgttgaaaccacccaatctacctcagggtcctcgcaagcgcagccaccacgatccgcccgcccacgtacctgtgctgcgcctgcgcctcctccgctctctcaaggtcagcaccgcccccagcccacaacctggcacccacggaagttgctttagaggacgtcctgcgtatcttcacctctgcgtggcgtggggtcgacggcgctctggagaagggaggaacttcctgtcccgcgcgcgcacaacttccggcagagccggaagaccctctctttcgctgtttgagagtctctcggctcaaggaccgggaggtaagaggtttgggactgccccggcaactccagggtgtctggtccacgacctatcctaggcgccatggtgagttcttctgtgagggcaggagtgacaacggtggggcgaaaagggcggggaggtcagtactgtgaaaagagccatcaggtgctctgctcagaatggagttgagacgttgggatgagctgctgggtaggacccaccacctatctcagggtgtctgagcccctgaggaagcagcattacgcctacctgtctgggagactagcgggccggaggcaggggcgtatctgtcagggagtatggactgggtagcctgcctgttcatggcccatttactgtgtatggcctgtggcgccaggtgatcccagagttgaccttgccgggtcagtcacctcttctgcgcccccttctccatccgcggaacagtggccaagaacttcagatcttagaaatgcttttagcctctccaggtggacacaacgggtctccttgtataagatcaacacctgtcatttaaagaaacggtagtccccttattctttacacttagccatttcataattgaaaagggtgtcaaataaaaaacccgagtttagtaaggacagactttattcgaaaggaatattgcaggggtgtggaggaaggttgaaggaactgttgcagtagggagaatgaccgtaagatttgcatgcaccttaaaggttaggcagaaagggtttgtcttttgttggtaggggtaaataagatgtcaggaattgggatgaaaatatgggtatgatccggcagtaaccagataatgttttaccctgagcccatgtattctgaggaggagctgttaggagaggtttgtatatgttgtttcagactgagggaaggacaaaattcaggtacccgagagaagagaatcttaaagtttggttaataagtattttgttccgattgatctgtgggacaggtacttcagcaagtcatttacgaagcaaaggatgggaattagaagggtctagttatggccttgttataggtaaacaaggggtaggggggtatggatcaacccttagtcttatctaagttctacaggaaagatgattctttgcagtaagccaatttctcagaacacaaacgggggcaaggggtttcttaacctttgctgtttttcaagatcacggggctctggtgaagttcattattgtcagtttcttcaccgtatacaagatttcaaaccctcacttgcagaggcttctgtcctggaatttagcttcagtttgtcttatattttcagggccaaatattgccaacattcagttaatgtgtgtggtgattggcttttgaatgacttttagaaacttagctgaatgtagaacaaagaccttcaaaataatgtagttcctggtgcactttaccagataacctatctctttaaagtttttttttttaagcctcagtgaataatatggtttgtattaagaaagttgtttttcttttgtatcagtgaaattagacaaggatagggaaaacagaactgggagaaaccaaagcctagtaatcactcttccatccccatttttacagaagaaagaatctggggtctagaaattgacagtgatttttctaaagtaacagtagtttggcagtctggactaaaactcatattttcattttttaaatttaagattaatttttgactttttggtctgaaaagttgaaggtaaagtataattaaaatacttaagttcatcatagtcacagaaaagctgaacatgaactt

SEQ ID NO: 1882166 - DNA, 4001 bp, Homo sapiens
ttcttccccctccttactgcctgttttccacatgaaaattaatgtaatattttgtttagaaatcacattgtaggtcatttgcaaatgaggcaggctctgaggcacccacatctgcccagaataccctcatgatgccatcgaggtatggaaagagattaaaatgcaaacattcaaatgtatttaggtttgtacatagtgactagactcacatacatacacacttgaatgtgtgaacaacacacacagctgtaaatggaataaaaggccaaaatccttcttaattcttagaacagaagggcaaaggaaagcgccaggccaccacctttctccccaaaggttagaaaatgcactgttcatggtctggattcgatgttttaaaaaagatatatcttactgatgactctctcattagccagccttctgaagtctggggacacaagatttccataaattatctctctaactcatctcatgctggtgcaaaatgcaaagctaaattttttttaaatttttaatatttttttaaaaagagaaaatactaagctaaccagcttcctgacaaacatgttaaaagattaagctcaccagtaattaatactattaattataataaatatatttttatcataaaattccatccataaagctaaactaaaaataatgtaggaaataaataaaagcgtatttggctctttctaatagatttatagcaggttactgagcagatttgactgcactaggcaaagaacaaagcaaatggtttagttcctataggaaatatactaaaaagaaaaaaaaggaaaaaccccacaaccctttatctaaaagccatcagggacaagcactcaatacaagttaacaagcaggaactgataagataacatttatatgaggtcagaagtcaaatgccagtcaaaggcttttaacctcttgggtcataaacaggaatagttaaaagtgagaggtagttatttatcggattttaagggtacctgatcattgccacagaatcaccgatgatgaaactaattgggatttatagaaaaagaactttgtagctgttcaaagaaaattaacctacaaacccacaattcttcaattggtagggagaaaaacaaactaaaaacccctcttttgggagagaaataaatctggcaatttaaacagtaacaaaatctctctcaaaatcaataatttatgactaatgtacatatcgattaatatatagtaaatgattttaaaaataaattctgtattaacaatgaaacaacaaaaataagcattatataaggtatttccaagttttgttctttttctttgttccttttcagaccctctaaattagacagaatataactccatatcacaatatttcttgccctcagaatgccatcatttataaatttaaatatatatattctaatagcaattatttttaaacattggaatattgaaactgcgtaattaaatttgtatcttaatctatccagagaaacagatgtttcttttatttgctgtcagaatagtttttctttgttttgatttttgtcctttttgtctctttttaggtttacattccaaactcccaaacgttcctggtttctgcatccatgctggttcatattttcaaagcatacccacccctcttttttcttttgtaataaaagaaagcagatctagatatttctttctagagagaggtagagggattgttgttaggcctgctaaggcccactgtttctttaaacagagtccataataccctaggcgaacattgtggatttaaaatgcttttaaatatttatcactagtattttatcatcatattcaaatgacacctggagtgcactcacctttattgacaatctctgttctgaaagtccatttgcttccttaaagccccccaagcagaacaaggactacccgttttcattcagttaatgtttagtaaaaaaccaagcaaccttaatcagcatgctgattgcatcgtcaactaacaaataatttactactctgagcattgcattccattaaaagctcattaaattttctgttctccaatgggaggtttagcttttgaactgcatgcttttgcttcgaatgatcatttattcaatctttgcaaaatgttgtggtttgttttttcctaaagtataggtgagcatttcaatacctatagattgcaaacatatggaaacacagcccagagttggagaatgttcaatttgatttataaactctgtttaataaaaattcaacacaatctcttgtacttttagtaaattctgaaacagttgagtatatctgtggttatgtgtgacccaaacataatctcagaaatattagtatataatctaaaatatcagatcctttctttaatgcttaaatttttcttttctgcctattatagctataattatttttttctttgtaaatagttgttttctactgatgaaaaaggggcatgataccacaaagctcttaccctatttgatgccagacttaatacttcgggggggaggggggtgggcagtggctagttacccaaagaaatccacattttctggggtttgcacatttttttacaaactcataatcccctgaattgttttcatgcccagacttgtctaggaaagagtgtatttattatttttaatttagggaaatgtaagaaaatatcaggcacccaaattaacatgcatctttggattgctaattgtgctcattgcaaatttgggtcattttgcatgagtgactctaatgtagggctgagattgccacgcagccagcgcagtggattcctgattccccgtgctaatcctgaactcggtgattgtgtcaggtgcagttctgtatgctctagcagctggctcatcctcatcaatgcaaataaggcaactcctacaatcagagcctcgcgagtgtgaggcctgattgctgagggcaggctaaaacactacacagactctcactttcaaatcccgctaagtgagaagacaactgcaatgtccctccagttcaaaatcaacctttcgaaaacaaaacaagaagaaagggatggctacaaagaggaggaaaaccccaatgtttgggaagtggacttgtttagatgggttttatttagatacagagataatgtaaagtgcatttcaacaaataattatttagctcctattctgtgcaagatactttgctttaagagctgcaggggatacaagggtgaggaagaacacacttccggcttccaaggaaccctatcacttgattgcagaagatggtaaacattaagataatagtggaactgttattaaggagcagtcacgaaaatcataaatgaaaaccaaaaaacatacttttaagggaagtatttagatatggcatatttgtggcatagacgttaagagcaaggctttggaagcttggggttcaaatcccagctttgccacttacttgctcaagttactttgcctttctaaactgtaatgtcatcatctgcaaaatggtggcaacacaagcacctagctcagagatcttgaagaatgaaatgagattatgtaaataacaacttaccacagtgcttggcacatagtaagtgctcaatgtcagctatgattattattattcccttcttaacacacaaagaaggaggggatccaaaaataacagtgtgccacagtttgaaaggcatttatttgatcttgtctctaaatttccattttacatgtagcacttacccggtggaagtgaaaatacagtgaacgctaaaaagccctgtgtctctcggtggtgtctggacaaccctggcaactcggaacatgaaggagagaacaagaattccctgtgcttttccttttcttcttttccaaacacgtgtgcagacttcccctgcatttcagccccaccctctttattttactgcctaatctataaaggaggattaacagcagcacgctgctttggcatagagcagattctgggtgaggacctgtaggtagagttta

SEQ ID NO: 1882167 - DNA, 4001 bp, Homo sapiens; identical to SEQ ID NO: 318657

SEQ ID NO: 1882168 - DNA, 4001 bp, Homo sapiens; identical to SEQ ID NO: 318661

SEQ ID NO: 1882169 - DNA, 4001 bp, Homo sapiens
ggcctgggcaacagagcaagaccctctctcaaaaaaaaaaaaaatctaaaagagaatgggtaaatcaggcatagtggtgcatgcctgtagtcccagctactccacaggctgaggcgggaggatcacttgagtccaggagtttgaggtggtagggtgcaataatcgtgactataaatagccacggcactttagcctgggcaacatgacgaaaccctgtctctataaaaaaataaagaaattagcctggagtggtggtgcatgcctgtgttcccagctattccagaagctgaagtgggaggactgcttgagcccaggaggtggagattgctgtgggcccagatcgtgccactgcagggggctacaggagtctaaaagggaggggacacaatttccccaaatctccaatgttgaggagttctgcctacactccttgccccaggatgcccccagcaccaaggccaagagggtgtcttggccctcagcactggggtagaacatctgtacacagaaccaggccacaggagaaggcatacacagagcccatgagcaccagcccctctgagctgcgtccagcccccatctccatcctctgttctctgggactacaaatccaggcctgacctggttctatccctacctgcagagacagaagacagaaggagacaacccctgagaagcctttccccagggcctgattccccctcccactgtaagatctctcagcccgcactttgggaggccgaggtgggcggatcacgaggtcaggaaatcgagaccatcctggctaacagggtgaaaccccgtttctactaaaaatacaaaaaaaaaaaaattagccgggcgtggtggcgggcgcctgtagtcccagctactcgggaggctgaggcaggagagtggcgtgaacctgggaggcggagcttgcagtgagccgagatcgcgccactgcactgcatcctgggcaacagccagactccatctcaaaaaaaaaaaaaaaaaaaaaaacctctcagccctggatcaggtcccctctccaggaaaggtgacagagtggagtctaaatgacactgccctagggccccgctggggtggaaaacagacccagacagcgcccccagccctccctccccagggaggagtgaagggcataacagacagcggaggacaccgggacaggaaggaggggccagccgctctcaaactaagtctaaaccacggcggtgaggaagtgtggtcccaaatccagccccctcccggccgagctcacagagctcagggctggaactcggaaccctggcccgacgcaggcggcagcaccgaagggaacttgagccccggccccctcaggggacccacgaccggggcgcagctttgctggcagacgccgcaatactgcgcagccgcggccccgcaagcagaaacagggctgggtctgaggcctacgtggagctggggcccgacggctcacggaaggcagcggggggcactgggcgccccggatccgagcctcccgggcggcaggccctcccagctgtgcggcgcccggatccccacaaaggcaccccaagcgcggacggcgggacgggcgacagcaccagggtggtgtcccaggcttccccaccgccgcggaccaactcggccccggcccgggcggggcttccggagagatttatcccccttccctctaaccttcctggggctccggctcaggctggacaacggctcggagacccagtccccctcaagtgttgacccccccaccatctagaaccagccaacccaccaaaccacctctcccaagccgggcctcttcccggcgtccgccgctgacctgatcagagccgctctgccggcccgagggagctgagaaggggcttgggaatggggtcttgaggaggggctggccggaatgtgcagcactagcccagctggagcgggcggcgcgggcgcgcctgtcccccagcccacccaactcccggcccgcgcggcccccggcacaccatagagacgtggtcctccgccggcctagagcgtctctccagagcgtgtgcaggagcgagacgtcattttgcgtcgcctcgggcagggtagccagcggctgcatctgaggcggacgccgcagtgtagggcacaccctgagggtagcgagagacgtgacaggaccgagcagctgggggctgcagcctgctctgtccccaccgatcccagagagaggctgtgagtctggatctgggcgttcgcaccctgagagagggggtcaaagctcccctgcggccccgaggaagaagagcaaggttgaggacagcctcgggtcaccagagtagtttggaggcaggcctgcaggcgcgtccccgctcctcagctccaagctgacgtatctacacctgccggcgggcattaagatggctggttatgccactactcccagccccatgcagacccttcaggaggaagcggtgtgtgccatctgcttggattacttcaaggaccccgtgtccatcagctgtgggcacaacttctgccgagggtgtgtgacccagctgtggagtaaggaggacgaggaggaccagaacgaggaggaagatgaatgggaggaggaggaggacgaggaagcggtgggggccatggatggatgggacggctccattcgagaggtgttgtatcgggggaatgctgacgaagagttgttccaagaccaagatgacgatgaactctggctcggtgacagtggtataactaattgggacaacgtagactatatgtgggacgaggaggaagaagaagaagaggaagatcaggactattacctaggaggcttgagacctgacctgagaattgatgtctaccgagaagaagaaatactggaagcatacgatgaggacgaagatgaagagctgtatcctgacatccacccgcctccttccttgccccttccagggcagttcacctgcccccagtgccgaaagagctttacacgtcgcagctttcgtcccaacttgcagctggccaacatggtccagataattcgccagatgtgccccactccttatcggggaaaccggagtaatgatcagggcatgtgctttaaacaccaggaagccctgaaactcttctgtgaggtggacaaagaggccatctgtgtggtgtgccgagaatccaggagccacaaacagcacagcgtgctgcctttggaggaggtggtgcaggagtaccaggtgagagaaatgagggaatgtggggggatgaagggagtggaaaggtaactaggagagctgaggaatgagtagcattcctttcccacctcctcaggtacttagttgctaaacttctctttatttgatgagggagacacggtggagagagatggtcatatgggtaaaaaaggagacacaaaaccatgaagattggggcagattggcttccccagaggaagctgaacagataatatgacggtcactggaagcggaccactactgctaatactggcagtctacctaagtgtaagggacgtgagtaacagatacccagtacttcatttctccctaatgtgagtccttgaccaattccctgggacaggtacagataggaatagaaagccacagtacttggagataatagacatttgggacctcagcacaagcagtgtcaaaatagatgtattggtagacagaaatgccagatgtgagtcctaaactactgatagcaattggccacaccccccctctgaaagtctgggattgcatctctaccttcagtggggtccgttttccttctagagaaaggcaaagcatataagcatctttgatggatcagaatgtgcctcatatcctgatcacttttctttcctggtattttatcatagtggaaggagtgcgggatttaggatcagatgacctggctctgccacttactgtctagtcttgggcaggtgtcaacctccttgagcttcactttttccctaggattgtaaggattaaaagagatcatatatgttaaccataaag

SEQ ID NO: 1882170 - DNA, 4001 bp, Homo sapiens
aaaaagcttcttcacttaccccactcatatatgtaatcaggtctttagaaatagtactgagataggctgctttaatcttctcaaagtcacagttagtgaagtcgtaagttaacaccagccctacaagttgtaagatgaagattttcctgaaagaaactgacagaacatatagtaaggcaaaagggaacatacgtggacacccaattccaccccagtttcacactaaactcttcccaccacgagtgtaagagatctgtaaggcctgccttaggggccagtgctcaagcaccaggttttgcctctcattgccagtccacaggaagcccttattcacccatgctgttgccttaagttggagtctccctgatgctccagagctttctggctgcactatataacacctaaacgcctacgggctcttttctcctaggccaatgattttctaccatgtcattctcttcctttatagaattctgaattgatgatgtgaaaggaaaaaaaaaaaggagtagctaaatctatggaattttaacatcagtaaagtcatcaggaatttccctcaccttcctcctttttgctttgccctaaacacttcataagtgtgaatgtcctttaagaaacggataccagtgtctttctcctacagggcatttccgtgaccaatcctttctatttgggagaaacaccttctgaaaccagcagccactgtaaggatttggagtccttgcatatgtcccatgcattctgaacatctttgagcatttcctgtggccactttcaactagtgctttcccttctccttggctagtaagaaactgtgcttgcttatgggatgctttggagggtggggtgcagtctcagtcttcgacagcacttccatgtgaaagcattaaatgtgcaaccgtgaccagaaccttaggggcaggaacgataagaggttgaaataagtggggaaagatctgatgtggcttgttctcaaaaaccctacttttcaaatttcccatatcaatttcaggaaaaacgcctactcttggtggctaggggcaccttaggggctgaagagtcctctagcactttctagcaggtgtcaagaacttttaaaaccacaaattccagcgcccagccaccttcacagtcccactcttaaggccagcgacacaagaagcggagccagaccgcgctgctgggtgcccagcggcgaccgcacggagacgatgctgtcctgagctcagctctcccggaggcggcgcacgctttagtgcgctctgcctcgcagaggcttagccccgcgcagcgtagactggaaaacgtctgtcacctggggcctcagcccgggcaccagttttagagacaggagaagcatcgagatggcgggctcagatttttactagcaaactcttgttgatccagaaaagagcgcttaaaagcacagcaaagtgagtcagggagagtgccctagaggatgtctgtctagcagtcttcccagttccagcaacaccaatggagggttgaagggagggaaaggccgacaccgatcaggttgctgagatgaaccccctgctcctccctggcttggctcatgcggccctgggccctctctacacccaggtcccctctctctctctttcccttccgctcccccgtccatcgcacccctcacccccgccccccgccctcgcgtgtcggagcctgcatcgctctggtccttgggaagttcctaggagtcatcgctcggagaaaggaggttggacgccgtgtgtgagtcccagcaaatgtcacaggccatgcggtgcctggggaaaagagcaaggaatgtcgagggattcgggaaaagagtaggggacaaactggagccagagttgaactcttcttcatagaaggcactcgagagggtcagaaaacctctgattcaccgctgacttcaaaaatggctcttttctggaattcttcatgtgttgtactcgagtcaccacagcattctttgaaaaaaaagtccactcttcccccatcaccaacttctcagggtattgtgggatgatgccaaaacctgattaatctattgtgacatcagagattattctggtcggcagctggacattattatataggcagacaggagctaaacttagatttcttcactgggctgggatagctccaagagacaaaggaaagggcatggtggctgcttctgtcaccctcacctgacatgccttcccctctagtggcttgctgtagggccagagagtgtgagtgcccactagaaccttcggcttcatctcttgattgctgatgggggcaagaacaacagaaagcagcctacactgagcttcgacttgcattcttctggaggtataaccaggctgcctccctttttttgtttcctcttttaaaaaccccttgtgtctatgatctatgtagagtctttgttcagatgaggtaggcagggtatctctttctaaggcatcccaggtgtctctttgtctgttaaaacattgctaaacacttgttccttttgcccccaatttccttatctgtaattatgtgacctcttagatcacctggattatattacttgtctgctcaaaaagttatggcaaaacaacctactcaaggttgttttgagattacaattatccctcctgcgttggctccaagctgtctttccagccctatttccttcattttcctaggcttccagcaaacagtatctgaaggtaatatgctctaaacatgctctgagctgttttcttcccaatctgagatgttagattttcatgtcttgccatgttcatcttatttgatgtctccaaaagtggtctcctaccaggatgtgacctcattatcctgtaagccgtatctattttggacttctttctatggcttctatagattacttaacatttcaataatgtttttcaaccttatctctctattagattgcgagttctttaaaagtaggtaatgttttatagcagttcatttgttcactatttacctttccagtagcatttgaagtgatttgcaataaatacattggtgtcaaaaggtaaaaaaacagtcaaggtgagacaagagaatggagcaaaggaatagggcggttagaatcaggtgcagggaaggctatagaaaagcattactaaaaactggagaattataacaattgatctcaaaagtgagttttgagcttctaaactgccactacaaggggtagactatgacaagctctaccacacacaaattcatcatgaaagccagtttttcttaagcttatggtcatcatcataaccacaatagggctgtcttctgtactacatgtaatagatattcaatgaattctcaatgtgcttaagcatattaaccttctatgaagatcattgtcaggaagcaaattcttttccattgaaagaacctctctataaatacttctttttctagctctttgctgctgtcttcctggaatctgcttatgtctcacctggggcaacaattcagaccagggccatctgtgaaaattcagggtgagctgaaaagcttcctgttttccttctcttttcatttgtccaaatgctgaaggagtgaacagtatctgcatacgtagtttgggaaatcctaggttaggtcaagaatggtgtgtcttccatatggaaatagaagtgacatcatttgtaacactctgtgattactcaggaagcttaggcaatactcttacccatgtgaaggaccagaaaatgatccatgacatagctcttttctcctaccctcactaaaaagataaatcattcattaattttcttaatacttttatttcttgttttaataatgcttctcactgtttctttcatttcgttattgtttcccactccttcttttattctcttattctttccctccttctttttaaatttatgtctttcctcctcttccttgaattgtcctgaatatttaaagtagcctagaactcatgcaaaactcagtttggatttgaaaaatagttgccaaaa

SEQ ID NO: 1882171 - DNA, 4001 bp, Homo sapiens; identical to SEQ ID NO: 318685

SEQ ID NO: 1882172 - DNA, 4001 bp, Homo sapiens
aaaaaaaaaaaagtccaggatcaaaggactatggtctgggcctgcagcccttcatatgcccattcaataattccacaaatactcaataagcacctactatgggccatgtactggaatagtaaaactctgtcagtaaagatgggtggattctgacacaagagtgcatttacccccacagacccttctcaagcacctactgtgtgccaggcagcaccaccccaggcactgaagacaaagtagcacagggcctcagtgcctcagtctgacccttaggagctgagttggtccagagctggggtgggcagaatgaaggctggccctcggtagtctgctctggccttctcctgcctcagtggagaagtttaggcaacagaggagccctttcccctatctccccaggagaggggaggctagtcaaggggacagggaccccgggcggaacgggctctaaaccagggtctgctcctgcattcaagatctccacatgcaaacttactgctccagcttgacaatgtccatttgtaaacttacaagatttttcataaattaagctgaaagttactcaatacctggtatacaaatgcttgtcaataatagtgaaagaatgtttaaaaacaggagctacatttattgaaccccttccacaacgccacgtgtagcaaaatggtctgcgggggatgggctggattcacccaaaaagccccaagggtgtcagggtttctacttagcccttctccacaccggcactgttctaaaggtttcatgctaattaattcattttattattccccaaaactcatcgaaggagaggtacaattgctcccgtcctatagatgagaaaacgaaggtatggggacttcccagctgtgtgaccttgtacaaaccactaagactgcgggcctctaatccaaagtcaggctccgaaacagtttccagaatgcaccgccgcatttggcgaatgaatgaacgaccgaaccagtaatcactcctaagaccaagaaggccacatccttccccgtggggcctccttttccgaggccaaaccttcagcccaggcccgagctccggcctctaccgcctaagtcgactctcggccggcgcgttccgctctagaaggctctggcacaggcgggcggtgccgggcgccagcttctgcgggcgtgggccggccagggcgcgtgggcctggggactcggggccacggtcgtcacgtgagctcatccccgaggcggcagcgtggccggcacccgcccgctggcctggtccggcgagcgtgggcggcgaacgggtccccgccggatgcacgctggtgggatccagggccagagggcgccgccggggaaggtcacctagacgcgcggcccgccgggcctccacgcggccgcccttgcacttccgcccgcaagcccgggccgcctctcgccgccagccgcaggcgtctctggaccctcggcctcgcgctccccagcccagacctgttcggcacccgcctgtgcggccttctctgcccgcccgctcaccagccaggcccgcgccggccgctcgcgatccctccccgcggccgggctgccggggcccctcgcccgctcctccctcagcgcctccctctcagctccccaggggcctggcccccgccgtccagggcgcaaggaagccggggtccttttccgctgcgcctacctcagaggatgtggcggcgggctcggaggcggctacggcgggggctgcgacgcggaggcagggagccgagccagggagcggagccgagcgagcggctgggccaagggcggggcggcgcggacggcggcggcgcggacccgcctcccctcctgcgcgcccggcccggcgcgctccgcccccaggccccgcccgggacagcgtccaggccgggccagggtccccatcccgctagcgagccgcgttcttacccttccgggccccgctgccccggcagcagacacaggagcctgcgggcgtgttgcgggcgcgcgggaggacctgcgtgagtcggggcacggggaggcgccggactgacgtgtgcaccgtgtgtgcgtgcgcagggacacgcgggttcttgctggaaacctcggccccagtggcagcgctcgggaagggggaggaggccttccgattctctgagctgtggcccggaggtccctgcgctaatggaagacgcgcggggctcctgggcctcctgcttggcctccgcgctgctagatcccccgggagttgatgtggccggcgctggacccaagcctcgcctgggtggacaaagtggcccccggccccccatcaaagcccgcgtgggccccatcccccgagggcagtcccaggcccagcgcggacactgggcgcctggggcggcgcagatacagagtagaggcggcgactgttgctcccgagctccgcgctccggatacaatgtgtctggcgcctccgacccgcccgcgcggcgtctagacaatctcagagaaaacccctgtgcgccgattttgcactacagattagcgattttctcctgtagcaaagctactagcagccaatttccatgcatttgagaggcaaaaagacaaaataaaacaaaacgtggattgggttttgcgaggtccctgctgggtctctcggcgcgaggagatcacgccggttatggccggccggccgactgagggcaccccgggtaacccccgcgaccagccggggcgtgtcctgcgggacccagttagtgtgtgttgagtgaacggtcacctcgctgctaggcctaagcgagtggtctcgttcaccactgagtgtcccctgtgttacgcgcgaggcccactcgaagcaggtttcgagaattaattcgtagatggacgaagattctacacatccttcgcctttgatcaacaaacgtcctggaaggcttgaggcgtctagggccctgtggaggaggtgccgggttacagaatcaggacactcctcacagccagctgcgacactatctaaagcagtgggcaactggggctacggaggaggcaatcaggactggctgctgggaaaaggcggcagattaaaagtggcgactggagttggaaaaggtgctccagtgggatagggtgctgaggaagagggcagctgatacagagtgggagtggggtgcagacaggttacctaggccctgtgtaggggctgggggaggggtgactgggaatgtaaggaagagcccccttcaagatcctgaggagtgtaggacggattctatgaccctcccaggcgcacgagttgcctgggaactctgggcttcccagcctggtggtccccaccccgcacactgagactggtgggcagggggaggacaagaactcagggaggccgggcgggacaaggcggggctccaggaaccccacagggctaggaacagatgccggtgcaacccagttttgaggctgggagcaaatgtcgaagggcttcctcccctccagcgccacctctcaactccgctttaaagaaccaatctgggccgggtgcagtggctcaagcctgtaatcctagtactttgggaggccgagacaggcagatcacttgaggccaggacttcgagaccagcctgggcaacatggcaaaaccctgtctctactaaaaatacaaaaactagacgggcgtggtggcgcgcgcctgtagtcccagctactcaggaggctgaggcacgagaatcgcttgaacttggaaggaggaggctggagtcagctgagattgagccgctgtactccagcctgactgacagagtgacattgtcccccccccccaaaaaaaaaaaacaaaaaaaaacaacaacttggaaagagttcttcatggcctctgctaccctgggccccttcgccagctcccctaggtgctagtttcagattaaccactcacttagtggctgcgtgacccaggcaagaaggctggcctctaagagcctcagcttcagagtgttggtgtaagtttaaaatgggacacataaagagtaggcactcggcccc

SEQ ID NO: 1882173 - DNA, 4001 bp, Homo sapiens
agacgtattttaaaagggggtgaaattgtttgagactggtaatggcagtgttgcaaaggcaggaggaaagaggtgacttgaaggggaggtaccccttcagggcttcacggtgaagagaaaggaagcaagcagtgaataacagtaccagtctaggtgcggtggcttactcctctaaacccaacattatgtgaggccgaggtgggcggatcttgatctcaggaatttgagaccagcctgggcaacatggcgagacccccatctctacaaaaataaaataaaataaaaataaaataaaatacaaagctgggtgaggtagtgcacagctgtggtcccagctactctggaggaggctgaggcaggaggatcgcttgatcccaggagggagaggttgcaaagctaagatggtgccactgcaccccagactgggagacagagacagaccctgtctcaaaaagaaaaagaaaattaagagtctcagagatataaaagaaaatcacaaaatcacaagatatcagcctgtgctccactctccaaaaaagggcttcctatttgggggaaaaatgcattttgttctaccaacaaaagagggcactccagccaggcgcagtggctcatgtctgtaatcccagcactttgggaggctgaggtgggtggatcacctgaggtcaagagttcgaaaccagcctggccaacatggtgaaaccccgcctctattaaaaatacagaattagccgggcatggtggcgcatgcctgtaatcccagctatttgggaagctgaggcaggagaatcgcttgaaccggggatgcggaggttgcactgagccgagatcgcgccattgcactccagcctgggcaacaagagagaaactctgtctcaaaaaaaaaaaaaaaaaaaaaaacgaaaacaaaaataagagggcactcttcaagtaagaaagctggtaaggcacccaaactactgcctcatttgtaattgctgaaactggaaaataaaatatttcaaaatgcacagaaaattgcagacatggtatatagaaaaaggttaagtgaaaatcaatatttttttgaaaactaaccatgaaaccagaaaactgaaacacagtacttcaacctaaattagataaccttaagcaatcatttggtaacatgaaaaaaatgccatgaatcagaaaaataactcagaacagaaatggacaaagaacaaaataagcagtttgtaaaaaagcaggagatatggaagaaaaaaaatctctgaaaagaaaactaaatcataaggaaagcttttccaaagaggaaaaacttttacttaaaatataataactggtattgaggaaaggcattaaaacagccaataaaataaaaataaaatcaagaaagcaattcaaaggatcagagagaaagtggtatagaggcaaagatccaacatacattgcagtccctgaagaagaataaaataatggaaccgatgtaatcttcaaaactataataaaaaaaaattgggtctacatatcgaaaggaaacctaggaaaacttatatggaatgatcaagtctaaggtatatcttagaacatccattagatttgaaagaaaaaaatcctgtgggcctcagtaaaaaagggcgagaagatacaagtatacaggcaactgttagaacaaacacatgaacatactaaacattgaaaaaactttaaaagttgagtttggttgttcttggtttttaagcatttccttactttctagctctatgagatgctccacgtccatttctatatttcctgcccagtactaaaatcagccatttctccgaggagccctgattccttttaccatggaaagggagctgaacttcagcagtgaaaaggactggagagctcccgcgggtctcgaaccgcccagagaggtaaaaggactggagagcgcccgcgggtctcgaacaacccagacaggttgcttgtttcaattaaagaactgtcgaagtaaccgctgagctaaagccagcccggaggttgctttcggattatattttattgactggtgagaaagacctacgtcacaaagagtgagtcaaaaagagagtgcttcagcatgactcagcgaccaggactgtccaacacgcccccgacctccagacaattgaggagttgtccatctggggacacacagcagtgacaaggacgtagcctttcctaatccctgaagagctcttccgcaggtgtgtccccggtttactgtctccttctcagcagtcacctggtccacaactctcgaaacgcccccacctccttcgcttccagactctgcgctcccaaaacaaccacacagggtcacttcgtgatcaaatcgacttttacaactagtgcttgggccaggggagtggagtctttacaaggtgtaaattgtatttcagaccttatcttagaacttcgctgctaaactagataaacattccaacccccgcccagtgaaacttcctgttactctttttaatttttttagaaacagaatctccctctgtcacccaggccgcagtgcactggctccatctaggctcaaccaatacgcccctcttagcctcgcgagtagctaggactacaggcacaggccactatgcccaactaattttttttttgagacggagtcgctctgttgcccaggctggagtgcagtggcacgatctcggctcactgcaacctccgcttcccgggttccagcgatttctggctaatttttgtatttttaatagagacagggtttcaccatgctggccaggctggtctcaaactcctgacctcaagtgacgcgcccgcctcggcctcccaaagtgctaggattacaggcgtgagcttttttttctggctttttttttcttttctttcctctttttttttttgagacggagtcttgctctgtcgccaggctggagagcagcggcaggatctcggctcactgcaacctccgcctcccgggttcaagcgattttcctgcttcagcctcccgagtagctggtactacaggcgcacgccaccacgcccagctaatttttgtatgtttagtagagatggggtttcaccatgttggccaggatactctcggtctcttgacctcatgacccacctgcctcagtctcccaaagtattgggattacaggcgtgagccaccgcacctggccaaattttttttcctttttctttttcttttttgagacggagtctccactctgttgcccaggctggattgcagtggcactacctccgctcactgcagcctccacctcccgggttcaggcgattctcgtgtctcagcctcccaagtagctgggactacaggcatgcgccaccacacccagctactttttatattttttagtagagaagagctttcaccaagttggccaggctggtcgcgaactcctgacctcaagtgatccgctgccctcagcctctcaaagggcggggattacaggtgtgagccaccgagccgggccttttttattttttattttctgtagacaggatcttgctatgctgctcagttgacctgtaactgccctcaagagatccttccgccttggccacccaaagtgctaggattacccgtgtgagcctccatgcctggcctaaaaattatttccatttttaatactgcaggaacatctattccttttatgtatactgtaaacagctaacctttcttccctaaattcctacttttctccaattaaccactgtttatatttcaatgtgtatccttccagtccttttcctcaatctgtttatttaactgtacacaaaacgtaatttttcttggcttgctgggaatccagttgttggatattgtttacctaacagcatgtcttggagatccttctgatcactgcgtataaatctaattcacttgtattgtaacagctgcattatattcaagtataaatgtactagttttaagtttcactaagataaagctgcagtaatacacatcttggtacatatatgtacacata

SEQ ID NO: 1882174 - DNA, 4001 bp, Homo sapiens
aaaggcaggaggaaagaggcgacttgaagggaaggtaccccttcagggcttgatggtgaagaaaaaggaagcaagcaatgagtaagagtcccaggctgggtgcggtggctcactgctgtaaaccaacattatgggatgctgaggaggacggatatcttaaggtcaggaactcgagaccagcctgggcaacatggcaagatgcctgtctctacaaaaatattaaaattaaataaaataataaaattaaataaatacaaaatttagccaggcgaggtagcgcgcacctgtggtcccagctactcaggaggaagctgaggcaggaggattgcttgaggcagaggttccagtgagctgagacggcgccactgcactccagtctcggagagagagatagaccctgtctcaaaaagaaaaagaaaaagaaaagaaaattaagagtcccacagaaatgaaagagaattacaaaatcacaaggcatcagtcggtgctccactctaaaaaagggctatttcggggaaaaatgcattttgttctaccaacaaaagagggcactcttgaactaagaaagctggtaaggcacccaaacttctgcctcatttgcagttgctgaaactggaaaataaaatattacaaaatgcacagaaaattgcagacatattatatagaaaaattttaagtgaaaatccatacttttttttttttttttgagacggagtctcgctctgtcgcccaggctggagtgcagttgcgcaatctcggctcactgcaagctccgcctcccgggttcacgccattctcctgcttcagcctctctgagtaactgggactacaggcgcccgccaccacgcccagctaatttttttgtatttttagtagagacagggtcgcaccgtggtctcgatctcctgacctcgtgatccgcccgcctcggcctcccaaagtgctgggattacaagcgtgagccaccgagcccagccaaaagtccgtattttttttaaactcaccatggaaccggaaaactgaaacacagtactccaacctaaattagataaccttaaacaatcatttggtaacatgaaaaaaatgccatgaatcagaaaaataactcagaagagaaatagacaaagaacaaaataactaagaaaacagtttgtaaaaaagcaggagaaatagaaggaaaaaaaatcagaaaaaaactaaattataagatgtccaaagggaagagcttttacttaagatataataactggtattgagaaaaggtattaacacagccaataaaaaaaaaaagatatctcttagaacatccattagatttgaaagaaaaactcctctgggcctcaggcaaaaaggatgagaagatacaagtatacaattaactgttacaacaaacacatgaacattactgaacattgaaaaatatttttaaagttaagagtttggttgttttaggttttcttttcttttttttctttttttttttttttttgtgatacggagtcttgctctgtcgcccaggctggagtgcagtggcgcgatctcggctcacagcaagctccacctcccgaatggctcacgccattctcctgcctcagcctcccgagtagctggggctacaggcgcccgccaccacacccggctaatttttttgtatttttagtagagacggggtttcaccgggttagcgaggatggtcttgatttcctgacctcgtgatccgcccgcctcggcctcccaaagtgctgggattacaggcatgagccaccgcgcccggcctgtttttggttttcaagcacttccttactttctagcactgtgagatgcaccctgtccatctctgtatttcctgcccagtgctaaaatcagccatttctccatggttccccatggaaaaggagctgaacttcagcagtaaaagagctggaaagcacccgcgggtctcgaaccacccagagaggtggttacaatgtactcgaagtaaccgctgagctaaagccagcccagaggctatctccggattatattttcttgactggtgagaaagacctacgtcacaaagtgagtcaaaacaacagtgttttagcatgactcagcaaccaggactgtccaacacgccaccgcctccagacaattggagtgtacagccagggacacacagcagtgacaaggacacagccttcccctaaccctggagagctcttccgcagttgtgtacctggcttattttctccttctcagcagtcacctggtccacaagtctcgacacacccccacctccttcgccttcagccactgcgctcccaaaacaaccacgcagggtcactttgtgatcaaatcgacttttacaactagtgcttgggccaggggagtggcgtctttacaaggtgtaaattgtatttcagaccttatcttagaacttcgctgctaaactagataaaccttccaaccccggcccaggtgaaacttcctgttatgctttttaaattttttttgttagagacagactctccctctgtcacccagtctggagtgcaatggccccatctaggcttaacccatacgcccctcttagcctcgcgagtggctaggactacaggcataggccaccatgcctaactaatgttttttcttttcttttcatttatttatttattttatttatttatttttttgagatggagtctccactctgttgcccaagctggactgcagtggtaccacctcagctcactgcagcctccgcctcccgggttgaagtgattctcatgcctctccctcccaagtagctgagactacaggcacgcgccaccacacccatctaatttctgtattttttaatagaggcgaggtttcaccattttggacaggctggtctcgaactcctgacctcaagtgatccacttgacttggccttccaaatggctgggattacaggcttcagccatcgggcccagccttttttgttgttgttgtcggagacggagtcttcctatgtggccaaggttgacctggaactggcctcaagagatccttccacctcagccacccaaagtgctaggattacccgtgtgagcctccatgcctggcctaaaaattatttccatttttaataccacaggaacatctattctttttatgtacactgtaaacagctaatgtttcttccccaaattcctacttttctccaattaaccactgtttatatttcaatgtgtatccttccagtccttttcctcaatctgtatatgtaactgtacacagaacataaggtttttcttggcttgctgggaatcttggttgttggatattgtttacttaacagcatgtcttggagatccttccacgcactgcatataaacctaaatcacttgtattgtaacagctgcattatattcaagtataaatgtactagttttaagtttcactatcataaagctgcagtaatacacatcctggtacatatatgtacacatacacaaatatgttgttagaatatatgctggattaaagaatctgcacacatatttggagaaatacaagaggccttgagggtgcctgaagccacaggatcatctttaataataaggatcatcttttgttccccaggtactctgaagggcaattccaccagaatgtacattccatgacatctgggactttgatgcattgccccagacgataataccagtacctacagcatgttcacctaagcactggtcaagtggatattcctcaaccagaatgcaaacatttccattggttttagaaagggttttagaaacccctgaaagaagcctctctttgagatttctgagttatctgggattgctgtgggctcttgaatttccattccatttcctttcccaagacgccaacttgagcacctccaaacaccccatgacttaggtccctttgagactcaaaccacttaccagtcccaagagagtttaaagattctgaaattcagaattgcttttttgaagtgaccagaggtaaaatcc

SEQ ID NO: 1882175 - DNA, 4001 bp, Homo sapiens
acagaaaggctaaaccaccaccagaaaaagagagtcccatcttgagtggagaaatactgacaatacgtccgagatctggtagatgaaagaactgagacagattttaaaagggggtgaaattgtttgagactggcaatggcaatgttgcaaaggcaagaggaaaggcaggaagaaagaggcgacttgaaggggaggtaccccttcagggcttgatggtgaagaaaaacgaagcaagcaatgagtaagagtcccaggctgggcgcagtcgctgactcctataaacccaacactatgggaggccgaggtgggcagatctcttgagctcaggaactcgagaccagcctgggcaacatggtgagacccccatctctacaaaaataaaataaaataaaatactaaatttagccaggcgaggtagtgcgcacctgtggtcccagctactcgggaggaggctgaggcaggaggatcgcttgagcccaggaggcagaggttgctgtgagcagagatggagccgctgcactccagcctgggagacagagacaggctgtgtctcgaaaagaaaaagaaaaagaaagttaagagtcccacagaaatgaaacagaatcacaaaatcagaagacatcagccagtgcgccactctaaaaaaagagggcactcttgaactaagaaagctggtaaggcacccaacctcctgcctcatttgcagttgctgaaactggaaaataaaatattacaaaatgcacagaaaattgcagacatattatatagaaaaaatttaagtgaaaatctatattttctaaaaaaaaaaaactcaacatgataccagaaacctgaaacataatattccagccaaaattaaataaccttaaacaataatttggtaacatgaaaaaaaatgccatgaatcagaaaaataactcagaacagaaatggacaaagaacgaaataactaagaaaacagtttgttaaaaaaaaaaaagcaggagaaatagaagaataaaaaaatcagaaaaaaaaactaaattataagatgttcgaagaggaagagcttttacttaaaatataataactggtattgaggaaaggtattaacacagccaataaaataaaaataaaatcaaaagaaagcaattcagccgggtgcagtggctcacgcctgtaatcccagcacttcgggaggccgaggcgggtggatcacaaggtcaggagttcgagaccagcttggccattatggtgaaaccctgtctttactaaaaatacaaaaattagccaggtatggtggcatgtgcctgtagtcccagctactcaggaggctgaggcaggagaatcgcttgaaaaaaggagatggaagttgcagtgagcggagatcgcaccattgcactccatcctgggcaacagagtgagattccatctgaaaaaaaaaaaagccattcaaaggatcagacagaaagtggcgttggtgtagaggcaaagatccaacatacattgcagtccctgaagaagaataaaacaatggaaccgatgtaatcttcaaaactataataaaagaaacttgggtctacatatcgaaaggaaacctaggaaaaattatatggaatgatcaagtctgaggtatatcttagagcatccattagatttgaaagaaaaactcctgtgggcctcaggcaaaaaggacaagaagatacaaatatacaggtaactgttagaacaaacacgtgaacattactgaacactgaaaaaactttaaaagttaagagtttggttgtgtttggattttaagcacttccttgctttctagcactacgaggtgctccgtgtccatttctatatttcctgcccactactaaaatcagccatttctccaagaaaccctggatccttttattatggaaagtgagctgaacttcagcagtaagagggctggagagcgcccgcgggtctcgaacaacccagagaggtggtttgatgacacgcgaagtaaccgctgagctaaagccagcccagaggttgctttcggattgtattttcttgactggtgagaaagacctacgtcacaaagagtgagtcaaaacaacggtgctttagcttgactcagcgacctggactgtccaatccgccgctatctccaggcaattgcagagtgtccatctggggacatacagcagtgacaagtactcagccttcctctaacccctggagagctcttccgcggttgtgcccccggtttattctctcctcagcagtcacctggtccacaactctccacacgcccccacctcctttgcctccagcttttgcgctcccaaaacaaccacgcagggtcactttgtgatcaaatcgacttttacaagtagagcttgggtcataagagtggagtctttacaaggtgtaaattgtatttcagaccttatcttagaacttcgctgctaaactagataaaccttacatcctctccccaggggaaacttcctgcggcgcttttttttttttttttttttgacagaatacccctctgtcaccctgtcacccaggctgcagtgcaatggccccatctaggctcaacccatacgcccctcttagccttcccagtagctaggactacaggcagtccaccatgcccaactaattttttttttcctgagacggattctccacgccgttgcccaagctggattgcagtggcaacaactcggctcactgcagcctccgcctcccaggttcaagcgattctcatgcctcatcctcccaagtagttgggactacaggcatgcgccaccacacccagctaatttttatattttttagtagagaggaagtttcaccatgttggccaggctggtctcgaactcctgacctcaggtgatccgcttgcctcggcctcccaaagggctgagattacaggcttcagccaccatgcccagcctttcttgttttgttttgttttgtctttttgtagagacaggctcttgctatgttgccaaggttgacctggaactggcctcaacagatccttccaccttggccacccaaagcgctaggattacccgtgtgagcctccatgcctggcctaaaaattatttccatttttaatactacagtaacatctattatttttatgtgcactgtaaacagctaatctttcttccccaaattcctacttttctccaattaaccactgtttatatttcaatgtgtatccttccagtcctttccctcaatctgtatatttaactgtatacaaaacataaggtttttcttggcttgctgggaatcttggttgttggatattgtttacttaacagcatgtcttggagatccttccagtcactgcatataaacctaaatcacttgtattgtaacagctgcattatattcaagtataaatgtactagttttaagtttcactatcataaagctgcagtgatacacatcttggtacatatatgtacacatacacaagtatgttgttagaatatatgctggattaaagaatctgcacacatatttggagaaagttatgggagaaatgcaagaggccttgagggtgcctgaagccgtaggatcatctttagtaataaggatcatcttttgttccccaggtactctgaagggcaattccaccagaatgtacattccatgacatctgggactttgatgcattgccccagacgataataccagtacctacagcatgttcacctaagcactggtcaagtggatattcctcaaccagaatgcaaacatttccattggttttagaaagccctgaaacaagcttctctttgagatttctgagttatctgggagattgctgtgggctcttgaatttccattccatttcctttcctaagacaccaacttgagcacctccaaacacccccatgacttaggtccctttgagactcaaaccacttaccagtcccaaaagagtttaaagattctgaaattcagaattgcattttagaagtgaccagagatggccaggcgccgtggctcatgcc

SEQ ID NO: 1882176 - DNA, 4001 bp, Homo sapiens
agcctagaaccattgtggtaaaagtattggctttggtggtgggaaggtgaggagattttcaggtttatgtaaattcatttcatgaaatataaggcagatgaatcagtttgggagaaggtttgaggagaggaaatatgaaatagtcacactagtgttctttaaaaacgcgggttcctgcgcaccacccggtgattctgattcagctgtctggggtgggtcggggaaggaagctgaagtttttaaaagaccctcagttgatgctggtatggggattgtccctttcctacccacagcaggaaggatttggtgtcggttttgttttacattaagtaatttgtattctttatggcaaactggaaaatgaagattgatcaaatgttgagttgaatccctctagtccctcactccgccaccaccaacaccactgctaatatcttggcttctatcataggtctagctcaatagttttccccttagctcagtttctctcccctgaaaggttcaagtttgggctcctctttctgtgcctgggttgtttctctcccagagggaggtgctcgctcctgatgttcgctgttcccaaacccctataaggatccttcagtccaacctcttgggtggggaacagagggggtccgtgaatctccaaggtccttctcctgcttgccaaactgagggaggaactcccactagccctaggtgtagcagggggcccgccagcagtccctggggctctctgcttgggggcgggcataggaggggaggtgcacactggagaggaggcgcgcgggaccggaggcgcacaccggaggggaggtgcccccaccaaaatttaagtgcggcgcaacatgcaccacaggtaggggcactaccagggcaaaaagacttggtgaatgcgagggccgggcctgatcaaaggtgcgtatggtggtaccagagcaaggcggaacagctgctcagtggtccgcaaccgggtcaagggacaagaagacgattctggattgtaggccgcccgagagcgcccccaggagcccatcactgcgaacacccactgcctctgggcttgcattctctgcctccccagagacgcaggcattttctcccctgaaaaagacccctccccataccagcctagactttcccaagggaactgaggccacttcaatctaaagccctaagtataggcaagttgtgttccacaattctacttatagggatttaatatgaaaaacacatgtgcatgtccctgtgcattaagctacttaaatcagctaatactcaaatctggtcaacaatgtactagacgctgtaagtacagcaaggggagaggcccctgcccttgtatggcttctaggggggagcccccacgctaaaggtaaagacaaattgcataaaatgtctggacacgatgcgaacaggtgagaatagcgtaggtacaggccgccagggaggaagaaacttggaactttcaaagacgtaaagaaaaattcggagcgagtctcactcgctgtggtccaacaggcaagtcctggcgggtggcaatatatgtgaaaaaaacagtcatacagataaaacagtagacggcagctattgctgttaaacttccgtcctacttgggacgaaatccataacgcactccgcggtccgaagttgtggggtctcggagcttccaggtgtgtctcgtgaactgcacaagcatttttttgtccccatgcgtcctacctggcagtacaggctggtcacgcacgccctgtaagaccagtggccagcctccatactttctgtcacaccttcaaagtgacaccaacttatgttatcagcctattaatttagcaaagttaaaagggataaaaaataacaaagccttcagagtgacagattataccgaatttattgcataaaagggtcagtaagcacccgcgggtctcgaaccccagcacagagatggacagatagaaagtccggcatgaggaggtaaccgcttgagctaactccgacccgggtaggagtgtgcgactgaaacttctaaaccatagaagagtgacgatgtggagagggacgggctgcatgtgctccccgcccccgagaggcctgcgtcatgcggtctcgcccgctctgcgccaggcgtcctgctaacgtgtcctggagggactctcagttcctcccgcccgcatcctgcgcgggaaccgtggaagggggcaaaatccacccactggaggggaggcaggagggtgcgggggggcgtgtgggccgtctacctaggtccagcagccaggctgctgaggagtacccccgccaaaggcttttcggggttctctccagcagacgggggcagcctaaggcctccataaaatctccccgaagcagcctatgaacttgccaaaggcaggggttctgtggtttcatttcttgccaggtcctgggctggaccctggagacggagttcatcatcagcaaatcctctttgggtggggagttgaatgaattaatgagtgattagcagggcactagggcccaggagtaagcccagaattgagatcacaggctgaagatttaaaagcttcatagctcaagagaaacgctctgttaaggctgaaggagaataaatcattcctctttttccccaacccatccccttgtctacactacttttcttttgaaagattcaggagctggatggagaaaattgctaacaaagaaaatgggaccttcagaatattaataatgtccctgtttgttgagcacacacacaccatgtgccacgctctgggttaaacatttacctcatttcatggccggaacaactctgagatccataatgttgcccccattttgcaaatgaataaactgagaatcagtggtggtaagtaactgaaatgttaggaattaacaaaaagtgacatattcaggaacagaaccaaagtttgaactctcaagaaagagttgcctgtagtgtatgtctgtctgcctgtcttgcttaaaagtatctcaaacaactggtaagctgcactagacagggatcttccattctgttctttgctgtctccctatatcctcctcagttcctagcctggtccacagtagacactcaataaacatttaagtgagtgagtgactggggatagtaggaccccattatactagaaactgcgctgtcccaacctgggtttgaatccagcttcccctcttcctagctgtgtagctttaaactttttaattgtttttcatattcattttgtattaaacaaaaaccacgagtacagtaaaaattaaaacaataaaggtagtgaaagcccaccacccttgacctaactgcagcttccaatccagatctctccccagaggtaaccactgttttttaaaattttgctgtgtctccttctagtcctctttctattatataaagataattaaaaatatatagctttatttgggttatggctgtgttttgatatgaaggactgcactgtacacattgttctgcacctgctttgtgggaaattccacagcatgcctgggaggtccctcattatttataatggctccccaagagtgcatgaagcatgatttgttttgccatcccctgttagggctagacattgaaggtttttttgtttgtttgtttttttccatgagtttaccaatagcgctccaatgaacacctttgcacacgcctttttgtgaacatgggcaatttcatgaatgtgaggataaactctcagaagtggaattgctgggctgaatagcatatatgttcattgtaattgccaagttgtcatccaaaaatggggctattgataacatacccctgatggagggaggtatgggaagttatgctgaaataacacattttattcaggctaggtacctagtagtctcggtaaacaattacaaaaataactgccaatgaccatttccccgctagccatttccagctgctgatctgatccagccctggcttcgttgcctggagcctggatttagtaatgaaaactggccag

SEQ ID NO: 1882177 - DNA, 4001 bp, Homo sapiens; identical to SEQ ID NO: 318698

SEQ ID NO: 1882178 - DNA, 4001 bp, Homo sapiens
ttttggccctccatgaccccctatcctgtacccgtataaactccagacaccaggctccagcagcaaaagatgagcagatgaacagaagagcagaagagcagaagagccgcagataaagagaaaagagaaggaatattgggtggagttcagctggggacagttagagaatccaccgctggacggttaaactccaggggaagatcatctccctactccaccccctttccagctccccatccatcctactgagtgccacccctaccacctaataaacacccccaaccttcccccaactcctctacccccgcccccaccccggcactcaccatccttcaagtccatgtgtgacctgattcttctgggaggtgagacaagagctgagatacagaaactgtcacactgaccctctgcgcttgcaaaaaggcagagggtctattgagctggttaacacttaagccgtcagctgatggtaaggctaaaagagcacactgtaacacacgcccatttgggctccgggaatcacgggatcctgcccctggacactgccgtggggctggaagcccagcgccccagcttttgcaccctggctcctgcacccgtccgtctgcatgctccacctcccataaggggtttcagcaggcagagaccgaacacacgagccacaaccctgttgcacgtcctgcaaagggctgtgggagggcgggggccgggaggaaatcagggaactctcctgtttcattgtcacaagacttgcaaggcttccttaagagaggggtacacttccccacccactgacagcaagttttgaccaatagaaagtgagcagaactgaggcatgcggaatgtgagtttggaaagcagcttgtgccagtcatgtacaggagctaattgttaaatttccaggaacttggcaagccacttgttggactgtttgtagcttgaaatcggccattgtgggagcatttacatcatagaaatagcaaacactacatatctggacttcccccttctccctcaaagttggtttaccagcccagcagggagcatggcccagaaaagttgacctttcagcctggagtgaagaaaactggtggagtactgccaaagctccctgcagccacagtaattcgcttgagaaatggacctttaagccactgagttgcaggggttgttcgttacctgagcatcatctagccaaagctggtacaccatgctggtgttttggtgaacaccaataagcgccgccttcatctgtcccaacctaggttggagggatttcttccaataacttgtgacatcatgcgcctacagcctgcaaagatgcaaaccgcgctctgagactcaggcccgggaattcaggtcttggaaggttaatgcaaagttgtaaaacaatagttacatttcaaccacactcagctattgcgtcatcttaaaaccctggccaacacaaatctgtcgctcgcgatccttggcggtttcagagcgactcccctaccgctttcgggcgaaggccacacgtgacggcccccctttccccgcagacgtgtgaatgcagcgctgtgtctttaaggggcacgcgcggaggttttccgtccgggacaaaatgtcagcgaggcgcctggagggggatctaccatctcggactcccgacccgccgccggctccggccgcgtttcccgggtaaaggggtgagtgtgggcttccagactcggtggcgaggcgggctgggccgggcagcggggagcgcaggtgagcagcgaccgcggacgcccctgccggcctccctggcacccgcgcggggcgtgcccttcgctgggctgcccttctccgggccggctgtcgcgactgtgagaaagcaggtgggcccgggattctgtggcaaggccccgctcaccgtcttccagtgcctcattcttgctccttccctgcactcctctttcgacaagcttgttcggaatgtggaaattcgtcaccactctcctgctctccctttattaaagttgtctgattacagtcttttcactgggcaagtgactggacgccctgcagtgggttctttctgtaactgggacttgcttgatgtcgcccactttcggagggagaaagcgaatgcaagccaaaagcttacaccagaatccccacccctcccccacccctcatggcccccaaacaaaagaattttccgctcctttcggagtccgctggagcagtttctgtgatttcttgcacgaaccaaatgcccgaggcttagcaaagcaaaaacccccttgaaggaaaaaaataaatacttaccactagtcgaatttctaatgagccaagactacaaagataaggtgtttaagagaaacagttgtagaaacagcttaatacattgacctaattagggtaattattttctgctgtttttattcatatgctgacaccttttggaggcaagaatagcttgaggcagccaagaataaaaaaaaaagtagacagcaatacgtattataaaaagaccaaaagcccaagccaggtaattctcaatttaaaaattaaattaaaaaaatctttgagtcacaaaggccttcaaagtagggcagctttaaattcctataactcagattaaattatgcatttttacaagataaaatggatcaccaccttaatctttaggaccatatctattaagcaaagtaatgcagacctgaaataaaggtccactttaagggcagaacacttcacaattttcatttttaaaagtgcattaatagagagagagagtgcttctctgccttttagctaatggtagaaatatctaagagtttggcttatgccatttaggaaacaactctgattcaccccttaattacctgtgagtccagtgtattttttacagtccacatataacctttttctaaatttttacacattttaccatttattccccaactcaggttttacagtttggaggcatttttacttgtcttttaacttcagctaagccttcagcctggtgattccagactaatttttctaattgtctggatctctttataaatagattaatatatggcagtaaactaatatttcaacagagatggacggataacagatgaactgtggttttcttgacacttcagttgtcaactctaattacttgtattaattattatgctctgctttcattaaagtcactggtggatgaagtaaaagaaaatgtttttagtgtttccacatatgtctgtgtgaatttcacgttagtgtgaatttctcatctaagatccaggctcaaccaacatatattgatttaaactctgcctggtcaacccaactacagtaagtagccttgagtatagaaggacaaatagaggtgtagttaatctgctatgtccttttgagaacagtgcctggttctttggcctttagcctgccaaatattttttatgtgcacaagcataagtataaaataatacaatcaacttttgtaggtgctttataggatgagtctcaatattatagtcataccttgtgtatatgcccatgtttatacagattattcatccaggttttgatctcttcctttattctttatattggtattcagggacatcatactgaggaatctgggatttaatctgatagttcatcagaaggatagaacttcttcagaaattgagtcaaatggagagataattaatgtgaatttattgtcttccacaggcttagatttaagaactccttccaaataatggatactcaaatgaaactcagctatagcaagtgcagaggcatggtaccagcaacactactctctctccttccttgaaatatctaaaatctacatttgtcttttcagtttttttcaccctgaaattacactcaaaaatttccactgttaatttcatgttagcagtgcttttatttagcttcaagaaactttcttttaaaataggagcttggaagcctcgttatacaactgaggaactggaacttcattagagtcgagtactaagggtaat

SEQ ID NO: 1882179 - DNA, 4001 bp, Homo sapiens; identical to SEQ ID NO: 318705

SEQ ID NO: 1882180 - DNA, 4001 bp, Homo sapiens
tcagttgaaactgctaaataaaaggacaacccaaaaggtcacatatcatttggaaagagagaaaaaaaccgtaagcacaaagctggatatgtctgctatgaaaaacattttaatatgcctaatatttggaagctccatctatggtagacccataattttaaaaacaggttaccttgagaaacctattttcgctaaacagaaaacatacccacgctggatttccttccattatagaggcaactcctaaggctggtaaagaccccattttattttggagattctcaaagggggtatgagtgctgcaatggaatctctcattctcccttcaagaccatttgggaaactagaaaaaaaatcaacacttcccaaatgactcctgtaagggacttctcaaagcttaccaacaagaggctatcaaccaaacattttgagacaatctgtccccaacgacatcatcttgcactcaacaggatgtaagaagttaaaatgagatgaacaccagactacgtggaaggcatgactgaccaaccagccttctgcagcacgctgtgtgagtggacactgacaagtgcaatctggtcccagtgcacacactctgcagactttggtagggagaccatagaggatgggttaaaaaaaaaaaaaaaaaaaaaaaggcgggtgtccgaaggacagaaaaaaactgaagccaaaaattcgctcctctgcccactgccctacccaccgtcgacaattagggtgatgtcagtaaaccggtcctgctctcgctgttcattcaatcggtcgaggatcattttatgatgttcagggaactcctgaaggcattccatcgtctcttcagcctccatggccgtcgggctgctctacaaaagaagagcatgataatgtacacccatgagctcgagccgaggaacaaaacccctaaagcataaaacaacaacaaaaaaaaccagcaacgtgaaaagaaggggggagggtgaagcaagaggagagaaaggcgagggaagaaaggcgagccgagcggccccggagcgttgagaccggagccgcggccgcgggactccgagcctgacctaattggagtcgggagacgcgagctagagcggggtgggcacagcgccggaggttccgagcgccagggcgcgcaagtccaacaagggaggggactcgacagccgtggcggtcctctaacggcccgccaagcccttctgcccggccggggctcccaccgccccgggacccggtccggcccgcgacccacaacgactctcgggtcgcctctccctcccccgccctccctcttctcccccgccccgaccgggccggcactcactgagggaaggaggagcggcccaggcttgcgcgtcacttacgtcgacgcacaccgtcaccgcgtcgagctccggctgacgcggacgccttccgggcgccgaccagcaagggaacgggccacgcccctacccacacccctcagtggatgggcggggccgagcgcggggatttggcgctcacgaagggcgagggcttgctctctgagaagaaaccgggcagcggtgggcttgggctactgcagagcctggcagggccagaagctgggaacctaagtcattgcccttcaacctctcaccctccccagcttgactccaggggcggacacttcccgacccgagcccggaatgaactcgccaaccgtcctcacagcccagctactgcgcggcccctcccgccccgtcctgccccgcccccttccttccgagacctgggttggcccgccttacctagctcgtgggtcgccctccttcctctccgtccctcagagcctcttgttccgtgctttcccctcccagggcataatgcgccccacgcctttcctgacccctaacccgtgggtcgccctccattttcttcgtgagagccggggctccccttctgctcgggccccgctggcgcacgtgcgttcggttgggcacccgggcggccgcggccccggcagcggcagctacgggcgcgagcacgttcgggccgcccggaatcttcctccgcgaagcgcgccctccccgcgccctgccgcagcacgtgcttgctgggctcaggacctggagctgctcagaattatttacaccggatcccgttagtgcaggccttccccactcctttaaagagtccaggccggcgcggtggctcatgcctgtaatcccaacactttgagaggcctgggcgggtggagcacatgaggtcaggagttcgaaaccagcctgggcaacatggcgaaaccccgtctctactaaaaatacaaaaattagccgggaatggtggtgggcgcctgtaatcccagctattcgggaggctgaggcaggagaatagcttgaagcggggaggtggaggttgtagtgagctgaggtagtgccactgcattccagcctgggcgacagagcgagacaacgtctcaaaaaaaaaaaaaagtccagtgacccacagtcagctgcatgtgactgcttccttaattcctccaaagaaatattatatataaatacattttgaggataattctataattgagatttacttatttttttctctcaaagaacttgagaattgggattacggaggaactcaaatagctatatggtaataatgtcatcataacttcaacagatatgtattgagaatcctagtactagacactgagaagtccagctgtgaacaaggtatatgtggtttctgcctttctgaatcttaagtctagtagactgcatagatattttgaacagtaattgcctaggtgcttgctgatgagttttgcaacacctgaagaacgaagtaactgggtgtcaaggaaagccagttgacctgtaagaagagatgtgggcgggcgcggtggctcacgcttgtaatcccagcactttgggaggccgagttggggaggaggagttcagcccaggagtttgaggccagcctgggcacatagcgagaccccatctgtattaaaacaaaaaatgtttttaagtgatgtgaagtctaagtgttcttagccaaaagtatagcacatgcaaaggcaccaagattatagcattcaggaaactgaaacaatgttgctggatagacgcacaagggtgccttataaaaagtgttgaagatgtcagattttctttttgcaaggggaagccttgccgcatggtgacatcctaagatgtactttttaaagagataattctagccccaatatggagaacagattaaatgggacaagctgctaggaatagagatcaactgggagactgttagtaatgtagatgaaaccatgggggaaaatggaattagagagctggtcagaatctagagataggctgggcgcagtggttcaggcctgtaatcccatcactttgggaggcccagtcggggaggatcgctggaacccaggtgttcaagaccagcctgggtgacatggtgaaacatcgtctctacaaaatacaaaaaaattagtgatggtgtgcacctattgtttcagctacttggaagactggggtgggaggatcacttgagctcagggaggttgaggctgcagtgagctaagatggtgccacttcactccagcctgggcaacagagtgagaccctgtctcaaaaaaaaaaaaaaaaatctagagatagaaccaacattggctgtaaagcatgccatagatactaaataaatattgctggatatattggtgacaagggagaaagaatagtcaaagatggctcctggatttctggcttgagccagtagattgttggcaccatctaccaaaataggaaatacaactggcggagctggatggggagagaggatggaaccagaggtgttattataaggagataatgttagaggcccttggatatatgggcctacatatagtttagggaagaagactaaccgtagagatagagatttgcaagtttacagcataaaaggaatattgaagtgttaagaatagatgggattgtttaaagagagtctgc

SEQ ID NO: 1882181 - DNA, 4001 bp, Homo sapiens; identical to SEQ ID NO: 318714

SEQ ID NO: 1882182 - DNA, 4001 bp, Homo sapiens
agcaaacactagacctgctggcaccttgatcttgaacttctctgcctccagaaatgtgagaaataaatgtttgctgtttaaggtcctccatctgtggcattctgttacagcagcccaaactgagtaagacaagctcttttatattttactccaaaccagcaaattctcttgataaatcaatatttgtggattaaaattgctgattttaagatttctttggtttaaatttttattgctgattttaagatttctttggtttaaatttttattgctgattttcaacaaggcagttgcctgtataaaaaattactgacaggttggaacaataaacgggaatatactacattgcaggaaagtacttagctggtaaactcttttcagtctgggatagatcatgcagacagagctgaactcattcagagcaacgggggaatatcatgatagagagattgtttcatttgtgccatcccagggtttgtcaaaataaatcaggaaggaaacaatcaaatagtcatgttaatgtctgaacacccagccctccatagagtaaatagcagatgtccaataaatatttgttaaatagaacataaactatttcagtaaacttacgaataagcaagactgaaactacacctttcataataagaaagagaatatgccttagaatgctctgatatctaagaacctgtctggcactcacaactctcttacttaatataaacaattacacgaacataaacatcacataaggccgctatgtgaccaggatagatcaagacaaaaacaagattactctgacatcatgtaatgacgaaacaccaatattgttcaatccacaaaataccaatcatccctctctcccctcccgtctgctacttctttagctattacttttacttattagcttcagtctagtctttcctccttctaaataaaatttattgaaattcccagattttttaaaaaataaaagtcactgaattactctgtttcctaatagcattcaatccagagtaagacccacttccttaaccactccctaaaatcacctaacacaaagccaaatcctgcaaatactttctaacacattcttactgatgatacataccccaacagttccctgtggtgacagggctgaactgattcatcctaactcagcttcctaacttattcaaccacagggtattcctggtttatttgggctagaaagaattgacaataatgatcccattcctttaatatttgttttgatatttatttgaaggatgttttcttctgtgaaggcacgagttatggaggggacaagtggtttgagaaaacttctgaaggttttcaacttgagagtagtctgtgacctgcagagattgcaaagtgaggcctgttctaataagttggaactaactttaacagcccttggtccttaaaatcactgaatcgccaggtccagaaatcacaaaccccacagaacacatccatccccaccaccatcatagcaccagtcatacaggtccataagtcactggccacacgtacaccccatcacttggcgcagacactccatccctgacccacagatcacacaggcctccctgctaatgacccccacatgttcccaacactcatcactaaccatcactgaactcatagacctcgtcactgaaccccaaggaaccctgccccaataccaatcccagactcaacccataaacccccctgctgacccctagcttgattatcaggtcccaaaaatcctatcaccgcttaatgggaaccgctgtcacatccatattggcgaactctcccgcttcgtgttcgcgagccaggtaacgggctcccgaggctgcgctgttccgtatggggcgattttgcccattcttcatcttcagcggctttgttcaggaggcaacatgactgctcccagacgctgtttccgcacggggccgccattttgagatcccaggcgtctcagtacaagcggaggactcgccaggcgctgagccggaatgtggactgtaccacagtgactgcgaagggaggggaagacgacggcaaggaggcctactacacgagcagtaaggtccacacttttgcagacagatttcacaggattggagaagaagttggagtgctactgtcctccatttaaggatgcttatgttgaaaggcgaagaatttagaatggtacaatattttcgttggcgattccaattaaacgtgtttgtaaatggtacgttcttctccggggcgtttcctctgtgggagactggggccaccatggtgggaacggtcacttcgggaggggataacagtaatactgaacttttattaagagtaatgataagaaacactccgagggagatattacaatactgcgcggtaataagttgcaggggcaaactttaaaaaaaggaggaaaattgagacagggaagaggagatggacgtacaaaataaaggagaaagtgcggaaatgagaaagactaagggacaaaaagacgcaagacctaagaacagagaatgggaaactaagggaccaagagtgagagactggggacagaggcaaggggacgacgaaggagaggggagaaagagggaagtggggagcctgggaaaaggaggacgctgatggaatgtagagggagactgcgtaaggtgaccaacggtccctctttgcctgaaactattataggattagcagcaaaagtccgctgtgtcccgggaagtccctccctgaggcttcagaagtcccagtttccctggatgagtgggaaaaatttgacgaaagatacaaaacccactaggtggcccaaaaagtagggttgaaagggatggttattattgtcaagtcaatatggcatagattctgtgccttttcctaggcgctattgctattttacccccatccctgaggttggcgaccataatttgcaatttacaataatggattacccattgttgggtcactttggaatgttgggatttaagtgtatgacttaagtgcattgccatcataagcattcaggagtgtttaagttggattaactatgctgctttctaccaattattgtgctagtttaatttttaacattgtaaatattatgacaatgttttctaagagttcagacaataaaaataagtatgattatagtaccaacaccagcatgatccagacatccaggaaaagacattttaatgacggctataaacatacatacaactgattagggaggtaaataattaaaacagcatactacacagtatgcaaaaaagaatttaggattgggcataatagagaaggggatgtgaaagcacttacggagactgaattgtacaagtgcaggatgagacaaacaagtacttccagtaaacaaaacatttttcctttcccttacagtatatagcaaatccagctttcagcagtatatcaagttttcttatagtgtctttggctttggtaacagagtaatgctatacctcatagaatgagttaggaagtgtttcctcctcttaaactttttggaaaagtttgagaaggcttggtgttctttaaatgtttggcagaattcaccaatgaagtgtggtttgtagcaccacaaagcaatcgcaatagtaacatcaaagatcactgatcacagattatcataacagatacaataataataaaaaagtgtacaatattgtgagaattaccaaaacatggcacagagacttaagtgagcacatgctattggaaaaatggtgccaataaacttcaatgcagggttgcctcaggccttcaatttgcaaaaattgcaacctctgccaagcaaaataaagtgaggcacagtaaaaggagttatgcctgtatttcatcgcttcaaaagaggcaaaaaaggaagaataaaaaataaatgttggaacaaacaaaaaaatggcaagattatggttcaatgcaactatattagtgtctacattatatgtaaagtgattaaaatcctattaagacaaagattgtcatacttg

SEQ ID NO: 1882183 - DNA, 4001 bp, Homo sapiens; identical to SEQ ID NO: 584789

SEQ ID NO: 1882184 - DNA, 4001 bp, Homo sapiens; identical to SEQ ID NO: 584790

SEQ ID NO: 1882185 - DNA, 4001 bp, Homo sapiens
ttccttgatagaatatataagctacaattattgtgtttattgtctgtcccactaaaatggaaactccacgagggtactctgtcttactttcccctgtagttctagtacccagaagttgctggtattagagtacatacacgatatagaatgtttatcttccccttcatccaaacctataagaaaaagcaaacgaccttccatgtgttccttaaggataagaggtaagtcaaataatcaaattcttaacggagatgcctcaaagtaattattctggtgaatctcagaatgatggacggaagcatacagggcactgtcagtaaaggatgagaatgttacgtaagtactaaaaggtataaggtcagagtaatttctgttgggtaggcctaactaaaaagttcaagagtgggttcttgccctgcctgcacctattacagtccatgtcacagggtaggtactcaaaacatgggtactacataaatgagttttttccagatactggatatctggcaaatatctaaaagcttaatacatggcagaaaataagaaaacacctattccttcctcacaggatcaaaatataataataaaaagatgttttataaattttgtctgaatacacacttgagatacgttattgttagaagagaatactttattttgaaataaaatacaaatgtgcaaaggaaattagctcctcctgccccccctttgaacaatgagtcaatagaatgtgagactgggtagattagcagataataggcaaaggtctagcttttcagtggcaacttgaagaaaccaaagatgaatgatgctaaaggaatgaccctttggtacctgttttaaagtacttctggcccccttcttttataaacccccaggagcccagcaccacaccttgttaccctacaatgatcactcacgctccacgatgtcactaatgtaataactgaagatatgggccagtttgtccatgtcacgttccgacttgtaggtcagggtgaacctgtccattaatgctgtaaaccctgaccaacaaagcagaaattacgatgttaactccaaatcctaaactttttggcccctttctccccacacatcaggccagtgtaaaggaaacagatcccttcaagctgagtaattcctttatccattaacatggtgtaacttagaaactactaagggccaggttggttgctgctgccactgggaatccaaaggaccaccctctctgcttccaagagctggagatggtgcccttttcatctggagccagctctttcccctactctcttaggctgcctagctatgggaaacaataggatccctcctcatgtctggctagagaaccactcacacagtgaggacaggcacctggtattacccatcttcatatccctgacacagagtaagtatttgttaaatgaacgactcgcggagtggctgctagatagctacggccagaacaacggcgggcatatacttatgacgccaagaacgaattaactgaacgaataaaataattgaaacagaacgcttaatagaaaatgctcggggttgggaaaaacgggttcaaagcccggggcgtggtcctgtaaaaatcctttcctctgagtttcaatttcatcatctttggggtgagctcaaggactgagccggttcatcccaaaagatgtcctcccacgctaaaacgaagatactcaaagtttcctaaggaagccgcagcacgaagttaaactgtgccttagctcgcgggaggctaggcctgtaaccgtcgaggcctccaggggcttagacccaacggccgcctctcccgcaggccaggagacttaagtgcaagtgccggccgtcgccctcacccgtcacatggacgcctaggaggacgccctgggccgtggcgagctcgggttcccatccccgaggcttccgaaagaccagtaggtcgggaagcagcgccgccaagcgggcctccacaggccacagaggcggcgtcgcatgccgctcgccggtcaccatggctgcccgcctaggtaccggaaacagggcccagccgcgtagcagccaatccgcctagcaggctctattggaggcctgccgccgatcaatccgcgcaggcttccttgggacaacgccaatcggaagcgacttcagtcgccgccccaccaccttcccacattcttagcggggcctacttccccggggagaaggggctggaggtgcggcggtctgcgctttcaaaggagcaaagctgtcttttctactggaaacgggggaggcgaagacgctcctacgataaagccgttggtgtgagataaatatcgagaggtctttccctcataccacagagtagaatcttgggtcatctctgaatttggtaaggacaggttccactggcataaatctaagccaaactcaagcacagtttgactaaagctatcaaatactgtcagtgcttttccttcattgtggagagtttctcctctctcatctgccagggcaggtctactgctctcatcattgagtgcttcctcgggctgtttgtctcttgtgtgttgataatggcatatcggaggcttctagtctttgttgcttagattcccagcgaccgtaaggtaaaacagtaacaaggtgagcatgctgtggatttttaacaatcagaaaagtacttttgttttggtcttctgccaaaacaaaatctaacaaaacgtaaatagtacatcttcactacctgaaattctacaatacttaaggctgtttttgtgataacggctaattttcctcatggaattacttcatcacattttgataaacactttcagtagtagcatcaaatgtatgatcagcctgcaggtgacagaaaaaatctcctcaacagggtggaagggccaaaagggaagaaattaaggggagataaagctaagaggctcagacattacaagtttgatactgtttacagagacaccgtccatgcagacaagtcttgtcgggggagatcaaaatttcaacactggaaacacaaactagaacccaggagttgcagattcctcaaaagtcacattacttttcggttatttttataaatttattttaaaaaataacaattgcaatgacattaatgatcgatcacctgtacgcccccatactgctgggggaaaaaccttcgatatagttgaatcccaaagaaaaatcaagacattattatcaggcaccctatagccacaaaatgctctgttggtccagtggcatcgacactgacatgttcaatgtaccagtgcagttaaaatatatacacttaaaattatcctgcaaaaaaaaaaaaaagcactcaagttgcataactaggcattaaaccaattattcattcatccattcactctttctccatctgtaaagttatcactacagtcacaaataaaaatgaataaaagaactagtatcaaagaaaaaatccaaatgtcaataccctgcccccactttgtgggctactatggtgtgccaaagtgaccacaagaaaagggtcatgagctatttgaaatgcaatgacaaaatgacaactgaagcatttcaaacaaaattcaaagtcatctccccccaaataaaaaattcagcaacaaggctggcattactatgtacaaacttacagacacaaataaatagcatcttctaactgttggcagcttaagcactcaaagttaggtctgagtaatttctttctgaactctgcatcttagactcctaaattaaccaaggaatataaattcctcattgttagtaatctattctctgaaaaacttgggacttactgaataacattaatatcccaaactcttgtagagctagaagtttctagtgagcttaccaaaggatcagtcctttgacatctggaagccaggagcgattaccagatccctgggactaggaatatttcacttcctgtttcctttgcatagctctgtacctctatttctatcattacaatcatctctctttgtggtgtttttaga

SEQ ID NO: 1882186 - DNA, 4001 bp, Homo sapiens; identical to SEQ ID NO: 584799

SEQ ID NO: 1882187 - DNA, 4001 bp, Homo sapiens
gctggagtgcagtggtgcaatctcagctcactgcaacctccgcctccagggttcaagcgattctcccacctcagcctgtggagtagctgggattacagacacctgccaccacacccagctaatttttttttttttttttttttttttttttgtatttttagtacagacgaggtttcaacatgttggccaggttggtctcaaattcctgacctcaggtgatccacccgcctcggcctcccaaagtgctgggattagactccattcttgccaactgcagtagcacaagtgtgcctggccttgctcacattgcattcctttctcttgctttctgccttctctgatgctgagaggaaaatggtgtagaccttacactgccagaaaaatctcaagagagtctcaaaacaaaatgtatgctgttccacaattagtcacagctgcaggggaaatgcataaagcaaacattaaatgaaagcactctctaagaattcacctcagactggaattagagactttatccacgtgggacagagtacgcggggttcttgcactcctgactggcctcctccagccaacttccctctgtttaccaggccccaaactattctgggtttgacaggcatgcagatgtgcggagaggagaagaggaccgtgcaggcttgaagcagcaggatactgatcactactggctctgctttgaggggtcacggtcacggctgtcaggacacaaagatgggagaggagctccctgcacaaagcccttgtccaccctgcctggacacaggtcctcaaggccccttcccagtttctcttctgaacggacagcccagcccttgtgggatggcgttagccccgcagatgggaaggcagagcagaggcgttacaggggtaggtgggaaaacaggacgtccccagggcagaaagtaataggagcgattggcctcgcccagcaccccagcaccctatagataataggtgcttgctaaacagttgcaggaagcacaggcagatggggcatcagagggccctaagcacagagcacgaaagggggacagttcatgggatgataccaagtcggtgtacagcagacagcacaggctgtgaccgtttgctgagggctgcgcacagaggaggaggaagccccaagctttcaacaaccctggctttatgagcggtgggatcagactctggcttgttaaagacactgccagaggatcctggtcaacaaagaagaagaccccggtgtgtccaacgtgggaccggacttttacagatgagcatgcgctcccacctccaggatggtagtcggtatgaacccgcggtgcagccatagtcccgtgagctgcccacttcctgccctggccagtggttcgcctgctacctcggtcgtcaccattatcgggttcctcatccatgtgattccagatcccagcacacttgccaaacccagtgaatggtaagaggcagagggtggcgtcccagcccattcctagtgcaaggtctgtgcctgcagagctgatgaattcacatggtggcgggcagcactgggtatctgccataggctcaggtgatgccagcagtgagcagggtgcaagaccaccctacagagctgacaaaaccatggcggtgggcatatctgctgaaaatacccctccatatctggaaacttctaacttctcttcagccaaagagcccttgacaagtgcatgtgtatgaagaagctggggtaaaggcggtgaaataatgctgtgttgcatgaacacggtctcctagagaaaccacacacaatcaacactcactggacacgtattttgaaggtatatcaattgctatcgttgtcatgatcgaaaatccttcgtttaaagaggcagcacagggctttatgggcgccctcacgcacaggcactctgcctaggagggataatgccactctcctcctctcacctttctctgtgcaaagaaatgcaatgctgctatttttcatttgttttatttattgatttatgtttatagagacagagatctcactgtgttgcccagactggtctcaaattcctggcttcaagccatcctcccatcttggccttccaaaccactggaattacaggcatgagccactgtgccaggccagaaatgcaacatctcaatctgtgttcaggcccagctgtattacatatttactaagagggcaagggaaggtctcagaccaaatgtcatgtcaccgtggggtgggcagccgccaaggggccctgtgatcctggcctcctggcacccacgcccctgcacaccctaccccacatccctggggcacgggcggtgcttactgatccacttccaaccaacagtatggatagaaaggatgggaggtctctcccgggtcccggttacagaagcttcatggctcctgccccgggcgcccgctctctctctcttgcatggctcaacctcaggggtgcagttgccatattccgggaaacactgtgttttaaaacaagcctgtgtggcgagggatggaggccgggcagcaaacccgtgagcaagcttggaggcagatcacacacaagcccctcccgagagaccctgccagatcccccgctcagctgcacctggattcctgaccacataggcaggggacctttatgacacgcttgttgttttaagccgctatgttttgggtctcatcacgctgccatggataactaatccacatggcttctttaaggatctgaagacaaatatcccagttggcccggcagataaatattgataatataataatagctgctgctcatggtgtgcttgccagggcctggcgctacccagacactgaacgatcatgctcttatgcaaccagccgggacctgctaagggaaaaagataagcaaatggggacgtgaagcctcaggaacctgacctgcgcttgcacaccacggtttgttgggcaccttagtgacctgtgccccagctgactgcgtgtcactctcatctccagggaggcaaggttcagcgtgtgactccaagatcaaccaaagccttcagagccctggcacatgccaggaagcactggctcccaggagaaccagagcctctggggacaggcactgcaatgagcagtggcctcatgggatcttgagtacatttaaaaggttgaaagcctctttgttaaaaagacaattccattactttccccaaaaagaccaattttacatttaaaaatgccaccttcgtgaatttctgcaaatttcattgacttcaatttaaactcatttcctcttggactgtgataggtgaggatgaaaaatgcctggtcaggaaccttcttctgttcctttcctctttaaaaagcaaattccacagactccagaaggatcccaacatcatgtgttatttaagaaaaaacagagagatgaatgaggttgttttttttttctgaaggtcattaaagacaaaagatgttgctgaacaatgaatataaggcaatgccgttctttacccccttccagggtggcagagatgagcaccagccatctcacccaccgtcatgggccacagctctccagtagatggcaaagctgttccctgtgacatggggagggggttccctgggagggtacaggctggcagctcccatccgccccagccagtgcctgccatgtgcctgccccactcagtcctctcctggcacctgctctctctagctccttgctttgtgagaatgtgcataacaatggcactggctgtttctgtggtgtttggagaagagaggactcagggcttaaggaagcactttagcaagaatccagaaaacccaaggcccccactgagcaaggctcccaaacttccagtgagaagagaagaggcatcgccctggccccaggctcccagacctgcctatttcacctgtaagtggagcccccgaagactctaatcctaagcacagtctccaccatcagtggcagggcgcagacccccttacacacagcattagttgtttgggtgttcac

SEQ ID NO: 1882188 - DNA, 4001 bp, Homo sapiens
gggggcttggcttctgaacttgccaggaaacaccgcatcccttttcctgcagcggccgccccccatcccccacccgccccattctctcccctccccaactgcagccttccgcgcctccttggcccctcgagcctccctgggtcccctgcacctccccatgtcccccacgactcctaggcctctcgcgcttccccaggaccccgcgcatcctgggcctcttgcgcctccccggtcctcagcgcctcctcggccgccgtgcctccccgcaccttttgcgcctcatggggctcccggtgccttctgcccgccgcctcgccgcgcccctcgcctcctcatgcccctccgcgccccatacctccccacccctgtgcctctctgcctatcccctgtaccacccggcatcctccgtgccccatgcgcctcacccctcacgcctccctgtaccctgcatgccccgtgtgcctgctgtgccccacgcgcctcccccctcgcgcctccctgtaccctgcatgccctgtgcgcctgctgcgccccacgcgcctcccccctcgcgcctccccccttcgcgcctccctgtaccctgcataccccgtgagcctgctgcgccccatgcgccttccgcgtctccagccctcatgcgcctccagctgcgcatctccctaggcgggtacctcagcaccgctgagcccacccccgcccctgctcagtgcctcccagacacgcccactgcgggcgggacagtgggagctgtccaggcgcggagctgtccaggcgcgggagctgtccaggcgcgggagctgtccacgaggcactgaccttggtttcagagcctctgcagggcttctgtgtccttttggctgagccgactgggcaaaagttttagaaaagaccctgggtgttgcagatggagaaggatgatcgtggctgacttttgcttgcaggcagaagaaccacggggccatcagcctggtgctgtgggggcgcgctgactcgtggtccgcccctgccccaagacttcaggtgtatatgggattggatcagctatcatcccgagctcatggcacgtacagtgagccatgtgttaatccatagactaacctttttccttttaaaaaattagttgttttgtataatgtagcgagcactgtttccaacaaaaatctaggatcttggcagtaaccactatctgttttactctttcctctttcacttttcgctaggagtaatcattagctcccatcttgtattaatttttttttttttttactgtatctaatttccaaaaaaaaaaaatctgtgtgtttgcaactaagttatcttcctatgtgtaactttttgggacttaagtgataacagtaatattactaaaaatcaaccgtattgttgtttttcactgtggtttattccttctgactgctgtgatattttgtgtggatctgctgaagttaatttatccactcttctgttgatgggcctttggtcatttccaggtttttgctcttctgaagagcatgagatattctttcacattttctgctgtgcatgttccatatgtgcatggttttctcttttatatagacctgagtggagtaactaggtcatagggcacacgaatgttcaattttaggacataatgtcctgctgacttacatagttgttgaaccagttaacatttcactagcaatacaggagagctctgagccacctcatggctgacacttggtatttaatttttgccagagggatggttgtaaatggtataccattttggtcttgatttgaaattccttgatcaccagtaacattgaacatgtcttaacatatttattgatgtacatttttctttgatttgcttgatcatgtcttgttcattttatattgggttattgtgtgtgacctagattagaattttttcttttcattggatattaagatccaccattgtgtggctaggagtgggtttttccttctctctcctttccagcatggtgtgtgctttctcagtcagaggtaattcatcgtcctttatttcctggaattatacagacattcttttcttgtttgtttgcatgtgaatgtgtatgtagagattcttgatgctggttctttgccagttctgtgtttttcctagtttataacttacttccgttttctttaagctgttttttgatgagtataaactcttaaattgaataggtcaacctcattaatctttttgagtcttaagaaatctttctctatcttaagatttctgccaagttttgaagtttggattttgatgtttacatctttaatccatttagacaggggtgtccaatcttttggcttccctaggccacattggaagaataattatctttggccacctaaaatacactaatactcatgatacttaatgatctaaaaaaaatcacaaaaaagatctcataatgttttaagaaagtttacaagtttgtgttgggctgcattcaaagccattctgggctgtatgtggcccatgggccacgggttggacaagcttgtgtttagagttgatttttgtacccagtactgggtagggatccaattttgtctttttccatatggaaaactattttgtttccagttccgtttttatttccagttctgtttattgaacagcctcctcttttccctgacctattacttctgtcataatcaaagtttaattcacatttgtgtctctgtgctctctcttctagtcgattggtctctattctagtcttttgatcagtttattcctatgccaacccccatcatgttgatttttacatagactttttattctggactgttacagtaatgtcctggacaagcagagatgtggtcattctacttgtgggcctttctagagaatgttgattttgtagcatatgtgatgggaagtattgaaacatttcagtggctgagttatatatcctgatttgtatttttgaagatcacactggtgcaagatggatgaggaagtggggctggcgagggatgagactagtgtggaggcagggggagcagttaggtggccattgctggagcgcaggtagtggttttagcgggagtagaggtggagaaatgtggacagatttgagatgggcgtatagctgtggacctttctgatgtatagaatgcagcagacaaggtaaagatggcacttaatgtaatgtaatggggatgccactctgagatggaaaattctgggaaaggacagttttataaatttataagctatcagatacattataatgctacttttaatttgcttttccttggaaatagctgtttggttatgtatgttttatagcctgttcactctcttttctctccaaataggtgactctgttttgagaagtgcaaccagatctctcctggaattcaacacaacagtgagctgtgaccagcaaggcacaaatcacagagtccagagcagcattgccttcctgtgtgggaaaaccctggtgagtccacacaggcacttgatgtatttctttaaaaaaaaaaaggtctgccccttggtgttctggctgtagaggtattccaggaagaatcagtgagcaaacttagaaacacaaataagaaaaaccctaccaaatgaccatcatcatcaagaaccaataagtaaacaaattctaaacttgttacaacttttaagtaaaacatagaccatgtcttttgtaaaactacaattcaaagtgattactgtgttaaaaatcagtgcactgtttaatgtttaagttataggcatactttttttttctctaaaacctcttcttctagcatttcattttgataggttttagggcagcatatttagttttttaaaaaatatttttctttcctcatttatattaaattagagatacccacatctatttaggagaagccttggcccgtgggtatggggttctcaagttttttggatattacctggtgtttaaaggggacataattgtgtaaattattatgattgttcttattatgggcatatt

SEQ ID NO: 1882189 - DNA, 4001 bp, Homo sapiens; identical to SEQ ID NO: 584818

SEQ ID NO: 1882190 - DNA, 4001 bp, Homo sapiens; identical to SEQ ID NO: 584826

SEQ ID NO: 1882191 - DNA, 4001 bp, Homo sapiens
agagggaaaagagagggccgtccactctggacatgatcagtgtgtgtggaggttgccccacctcgcacccacccactgcagtagagaacgcaggaatgagaccacagctgctgggcctgtgttgtgtcctcaagtccagtgatccaagtccggagggcccccccacccttttttttttcttgagacagagtctcactgtgtcactcaggttggagtgcggtggtgcgatcaaaggcatggctcactgcagcctcagcctctggggttcaggcgattctcctgcctcagccatgagagtcgctgggattacagacctgagccactgggcccagccccatattttaagacaaatatttcctgtgtttgctaaggtttctcaattaattaatagttgaaaacacaatttgaaattgataattaagtacctatagtcaacttgaaaaaaacagaagctaaagcttttgagttctcattttactgtattaaaatgtagttgtgcatttataaatgatctaatttcttcttagtacattttttccctttaaaatgggtctcccaatactgactacacaatgaaaactttgaggcttacataattcaatgtgagctgggtagctttgccaagtctccaggtgttttccctgactgagggtggtacctgttatgatcaaataatttggggaacatggaaagaagctttctcagaaaagtgagcaccagaaagttgtcaagtgtagctcagtcatttttcagtagtagattggtaaccagaagcaaaatggaatgtttcttcctgggtatttaccaaaaccttaggtccccttttgtcctaaacatcacctaacaattgctaataagcaaggaaacttacatttgtattagtcctctttgtggattatcagtgtcattttcttctcttttttcttcttcctatgggctgccttcaggattgcaagtcccacaggattgcaagttaagagatgggggaaaagataggaattaaaacttgtgtttttcagtgtgctatttcttggtgaaatgctacttaagaggttgagaatttctctactaagtcctttagagactaaacaagactttttttaagtaagggatttgaggtggtttgaaagattatatacaataaaaaagaaaaatgtgtgtttaagtttgtgcatttatagataatataaattagaatagaaagttaagaaagaaatggatgcacacctccaagcatgaagcttgggctttggttaactcctgctttgggggagggcccagtgggtgggcttttcttgagggtgggaaataaagaccctgctgtagagcacagaactcattgataattttcacagatttatctctgttcaactgagagttcttgttttcttttttttaattttcacttgtatataatgaattcaaaagtaggagcaaaattcagttaaatgggttgacttggaacttgcctttactgtgaccacatgatttagctagactctcctccccacacccttttttttttttttttcctgcattttttccagaaaaggccactggtctgagcattcagggccccaccatcatcccacagtgagattggtggctctcagaggttggtgacaagtctctcaagatacagggccttcagagctgcatctgcgtggtggccttttcctgatccttctccctcagggttttaggccctggttcacccaggcctctgctaagctcccgcactttcttgccagaggtgtcttaaagggaaaaacctctcttttgtcgctcctgtcccttctttctttcttccccctcctcattcccctcctccttccccttctcattcactcttccagccctccagtagctgaacatttaagagctttttatgagcacatttgttgtcctctgaatagaaagaggaataagaagtggtttgtaccctagaggagctcaccatgggagagaagatgcctgaagacaagtgacaatgcttctgtgatgggggttgtagaggcaggaacaggatgctttggtaacacggaagaggaaggagaggaagtgactgatcagcctcggaaaggacttcacagagaagttatcttgagctgggttttgaaaaatgagcaggaggccgggcgcggtggatcatgtctgtgatcccagcactttgggaggccgaggcgggcggatcacttgaggtcaggagttcaagaccagcctggccaacatggcaaaaccctgtctctactaaaaatacaaaaattagcagggtgtggtggtgcttgcctgtaatcccagctactcgggaggctgaggcaggagaatcgcttgaacccaggaggcggaggttgcagtgagccgagatcgagactctgtctcgaaaaagaaaaaagaaaaaaatgagcaggagatggcccgggggagaaggggtggcaaagtgtaatcgagggcactctgggcggaggaagccgcctattcaaaggcatggcgtcatgaagggttgaggacctcatgtggtgcagagtctgaaagatggccagggtggtgccgaggcaaaggagatgagtttggagggataaaccacacttcagagactgaggaacctttaggctatgggtgctactggctgggccggaagtcgcaggaggcctttgagcagggaaggcggagctttgagatgccccctctggcagcagtgagcagctatgggggcaaactgtggaaggagcccatccagggggctgtagagtttgggtaagagatgaagtgagcttaaactgaaccagtgacgctggtgatggagagaaggggtgaacgtgtgaccagtcaggtggggaaaggggtggggcccgggagtttaggagcttgggaaggagctgctgtcagaaatgagataggctagagaacaaatacacagaggctggtccccttccagagagttcatttttctttcatccgttattttttattctgtgatggatgggggttatagaggcaggaacaggatgctttgttaacacggaagaggaagcgactgatcggcctctgaaaggtcttaaacatagacaagttagcctgagctgggtaactacagagtccatttttctttcatccattattttttactcctctgctttcaaaaaaaatcttaaaatctgtctacctcagagatattgtctgcttagcccatggtgttctgatatcccagtctttcctttgtagatgtccaccccttcattcattccattaataaatgcctattgagcgcccaccatgtaccaggcactggacttggagctggatgtacaatggtgaaaaggatgaacaaggtttatgccttcactgaagcgtctagtctggaggagtagacagatagtaaaccataatattaaataacctagcattaagtagagtttatgggggcatatatggtatgagatgaagcttgacgggttgagaaggaacagatctgttgagccttgtagaccatggtcagggaactgaatattatcctgggagctatggacaaaaagccaatatggcttggagtaacagaaagcagaaaggcaggattctgggatatctctgcttgagcaactaggttgatggtgtcatctattgagctattgctgtgtatttttcaaatgtatggtatatgtttcatgcatgttatttctaccagcaccacaaatgacaaatttggaaatacgtgaggtattgtatattactcaactgtgtgtatcacgtgcagtaaatgggtaggaatttcaatcaaatgacatgtcacatataaatgtgggctttctctcctgacttgggttatttatgaaagttatgtatgtggggcagaagaaacttgagctgtctaaacttttgctaatgaggtgagaataaggcctgagaaggagaaaaaattgagattgaaacaagaaaataaaagctcctaaggaaactatggtcctttctgctggcaatgtcccttgccagagcttagatgt

SEQ ID NO: 1882192 - DNA, 4001 bp, Homo sapiens
agtaaacaggctgggtggagtagctcatgcctgtaatccgggcattttggaaggccgaggcgggcagatcacttaaggtcaggagtttgagaccagcctggccaacatagcgaaaccctgtctctactaaaaatctaaaaattaaccgagcatgatggcacatgcctataatcctagttacttgggaagctgaggcatgagaatcatttgaacccaggagagggaggttgcagtgagccgagatggcactactgccccctccagcctgggcaacagggtgagactgtctcaaaataaataataaataaataaataaataaaagtaaacagacttaaattatttttcagttgttgtcaatttggccaaatatactcttatactctcacatactcttatatactattacaaagccaatgaaggttaaaagttgtaattaaaacagcaaaaacttgtttggaaaaaaaaaatggtatcctaacctatattacagaacaagaacagaaaaaatacctctaacaaatgaaattcttctaaaaataaaactatgaccatacttggtttttaactgtggatgtttttctagacagaaaacggttgatatttccaaagttaagattactcacgtgtatataagcttgagtaccagtaacaagattgccgaacttctctaaaactatcatttctagtaagaaaacccataaagatgatttcaaacaaaatcccaacatgagcctggggaaacattcatgcaccgagtagtaccacttgaggagcctgtgccagatgctgaggatgcacagaggaaaacaaaaacaaaaaaacagtcctatacccaaaaagtgagcgaatgggctccttaataagtagcttcctccagtaatctgactttccgtagctggagcaggctgaggagcagcactgcctctcagagagatgagggggaaagcaaagggcagacttcattaaagtgaaacagaagaagcatttcctcatcacaaatacacttctacttttccacatcatctccaggtaaacactagaatgcatacctgagacacaaaaagaaaaaacagtaacgacaattgagaatatctttgcctattatgggctattcagtgaacaggcaggatgtcatctctgacagaggcataaactgggattatacatgcacttagaaaagggaaacaaagcacaccaaaatcagaagacatttgaaaagtgtttgtaaaatacataatccattaactcacacctgcaagtctatgtgcaatttataatatatattaaatatatattacatattagctcacatataacatacaatagctcagtgaacgtatcgtgtgtgtgtatgtgtgcatgtttatatgttctttaagctataaaaacacttttaacaaacagttgcttagaatctcctaactacaaaagaatacaatctgaacctattattttcaatatctcttcctattaaaaaagcacatcttattattccattatcatacatttattatatatgaatatatgcataagaaaaagaaagtcaagaaggcaccatagctgatgattccattaacatacccacatacatgtaaggaaaacaaagtccagaacgcatcatgacaacatgctgacagtggttttgtcctctgagtggtagcattagaggtgattatttccttctttatgcttatctgtgttaattttttttccaaaataagcatgaattagctgtatctaaaacgttacataatggcctccaagttcttacagctttttcttacaaaaatggacaaggttaaatatcccatttgccacaatcaatgtacttacatagtatggttctgcttccctttcagttatctcatcctgatatagcgtgaaacaagttggaattcgtccaaaccacacatctcgaagcacatctttgtcatctgtcattcttccaggagttaaagcagtacatacaggctaaattcttatttcaaccaaagccaaactgaaaataaaatgaagagcattagtcagatccttgcaacgatgaatgaacctgctagaaaacaaaagattattttaaaaaatccatgccataaagattatccacttcaaaaaaaaaaaacgatgatcaccaatctttagtataaattcaaagaaaagagtacaacaaattctaaatgtaaaattattacttatgtaaaggaatcagatcaaaattacatatgccagtaatattcattgcatatttaagtactgaaccacagtcaaaatgaaactgtatctgcatcagtctttcaagcccagaagagtctactgcttacctaaagaggagcttcacctataccctgtgaatcctgacagtccaactccaaaggatcattctcgcatttacccctgccccgtccaatatattcaccttttcctactccagatagtttctcctctcttcctgcaaaactactctcccatcttagaaaatatctctttcacattggggaaaaaatctttctataaacccattccccattctaaatttcatcctctctacaatttaatcccaccaatacttccattttaattactgtacttccttttgtaaaccctctaccaaaagtggccccctgaacacctttctctgtatcctactattcccctacctagtatgctcctctctcacttattcaaatccctactctgcaaaccatgctcacagccctctggccccagtgaaacagtaaatgcttccacttggatctctcagaatattctctataccacaaatatagcactagatctgcaaaacaatattctaggtatggcataaggacatggcttttgacctctgtaatatccaagtgccttccaatgctaatattctgcaactgaataacacatcacaatacacgatatgagtaaatgctgaaataaatattgttgataatatacacttagagtaactcaacatgtggcacctggatactaagattcaatatacttatccaaataatatttctcatctttgataggcagctaattcataatctatcacaatgtagcctatgaaaacactctaaataatcttacgagtttagccaaatataaattattaacactgaattattcaaggagcttatttcccttttttttcctcttccactgaccaatgacattaagatggtataaattaattagttaaagaaagaaaaagttggaggtcaactggatgcaatgtcatctacaggtacgtaaactgcaagaggtggaaaaaatatgtccaacataaaagtactaggcaacaagaattctggttattaaactgagtccagtgctctttccagcatactactagtgttttaacttttattaaaatatatccataaaaacaactactttaagcgaatgatatacatgcatgtaaacttcatatcattccacactgataggctacaaattcaaactattgagtttctgcatttggcaaaaaatttccaagtttacaaatgacacaaaattaactcactgaaaataggaaagacctcactacgtcctgattacattaatagcttgctctttttaaagtgaattcactagtggcaaaaaataatgaaatctaggttatgacaaataagtaaatctaaaattgaatctgatataaaggtggtatgcagttgtttctgcagccatgatacatccagttagtcaacagctgcaactgagattcaccttttgatgatgaagagaaaaataatttgagacgaagagttcctctactaaaaatatttaataaaagttaattacaagcttaaagttgaagtcactatattgtcactattgatattatttttcttctcagaagaagcagatagaaaatataatccaagacaattgctcttccctcctcttcaagcactgtcctctcaaggaggaatagtaatctgattggtcagattccaggacaccacttgacatgtttattaataggcagggatgatcataaaccaaa

SEQ ID NO: 1882193 - DNA, 4001 bp, Homo sapiens
gttttgccatgttgcccaggaaggtctcaaactcctgagctcaagtaatccccccgacctcggcctcccaaagtgctgggattacaggtgtgagccactgcacctggccccttttctctttttcttttctcttctttcttttcttttctttctttcttttatttttctttctttctttcctttttctttctttctttctctctcgctctctctttctttctccttccttccctccctctttccctttctttctttctctctttctctttcttttctttctgttttttttttttttgagatggagtcttgctttgtcgccccaggctggagttctgtggtgcaatctcagctcactgcaacttccacctcccaggttcaagcaattctcctgtctcaggctcctgagtagccgagactacaggtgtgcaccaccatgcccagctagtttttttgtatctttggtagagacagggtttcaccatgttggccaggctggtctcgaactcctgacctcaggtgatctatccgccttggtctcccaaagtgctaggattacaggcgtgagccatcgtgcccagcccctctctttccttccttccttccttccttccttccttccttccttccttccttccttccttccttccttctttccctccctccctccctctctctcttgctttcttgcttttctttctttctttttttgttttgagacagtgtcttgctctgtcaccccaggctagagtgcagtggcgtaatctcggctgattgcaacctccgcctcccgggttcaagcaattctcccatctcagcctcctgagtagctgggactacgggcatgcgccaccatgcccagctaatttttttgtatttttagtatagacagggtttcaccatattggtcaggctggcctcgaactcctgacctcaggtgatctgcccgcctccgcctcccaaagtgctgggattacaggtgtgagccatcccgcccagcctctctctctctctctctttccctccctccctccctcccttccttctctctctctctctttctttctttccaggttggggtgcagtggcatgatcttggctcactgcaacctccaccgcctggattcaagcaattcttgtgcttcagcctcccgagtagctgggattacaggcgcctgccaccacactggctgatttttgtaatttttgtagagacgaggtttcaccatgttggccaggctgatctcgaactcctgacctcatgcgatcctcccaccttggcctcccaaagtgctgggattacaggagtgggccaccacacctggccaagaaaaacggtataatttcgttattataatagcattaatggtcatttcttttttttccccccaaatccgagaactttattggacagagctccgtgcagggccaagggcccggtggcgagggcagctccatccaggaggtctcagcaacaggagcccacaaggccacactctagctaaggttatagacagctgggagaccagggcctctccgcagacgcgggaacaggccagatctttataaataaacatccagtgaagagaaatgacaactctaagtcatccgaatacacagagcactctagggggtggggcaccgggggcctggaggggcgatgagtggacccagatgtccatggcacggggcggcgtggggggtggggtgggggcaaggccagggcaacagacaaccggcactaggacgctgcgctgcgcatgtacaagatcaactactgggggccgcggtcccgtgcgtgtgtgtcaggctcttcgttctggaatgaggaggggtggtttttacatcatattcggtggctggtgggctcggagaggggctactctgtggagaggatgagggcaacgacgagaccgtacaggccgagcacctcggggaagatgaggatcaggatcatgcccatgaatagtcggggctgctgggccgtggctcgcacaccggcgtcccccaagatgtctatggcaaagccggctgccaggccgctcaggcccacgctcaggccggcgctagctggaggcagctcctgtagaggctgatgtcgtcattcggggagctggcgatgaggactgtcaccaccaggccatagatggcgatgatgccagccgtgaccaccgggatgatggacttcatgatcagctccggccgcatgacagacatggccgcgatgccggcaccggtcttgaccgtgccataggcagcgcgcggggcgctgaagaccatggcggccgaggctgccatgacggcgaaaaacgaagcatactcggggccgttcttggactcggacattgtctgcgggtggggagggggcaagctctgcggccgaggcggaggcgaagaccggggcgaggccgggccgggcgcgaaggcgagcacgcaggcggcggcgaagacgatcagcattaatggtatttctaaagaagaaaagtgaaccatccttggttccgctaacctcttctattatctctataatagatgtctcgcatctagactcacatccaacatggtccggaagcaggaaggagccctcccttctctgacagattaattactgcttcctttgcagtccacttttctctgcttgttcatcgccatatcttgccttgattcgtacttgaaaggtttggccagagacatttctgatgtgtctgttctttttctcttacttttctgggtaatttaacgtgctggggatgcgagcacgttaaatttccatccattgaagccattctatttagggccaccagggggcatccacagacttgctatgggctcagcaccgccctcctcgtcgtatttacaacctcaaggtcatttgaggagaaagaggtgcctgactaatcgggttacccttgtagagctatttttaaatttttgtttctggtttctacattaaatctttcttcctcttcttccctctgattttctcttgtctgcacgtgtgcttctaagaggctctctgtgatagcgtcacagtcatctacatcctatttcctgcaggacaattgtcttccaatttttattttactttttgtaggaggtatgagtcctctggttgtctgaacatcctcttttggaaaaagcaaaacaaaaggaaacaacttcaaaagtggcagcaattcttttcaatgtccttgatgataaagagttgaaatcctttcataatccaaagctattataagccaacactggctgttagaagagtgatcactttgggtaatattgtttttgacccaaaatgctgtgtgactatagtataacaagaatgtttccccatatggctcaggacctggcttttgaaatcactcccatttggagtccagacttgagctgagcaatggaataagtgctttgttttccaaggtgattgttggatgggaaaactcatgtcttgttgcttagttcttacacctcctctgcctgtggagactattcctctgatttacataatgatttggagaccttgaagaggagtgtgtgggtagtgagtctagtgtaggggaatcaatgcacataagggaagaaaggagattctggattagagttttgacccacttgccaccaagagctcacaggcttcatattctaatcatgaaaccctttttggtattaggtggacaggaatttgatgacaagattggtttgttctttttttttttttttgagatggagtcttgctctgtcgcccaggctggagtacagtggtgtgatctcagctcactgcaacctctgcttcctgggttcaagtggttcttatgcctcagccagcctctgggagtatagctggggttacaggtgcctgccaccatgcccagctattttttttttttttgtatttttagtagagatggggcttcaccatgttggccaggcttgtcttgaactcctgacttcaagtggtccacttgccttggcctcccaaagtgctggaattacaggcatgaacc

SEQ ID NO: 1882194 - DNA, 4001 bp, Homo sapiens; identical to SEQ ID NO: 584841

SEQ ID NO: 1882195 - DNA, 4001 bp, Homo sapiens; identical to SEQ ID NO: 584855

SEQ ID NO: 1882196 - DNA, 4001 bp, Homo sapiens; identical to SEQ ID NO: 584858

SEQ ID NO: 1882197 - DNA, 4001 bp, Homo sapiens
aatcaccttacggattttgaaataagggtcaaagttccaaacagcagacttacaaacaagtttttggaacaaaagtcagttgtaggttgggcactggctattctgaagcaaagtttttacacgaatccttttacctactgacactgagctacagctgcatttcaggattaactaataccactgcttgttttcccagattatatgtcatatcaacttgcagctgcatttataaaacggccgtacaaaatccagaaaaacctgtttcttcagagatattttaggaagaatgatctgcaatgcaactagatggatggggccttcctcaaccattaaataacctatcagaactatactggtaggccgagagcggtggctcacgcctgtaatcccagcactttgggaggctgaggcaggtggatcatttgaggtcaagagttcgagatcagcttggccaacatggtgaaaccccatctctactaaaaacacaaaaattagccgggcatggtggcaggtacctgtaatcccagctactcgggaggctgaggccacgagaatcgcttaaacctgggaggcagaggttgcagtgagcgagatcacaacactgcactccagcatgggcaaaagagcgagagtcagtctcaaaaaaaaaaagaactatattggtacaatcacagtaacttatttcgatgcctttctgcagacaggaaactggaaaaaataatcattttcactgttaatttatacagctgtagccattaacatgtttttccatctatcaaaatagccctgaccatcttataataattctaaaattaaaggagctagtcaattgcaatatgaaattttaaaagctggtcagatttgccctcttttctccttctaaatcaagttttcaaactaaaagtttctatgttggatcaagtacagttctaaacgctgtgtacctatctagtactgactttatgaaagtagcccatcaacagtcaactgcgcacatgcactgtgtacgttcgttgtatacgtgtgtttgcatgtgtgtagggatgtatgtagagaataaagtaaaacaagcttcatgccgctctatccacatttctgcccagtatctcttgggaccaagagtatccattttcaagacagaaggtcagaaattaatccagtttttttgttattgttttacctgaaatggggggacaggtgggaggacaaaagagaataaagcagattcctgggcatctccacacatgtagatcagatcctctgggagtgaggcccaggattctgaattttcagttcccaacgtgattcttttgcacattaaggtacgagatcagcaagcaaagagaagacttagggctctcgggacccgtgattaaagccttagcggtactcaggctcaggctgatttctgacataagagaaagaagagattattgtccttatgcccttagtgtggactctggacagagcaatggactaatgagggcgttgggattctagtccgtgctccgtcacgggtgagtccatactacaggcaaatgtatctccctgggtctctctggtctgcacactgaaggggctgcactctatagcccaagcctccacggctccagactccttgaactgaggctgaccgaggcgcatgcacgatcgaggggctcgagcaccaagcgcggctggcccccaggatcggggtctcgcggcacaaagggcgacagggcagccaggccgcgcccacgccccgtgcccgcgcgccgggaactcctgctgtcggcacgcgcccctcccgccgcccctcgagcgcgccgatgctggggatccccggggcgaggtggccgccattacccgaacgcggccgcgggtccggcccgtgggacgtggatcccgggcttcagcgctgagagaagcagccgcaggcgcaacacgccccggccgcccagcacagccaccatggtcacaggtcgcgtagctgccgggagtgcgcatgcgctaagaccaagcgcggtacccggcccactctgccccgaagccacgccctctgctccgcccacctcgcctctccatcctgctccgccctctgcccgccccgccccgaagccacgccctgccgggtgctttcccatgggcgaccgaaactcggctcgtggtttcgcagtcctggaaccgccggcacccgcgtagaccgtcccctctcggtgctggctctggctcccgggatgagtgtccccgtcggcgctgccccgccctcgctcgtcgcctcagcgaccatggcctttccaggaggcgaggccgccagccatagcgccctcgctgcgtcggcgtccaggcgggactccggagtgggcggggctccggctctaggcaggctgctatgttggatcaagtaaagttctaaacgctgtgcacctatttagtactgactagtactaggaagtgtatttgcttttcggagatgatgggatctaaattttgtttataccacttcacgcccattaggatggctactagcaaaacccccagaaattagtgttggtgaagatgtagagaaattgaagcccttgtatattgctgttgggaatgtaaaatggtgcagccatgtgatgaacaatactgcggttcctcaacaaatcagttatatgatccagcattttcttttctgggtatataacccaaaagaatttaaaacagggtgtacaagaagaaatgtttttacactcacgttgacagcggcactattcacaatagccaaaagggtggaggcaatttaagtgtccaaaaacagatacatggataagcaaaatgttgtctgtgcatgcaagggaacattttttagcctgaacaaagaacgaaattctgacacttgctactacatggatgaacctggaggacactatgctgagggaggtaagccagtcaaaaaaagacaaatactgtgtgattccacttatataataaggtacctagaggagtcaaacttatagggacagaaaatagaatgggggttgttgagggctggtggaagggggaatggaaagttggtgtttcatggggacagagtttcagtttggagagatgaaaaagtcctggggatggattttggtgatgcctgcattacattgtgagtgtacttactgccactgaactacacacctaaaagtggtttaagtggtaagttttatgtatgttttaccacaattaattttttttcttttggctgtataattgcagctttataaaggttatagacattatctaattgaaagctcagtggagaaaaaaaacaactattgctttttaagtcaatcgttctgccttaattggaaataactggcagatttgtggctactgttgtagccttggcttgaataattggagacaacagcttctttgcatattgcatttcttctcctccaagagacctttttggtgtaacagtcagtcctgtgagcacagtgcttgtaggtgttacactcatagaaatttctgtcacctgcagtgtcctcactggcccattggactttcttgagtagtaaaggcagttttggcctaaatacagactatgcaaaagttttcatattctactctcaacataaatctatcacattaattcctgcataaaaggaaagagacatatataatgtttgagtttaatatcgtttgactttcagaaatctttggtgaggtcagtatttccttttttcctgatatgttgattggggtttcatctcagaaatgataaaaatagctgtctgtacagtttcaacaccagttacccttgtgctaataaaaaacggtagcactgagttttaggttattggtgtcacaattttttttttttgagacggagttttggtcttgttgcccaggctggagtgcaatggcgcaatctcagctcactgtaacctctgcctcgcaggttcaagcaattctcctgcctcagcctcctgagtagctgagattacaagcacccgccaccatgcccggctaatttttgtaatttt

SEQ ID NO: 1882198 - DNA, 4001 bp, Homo sapiens
tcaaattggaaagaaccaacatgttcacaatattgagtcttcctatccatgaacatggaatatctattcatttatttagttcttcttagaacatttttagaagagttttatagttgtcttcatatagatcttgaacatatgttgttagatttatacctatcttattttttgattgcttatatagatggtagtgaattttttaatttttatattccacttgttcattgttgacatactgaaaaatgattgacttttgtgtgttaaccttgtatcctgtaaccttgctataattagttccaggaaggtgttttttgtttgttttcactgttccgaagtttaattaaaagcacaatttacaaatatttgatatcttgtgaaagcgtttttaagttaagaatggaaaagtatgtacataatacataatcaaataccaggtggcctcaactcccactaggtccactccgtgtctttttaggttcttcaagatcttctgttaaatctacaaagttgttttccatgacaggggaaggaatggaaatccccattgctttttgaactccatacatgcttacgatatcacctggagttacttgttgtacaagttctttaagattattggtcacctgttcagcaagatgcatttctttgtatgagggatccaagagacatcatattgggaaggggtcaggtgttcaaatgctcattgagctggagctccctgagcaatttgttggtctcatcaggtttcttctggaatacttcagcttcttcaagagtcaaaaacttcaaccggagcgccaaagtttgttactgctttcagtgccatgagcctatcttgagtattagagtccaaatgtcctgctggctctacttgtgtaatctccatttgttttgctgtgtcaagtgtcctagtatggccttcatcgtcaggtgatatctccaactcttatagggccctggaatcccctccttttgttaaaacatccagcaaactatctgtcttaacatatgggtaatcttggcatggggccagaaactcatggttgctgaaattgcttggaagatcagtcttcccccatagattgcatagattaaatctgaattatccttgctgatattcataaatgtggagtcataatgcggtacataagaactccagggtccataattcaaatataaccctggagttactttgttccttttatcctctttgaacccctgcagaatattcactccagactgaagtcttccagttgtcattcccagtctcatagggcagtattctggctctcctacaatgggatccacaggatggggaagtcccagtcttcttgttccatctggttttcttctttcaaattcccactgactgttaacaagccacctggtcagttttcctccagattccttcatgatgcagtcaagctgctcctactgtctctctaaattactgcttttaaacttaaaagcatatctttgtctttctttttattttctttgctgggactcttgaaggcttgtgcttcggcatctccagagtcctctctctctctctctctctctcagccagcagcctccatcctccccactctgtgagatgtctgttctgtctttctgctttcaagttttttcaagttagccatgaagtctgtggtctgcttcaggctctgaattttttcctggctaaaaattttcatctctgagtgtaacagcttctttgcagctttataataagtggtctctggtttgttgtaaatcatggcattagtacatattggtttgaagttatccgttagttcttcactgttcttgatctcttctttcatgttgctgagatccattgggtgtttaatgatgatggagtagccaggagcaataaaatcacagaaaacgaaaagagcacttggatcttttctctgcagctgtctcatcagttgattcatgttctcaggccccagctaggtctcatgggctgtcttctcaagaggggccttgtgccacctggcacacatgctaaccccctgcattggcgtgcggggtttggtaggccctgctcctgtcctccacctcgcctggcctggaccagaagtggcaccccaaggcctgggcctggcatgggaggtgggcaccagggcctggtcagacatgggcaaggagcacaagtcagagaagcacctctacaaagagtatgtggaaaagcccttgaagctggtcctcaaagtaggagggaaagcagttactgagctctccacgggcagtttggagcactgctccagcctcttcaaagacaaaaacaatcatgacaaacacaaggacagaaagtggaaaaagagaaagaaaggagagaagccagttctgggggaagaaaaggggagaaagcagaattgaagaggacaaaaataagcgagatcaagaccatgtggagaatgaggcagaaaaagacttccagtgtcatgcccctatgagattagacttgcctcctgagaagcctctcacaagctgtttatccaaacaagaagaagtagaacagatgtcccttcaagatgtttgtttgtttgagacagggtattgctctgttgcttaggctggcatgcagttgcacaatcatatgtgcaattgtagcttgttgagcacccgattttgttgctgtttggggcagtacttgtagcctgcatggaccttgggagactgaacaaagggggtgaacgtgggaataaaagacaaagacaaaagagtataattggaagaaggggtcgggggcaccttgcctctagtggacagggtccttgagctttttcagccctctgaatgtattaggtaaaagagataacgagaaagagagggtgattgttgagtaattatcagtcagcctgtttggttcacagcaggcttgtgagactgcatccttcgaacaataggtgctagatttcccagtagataacttcaaggagcccagcgccagggagtgatggtcctcaggaaaccttttagcagcaggtgcagtgtgagtttgcccacgtcctgcgttcatgataaatagtttgctgtttgatcatatagccaccagtggaatgctgagttggtcacggtccctttggcatttttggctcccagcagtagctcactacagcctccaactcctgggctcaagcaatccttctgcctcagcctcctgagtggctgggagtacaggtgtgtgtcaccatgcctggctaattaaaaaaaaaaatactttagtagaggcaaggtctcactatgttgcctaggctggtcttcaacttctgggctcaagtgatcctcctgccttggccttccaaggtgctgggataacagtcatgagccactgcacctagccaggagtttttttgtatggattctttttgacattttataaaagatgatcatgttatctgtgaacaatgatggttttatttcttccttcctttccaatcagtataccttttatgtactctttttgtcttattgcattagttagcacttccagtatgatgttgaaaagcagtagtgagaggggacattcgtgcatgctttttgatcttggtggcgaagcttcaagtttctcaccactataaatataatgttagctatacttgtattttgtatatgttctttattaaattgaagaagcttcctctattactagtttgctgagagttgtttttttgtttgttttgttttttgttttttttgagacagagtctcactctgtcccccaggctggagtgcagtgatgcgatctgggctcactgaaacctccgtttcctgggctcaagtgattctcctgcctcagcctcccgagtagctaggactacaggtggctgccaccatgcctggctaatttttgtatttttagtagagacggggtttcaccctattggccaggctggtctcaaactcctgaccttgtgatccacccgcctcagcctcccaaagtgctgggattacaggcatgagccaccgtgcctggccaagagttttta

SEQ ID NO: 1882199 - DNA, 4001 bp, Homo sapiens
atggggatccaggaaagaggattgtgctggtctgcaatgggctggaatttagaagagaagctttacccaaagtcacacagtgccaaagtaacaaagcaaaatgaagcaacgcacctgccaccacaaggtgcaggatggcctcattgcaggacctgccttcttggaagtaacactggtagatgccgttatcctcggctgtgacattgtgtatgatcagggccacgctgcccctgctgtctttgctcacaaaggtggttctccctcggtactcctccttctgctcctctgttctctctcttccacccttatacacaaacactgcaggggagaactgagactggaaccaccgcacctccatgtcctcagcattttcctcgggtgacagacagcatcgtaacgtagtgttttctcccaccatggccaggatgggatcagtgggccccacgacagtgacctgggctgttcaacaaaggggcagaatcagacaaagacaccagccatcacatctctaaggcaggaaaggaagcaggtattccagggacaaacatattctttccacggccatagggtctccttgggctgagaattctggggaccagtagctgtggctagtcaacagcacccctgggagcagtaactatgaaatctgcttctggttcatgaaggaaaccctggggagccctccctgagcaccctctgtccaccctgtgccccatgaggagaatttcctccattccccaatctagcgctgtgcctgagtgtagtgtaaacttgagccgtgcaatagggcacctacccactagctagttccaactgaaatgaactgtaagtgtaaaatacgcacaggattatgaagatttaaaatttcaaaatgttgactaagcatttatatattcatatttggttatttggggtgaaacaaaatatagtacacacatttatttcatgtttctttttactttcttaaataaaaagtaaaatttaatttttttggaaaatttgcaattgtacatgcacttggcctttgtgcctcactgtgtttcttttggacagtgctggtataaattcagtgaacatgttcagaatgaaaggataagtcaacaactccacagtccttctttctttgcctttgcagactacagggttgatgatcctttctgataggtgacagcagcaagtggcacacatccctacctgagaccagtgcacacaggctgaggaggaggaggagggaggctggccgggagaagtgcagggcagcagctggttccatgagcacccagagcaggcagggacaggaggcctagggttacagaggagaatcagcctaggagtcttggcacctcagtgctggtcgggcccaacctctcccgtcactcaagtaggtctcatcagtgccccaacttcagagagtcccctgcatccgaaggctcaggtatctcctgagagagggattccttaaacattccatgaagtaagccatcaatgccaagatcaagggggcctttttccgccctcctcggctcacttctctggccagagtccggtttcttcagttgtcgctggattctatcacaccctcctcccttcacttcctcctccccgcgatccacgccgggccaccggaggtaaagccaggcgaggaggcgccgccccaccggtgggctttccctctcccagaaccccctctcaagtccacagcggatcccgctacttccatcgaccgccttcaccccggagctgtagcgcctaccctccctttcctaccttctagaattagcgtgtagtttcttttctcctttggtcctcaaatggcaattctccagtcgtcccccaagtctccaacctttccaggggcacaggcactactagtcacaaactgtcccaaaagaggagaaaaagaattttctttgcctcccacttactcgcgatatgtgaagttgtgggacccgggatcagattctctgggcttccacagtgtcccaagatttccctaagtattttagagtccaggattggccgggtgtgagtgaaccagccaatggtgtcgagccttatttctcagcagttactaggtagaatacaccgaatcaaaaatttcaagcagcaagtaaccttttgagattatcgggtctttttatttcctttttgtttgttcgaaagcaagatactttttctttcctctctctctctctctcaagccttgagattcccaaggctggtccccaaggttggtggctttgctactatccacaaggagaggcttctctatgtagagggagattttgctggggaggaaacatgaggaggaaaacaaaagccgccctctttccaaagccagaggactcttgtctaagttgctggctttggagtttgggcctggagcacggaaggtcttgggggaagcaggcatggctggagcgggaggggtagcaaaggaaaggagacagcagttgcagtggctgttatgaaggccttgtcattcattccaaagctatcggataagaggtgctgagaatcctgagttatgatcaaaaaccctttccctcaggcaggtggcattctggtagggacagaagatagaagtgaacaaaactttctagctggccttgactttctgccagtaggtggtggggttgagtccaaggaccacacacacacacatacacactggcacacataccctcttccctccaaaaaaaaatcccttttccacagactaaatcttgtcattgtagagatatcttgcagaataatcttcccgaggctcagttgtgaatatgtccctcaagtgtctaaatgcttagtctggaggcctccaattaccttctgattcaattcaaaactttgcagttaatacgctagcaatggctccacagtggccttgcatcacaatgttgcactccctgtggccagcgctccctttcccatgccatgcctttcacttgaattgtttgctccatctctgccccgtgaaatcctgcccagccttcgtgcctacttcctccaagaacaactctgaatgttcctgcctgaagtgttctcagcctcttctgacacccaaatcttttgctgttcccatatcctgtcttgtattattgttattcaggtatcaactgtgtctttgctgtggctacagtacctgctcttctagactgacttctgcaggatgtgattcttctctccttatagggatcagccttagctctgctctcagctgctgttcaatgcatgaatgacatgctcagggtaaggtcattcccaccagagcatggcccagttcctggaatcattcggcatcagagtgtgagagagaggtggcagcaggattaagccactctaggtcagaagttcaaggaccaggaaggaggacccagtaggttccttctgcagagaaagctctatgatgagaatgagctaaagcaagtcctgagaactgctttttcaattggactgacccttatactgtccctttctgaaacggcagcctcacctaccacttgatgcttctggagtataattaaaattggattctaggttgagtggctaatgaggataaaatcataggaagtattggatcattccagccaagcctggactgttctttggaataaacagaagtggacactgtaagtatacaaaactcaggctaagatctggcttcagtttttttatctgaagatataatgtccagggcttctgaagcagcttgtgccagaagtatccagctaagccaggtttcaccctctgccaaagttgacctgagccattcggaaatatgtgtgttctaggcaacaagagggtttattgctcatcaggtagcttagcaagaaaccaggtgatatggtttggcatgggggcaatcatgggagcagttacctccatgctgttctcataatagtgagttctcaggatatctgatgattttataagggactttccccccttttgctcagcacttcttcttcctgccatcatgtgaagaaggacgtgtttgcttc

SEQ ID NO: 1882200 - DNA, 4001 bp, Homo sapiens
cagtaagatactcattataaataacggtttcaatcctagatgggttatagtgaggggattaggttttttccagtcttcacttcctatagaacacagactcaaagaaaacacagactctgtgaaaggctagaactcaaatcttatgataactaattcagtgctcttttcataaaaatgtgcaatctttataagatctacatgccttacaggtatcctatcctgaaggtaaggagtgggtgtgtaataggtgacaatatatctaagttacttataacactgcctgacacaaagtatactctatgtgaggcatcagtaagcttcttctgtagagccagagagtaaacattttaggctttgtgggccataaggtttctcttgtaactaatcaaagccgcactggcagcatgaaagcagccataaaaatgaacgtgactgggttccaataaaactttatggacactgaatttgaattttatataatgttcacatatcatgaaatattcttcttctgattttttccaaccataaaaaatgtaaaaatgggtatacaaaaacaggcagtgggctggggttttgggggcatagcttgctttatataattagtagacattattatgatgtctataatatctttctagaaattatttttaatggttgtttaaacatagagtctgtttctatgttttttatttttaatggctgtttaaactggtaggagaggggggattcaaacccagcttgtgtgacatcaaggcccatgctctttcataaacaagactgtctggatgttctataatttacttagtcccctgtggttagaatttaggctatttccaatattcattattataactcaccctccagtgaacatctgtgtagttaagtctttacgcacacatgtatacccacaccttaaaatgtatttagtggtagctatcaaaacagctggtagggacgtgggcacacctgtaatcccagctactggggaggctgaggcagaagaatcgcttgaacccggggggcggaggttgcagtgcgcccagatcgcgccattgcactccagcttgggcaacaagagtgaaactctgcctcaaaaaaaaaaggctggcagagcatctagaaagaaacagactctaaagaagtaatctcaaaaagtaatcttttatggttataggaaagttcagacgtattagaaaaggagttttataaatacaatatatatacatagaacttatgtcccaaacaccattttaagacccttatatataattacaccatttagtcctcaaaactatactatgaagtgcaggtacaattatcataattatcatcatcatcatcatcatcatcatcattatccccatgttccaaaaaggaaactgaggcacagaagggctaggtaacttctccaaggtcacacagtaaactggtaggagagggagtattcaaacccggcttgtgtgacatcaaggcccatgctctttcttactaggctgcaccatctcttcaaccagagacttgtccagtgtgcacctccaggtactctttataatgtaccttcacacaatcggtggtggtattttttatattgagatcacatttcacatgcatgaacgatctcataatctaataactgatgccaattttaaccaataatgggacacttttggtggaaactgggtacccatctaaccttcctctattgtcctacaagacaactcccaacaacgccaattctttattaagtttccttgcttttcttacccaaaatagttgtccagtgaacagtaaaagttgatcggagcatactctcatgtcttattttccaacgtatggcccaaatctacattcaggtagtgctttgcctacgatggagggccttgtaccgcctgggattgctagtttcggttaagtacccctgtttgaaaacaaaaacagtggcgcgtgtcagaagtccctcccgcgcggcctcttccccctcttcctccgcagcaggaggcctgacccccgcgtcctgcacccgtgtggaccaaacgttcagcctcccccgccacaatcggacgggaactcgcgcgctttccgggctattccctgtttgtgctgagttatgggcgaatctcccaaaaaggagatatacgagtgggtcgtccaactttgaggggaaacgaggattctctttctcattttctctcctgatttctctccctacccggaccgcacttctcgaattatccccgtaaggaggaacgacgaatgccgccggtcccacgagactgccgccccccactcatgcccaaacaaggatagaatcttgtagcgaggcgacaagaaaataaataagcgggcgtttcaaaccgagtcctcgggtgtgcagacccgcagcggagtcgcgggagcgaggtgggaaatcctggccgcggcgccgggctccgcccgccggggggcgcggggcggcgggcgcatgcgcgtgcgcggtgcggccccagccctggctgccgccgcctgccgccgccgtcgcgatgcctattttagtcaaagcggctgcgggcttggggacccggcccgggcagcggagcttccggacccgccgacccgccgaggagcgcgcgtcgggctcccgtcgagcagctgagcccgtgtgccccgcgtcccgcgccccgaagctgccgctccgaactttggtcggcgctgcccaggctccccgccagggaccagccgggtaaggatgggaggcgcagctgcagccggctttccccccgcgccgggttgtgtgcggcctcgcgctcccctggctaaatcgggaagcgaaagttggatctcagcccctcggggagcaactttgtcggccctggcggcagctgcttgttctacgcgcccgggcagccgggggcgccgccctctgtccctcctcgctggccgcgccctcgaggggctcccggcccttggaggccgcccttctccccgggtctgggcgctgcggccacagagaccctcaacggtcagcggccgccgctcaggtcaggcagccccagcgtccccgggccctcggccccaccgagtgccggctcccgcgctctgcggcggcaagccccttggtgagctccgtctctgctctctccgccgagtctccggggttcctcctcgccccctgtagggccgcctcgagccgcgcagagcctgcgtgcagccgggcgcgcggtgtcgcccactccgtccccgctcggagagtagggtgggccacggcgctcactcctcacccccgcgtcccgagagcgcctggccgaggaggaccgttgccacggaccctcctcctttaaggagcgaggtcagagggccccgggagagcgccgatggctggggacccgaggtccgcgccacccacccgcaacctccttccccgagcctttgggaacgggttgttggccagacaagtcccagaaactgcctgctttgaagcatgaataagtgcgaaaagactcttagcaatgtaatgccatttgccattcgggagatgtgcgaagattcagttagaattacagaatgaattaactcgactagcaagacgctcgtttgcagttatctttttcatttttttagtttggtagaggtttaatgttagtttcagcatttagctatttagccctacaatcacctatttgaaaaacgataaacaaaactttactagtataggtaatttaaggacttcaactttgatgatctgatgagggaaaaataatttctcttgatttagtcaaaattaatctgaaaagtttaccaatttagcagtctaacctttctctttccacctattctctgtataagaattgttaagtgtaagccacttaacgattaagtggtaatcaaagtaaactgatctgatcaatattttcgacaataggtaactggcatttcacaatagacaattatatagatatatagatacatatatctatatatatctctctctctctttaataaggtgtcgtgcgtcaaaacatgtt

SEQ ID NO: 1882201 - DNA, 4001 bp, Homo sapiens
ttacaggtatgagccactatgctcagcccgtcttcacaaattttttaaaattaatttttaaattttttttgagacagaatcttgccgtgttgcccaggctggagtgcagtgactcgatctcaactcactgcaacctccacgtcctggcttcaaatgattctcctgcctcagcctccagagtagctgggattacaggtgtgtgccaccatgcccggctcatttttgcatttttaatagagacagagtttcaccatgttggcagtctggtgtcaaacccctggcctcaagtgatccgcctgccttggtctcccaaggtgctgggattacagataggcgtgagccactgtgcctggccaatttttaattttttaattattatttttaatcaacagctttagacagagaaccttggtttcatcttcagtgggctgtggccatgggcagtttcttcatctgcaaaaggggagtagtactaggacccagctcacaagctgacaggggaagatgctcagacaaacactgcctgcctggcatagaaaaatgcccagcatatgttagccatgaccacgaccgtcgtcgttatcatcatcatcatcatcatagcatctcatgtttcaggaaactttccaggaagaagggacctcgattccctctggggaatgtccctggtggttgctctttcagcagcacagctggctaactaaggctttggcagttgcagcctctaaaggaaaaattcctcaggttcagactaaacacaaattgcactgacctttgatcagaaagtaatttcagagagagagatgctcagacagggagggcagctggttttgagccccaacctttcatcttccccttagctcctctcctttccattcacactgccccctcccccatcacctggccctcgggggtaagctgattcctctttaaaactctggcccaaggaagacaaaatttaaagcccactcccttcctccttagcatcactggaccaaggtcaaatgctacaaaaacattttattgaaaataagcaggaaaccaaacgaaaatagtcaaagaaaacgcacaaggcacgatcgttgtctagctccaactgtaactgtttctatctgggccattgccagattgcctcctggctgaagatctcttggtccacctaagcaccttgctttttacacacaacgcggggctctctgagaacaaaaatgggccacaaggggtgcaaaggctgggagaggagtagactctgtggtctgtctgagggcagttctgactggcaccacagtcggaggacaggcgcggcctgttgtgtgggtccagggcctccagtgggaaaacgtggctttaggcccttctcccagatgctaccttttacagaggaagaccagatctgaggtttagtttccatgttgtgttctgagttctttctattcattcagtcatttaaaagtacttaccaaactaccacaaacctgggtggcttagaacacagaatttctttttcttacagttctggaggttagaagtctgaaatcaaggtgttggcagggccgtgcttcctcagaaggctcttgggaagaattctttcctgccttttccggctgccggcagctccaaccttggcttgcggcagcataaacccattctctgcctctgtcttcaactcgccttcttttctgtgtgtgcctctgtgtcattacatgctgttctcttatatagataggagacccactacctgtgtctttgtgtccaaattcctttcttctttttctgttcatttgtttgagacagagtctcgctctgtcacccagaagcccaggctgcagtgcagtggcgggatcccggctcactgtaacctctgcctcctgggttcaggtgattctcgtgcctcagtctcccaagaagctgggattacaggcatgtgccaccatgcccggcaaatttttgtatttttagtagagacatggtctcgccatgttggctaggctggtcttaaactcctggcctcaaggcgatctgcctgccttcgcctcaaaaaaactgccgggattacaggcatgagtcaccaccatgcccagccagttcacttttttttttttttttttttttgagatggagtcttgctctgttgcccaggctggagtgcagtggtgcaatctcggctcactgcaacatccgcctcccggttcaagcgattctcctgcctcagcctcctgagtagctgggattacaggtgtgtgccagcatgtctggctaatttttgtatttttagtagagacagggtttcaccatgttggtcaggctggtcttgaattcctgacctcgtgatctgcccgcctcagcctcccagagtgctgggattacaggtgtgagccaccgtgcccggctcacctcttctttttttttttttgagacggggttttgctcttgttgcccaggctggagtgcaatggcgcgatcttggctcaccacaaccaccgcctcctggtgattacaggtgtgagccaccacgcctggctctggcttacctcttcttataaggacctcagtcattggattagagctcaccctaatctagtatgacttaatcttaacttgattacatctgcaaagaccctttttccaaataaagtcacagatactggggattaggactcgaacacatctttctgggggacacaattccaccattacagggaataaacaggataagaaaaccatagaacccagcaggtggtaggtgacacaagctaaggggtgttgccatgttgcccaggctggtctcaaacttctggcttcaagggatcctcccaccttgcctcccaaagtggggatgaaagtttgtctggggcattgcagttttagacaggaagaccagggaaggcctcactgagaaggtgacatttgagccaagacttaaaaaggtacgaaagtgagccatgtggaagtctgggggggaggagtgaactaggcagaggcacagctgggcaaagggcctgaggtgtgaccatgcctatggatttgaggaacttcaaagaggctgtgtgctgcaggagagtgaagggcagggagtggcaggaaatgaaggcagacaggtagcagtggggaggacgcaggggtccagctcatgtaggtcttgattggacacagtgagtttcagatgacagcctcctgtctcatggggtagccccaaagccacaggagtctggtgatttccctcttccccaccagacatctatgccatcggggtgggcaagctggatgtggactggagagaactgaatgagctagggtccaagaaggatggtgagaggcatgccttcattctgcaggacacaaaggctctgcaccaggtctttgaacatatgctgggtgagtgagctttgccctccttggtgtggggaggatggtgaggagcccgccagaggcccgtgttgggaacctggacacagtgcccctcacttgcctccttccccatctgatcctcacacccacagatgtctccaagctcacagacaccatctgcggggtggggaacatgtcagcaaacgcctctgaccaggagaggacaccctggcatgtcactattaaggtaccaggaaggaggggcagggcttggattccagaggtaaaagcggccatgggccagacatactgcaatctctgaaaatcacctgttcccctgcagcccaagagccaagagacctgccggggggccctcatctccgaccaatgggtcctgacagcagctcattgcttccgcgatggcaacgaccactccctgtggagggtcaatgtgggtaaggcaggggatgcaccagcctcctgatcctgaagccacagatcctaccacctcacccagcctctggcccctgcaggagccctggtctagcctaatctagtgtatcatttccaggagaccccaaatcccagtggggcaaagaattccttattgagaaggcggtgatctccccagggtttgatgtctttgccaaaaa

SEQ ID NO: 1882202 - DNA, 4001 bp, Homo sapiens
ccacctcccaggttacagtgattcttgtgtctcagcctcccaagtagctgggattacaggcacatgccaccatgcccggctaattgttgtattttcagtagagacagggtttcaccatattgcccaggctggtctcaaactcctggcctcaagtgatcccccacctcgccctcccaaagtgctgagattataggcatgagccaccatgcacagctaagaaggaattttttggatctccttccacctttgctgaaattctaaaaaagctgcattccacttttagcagctgttttcttatggctgaataaatgccagagatgccatcagattactttaattcaactgtctctcagttgacgagggctgaactgtcagtttcctcttggcacaatgcaagtagaaagatagtaataagtggctgggagcagtggctcatgcctgtaatcccagcactttgggaggcctaggtgggtggatcacgtgaggtcaggagttcgagaccaacccggccaacgtacagaaaccccatctctactaaaaatacaaaaattagccaggcatggtggcacttgcctgtaatcccagctattcaggaggctgaggcaggagaatcacttgaacctgggaagcggaggttggggtgagccaagatcacgccattgcactccagcctgggagacagagtgcaagactccatctcaaaaaaagaaaagaaaagaaaaagaaagaaagatagtaataactcacctgaatttctcgtcagcacttcaggatcatgatctctaacactcatcttctctctgtcacactcagggttggggtgcagccccagctgaggtctgaggacagtgggtggatgtggggcagggagctggaagaacactggagagacagcaggtaaatgagacatggctttattcagcagccccttcacagggtcagtgttacatttatacactacacaaacactagtggctgagagccaggtggggagctgctctatgttatgcctacatggctgtgactatataagacacaggactgtgcacttgcaccccaatcccgctgagatgtctaggctgtttacctcggcctattcctgctaccctatgcctgcttggctacagcacagccatgttccttacactctccaaacctgtcccactctctgcattctttatgggatgaattggcattgatttaatagctggctcaaacctgatcccacttcccccactccctctcccctcacactcagacctgtcactaagcctgtccagcccttctcagcaagtctcacatccatttccttccctaattactaatgctctcactcaggcaggttatgggaatctcctaactgtattatctgcttccaggctggggcactcccacaggcaaagctgataatattactgcctgtgtactgccctttctgcagaccacagaaggccctgcagaagaaaattcagtcctcctcaatgggatgcaagaccctcctgcaactggcctctgtttatctctaaacctgcactgttcaatatggtagccactaactgatgaaactatttaaatttaaattagctagaattaaatgaaagttaatattcaattcttcagttgtactggccaaatgtggctagaggctaccgtattggacagtgacaatatagaacatttccatcattgtagaaaattctgttggatacttaccttacccctactgcacctgaactcaaattttcaaatgatccgcacctttgagcatactgtgctttagctgaggcaacctcctttaattggattacttaccttgccaacgatgcccttcaaaacacagatcaaatgtcatcctattcagagaagcctttccagccaagcctcccactcttgtgcaagtgatcacttcctcatttggacgcccattgcactctctgcagacttctaccatagcgcccctaacactccatgtcacctagtgttcatgtctgtttccctttactacagtgtgagcctgggctggggtcaggaacccaatcttattcatttttctagccccagctctagactaatgcctgacatataggatatgctaagaactaattttgtgaatgaataaatattaccaataaatattctaaggtcaagattttatcagacttcagaaacaagagaatgccccaatttaaatgcctcactgacaggtaaaaactttgaagaggaaatatatttccagaatgatcatcgaaatactggatatgctcttttaagtcgcaatgtcatgctagagttgtgttccatttacaactaacccacgagaggcatgacaattggagtggataattgagatggtttgacaggtatagcgaggtgtggctgactgcacacgaaggaaattccagcttcagcaattattagatacacacctacgacattaaaagcatgaagatttggctagtcaattcaaatattaagtgtctaggcttaaaaatattttattgggacattttccattataaaaataagacatgctctttatgaaaatttgggagtacaaatctgccacccatagattcattaacaaaggattaatgttgttaacatgttcatgtaatgactcaccttatctacattcttaccatatcttatgttactcctttacagtcaacattacaacacagacatttttatatcttattatgggctgtatttttaatagctgtataatatgcaattgagtggatgtgtcataatttactgaagtattcccactattatgtagtatattttcaagttttcaccattataaataacagtggagttatttgagtataagaattttttgtatcgcatgtaatttattcagattcccagatgtgaaatatctgagtttttaaatatctgcttcatttgctactttattcctagtacctagaacaatgcctatcccatggtaggtattttattaataattgtttaatgaatatgagatgttaattaagtggaaaaaagctggcttgatatgtagacaccaaaagcatgtcataggcatgtcttgtgacaggttccagggaagactttgtccccacttttaaaaaaattaataaattttattttttagagcaattttaggttcacagcagtattgagtagaaagtacaaagttcccgtctatccctatccccacacacctaacctccctggctactgacatcctgcaccacggtggcacatgttataattgatgaacccatcattatcacctgaagtccatagtttaggattcactcttggtgccgtggaatctatgggttgggacaaatgtataaggacaggtatccaccattacagtatcatacagaatagttttactgttataaaaatgctctgtgctctatcatccctcccttcccccaacccctggcaaccactgatctttttactggagtacaattgttgaaccacatggtaagactatgtttagttttgtaagaaactgccaaactgctttccaaagtggctataccattctgcattcccacatgtcagcagagaaaagaattccaatttcttcacgtccttggcagcatttgttgttgtaaatgtattgttttggccatcctaataggtgtgtagtagtatgttattgttattttaatttgcaattccctaatgacatatgatgttgaacaccttttcatatgcttaattgccatctatatatctcctttagtgagatatctgttgaaattttttgctcattttaaaagttgggttttttgtttcatattgtttagttttaagggttctttgtatgatgtggttaacagtcctttatcacatatgtgttttgcaaaaatgttatccaagtctgtggcttgtgttttcattcccttaacaaggtattttgcagtgcagaagttttcaattttcatgaagcccaacctatccattttttcttttatggatgatgcttttggtattctattaaaaaatcatca

SEQ ID NO: 1882203 - DNA, 4001 bp, Homo sapiens; identical to SEQ ID NO: 584900

SEQ ID NO: 1882204 - DNA, 4001 bp, Homo sapiens; identical to SEQ ID NO: 584910

SEQ ID NO: 1882205 - DNA, 4001 bp, Homo sapiens
acaggagtgagccaccgtgcccagccaagaaagattttggaagagtgaatgaatacaaggatttccactagactgagaattagtttgtcaacagcatttcagtgtcttgagaagtgtttacatttggcgtggacaaagctggcagatgacgtagaaagtaaaaagttgcctcttcaaagtttcccttcttgttaaagaataaatcataaatgttagaaacaatagtttcttttaaagactaacttacttcaagcctccttgctttgtgctaataactctgttaagccctattgtatgtaactgcgggacatgctcacaggcccaggcacgttccagctcacagcctgtttagcaaatcgggtatcagtttaagattatgaggtccagccccagccaacggatgcaggacacagcagtaaggacaacccaaaggcgtaagggacaaatatgtctgcttttcctttgttcaggagtgctctcaccatcgttccatctgcaattgagcaccctttctgcataaagtaaaaattgccttgctgagagatcttttgtctccatgctgacttttcttcgtgtcaccaattatctatttctaacaataacaaggtcttttctgcactgcagtgacaaccaaagcatcccaaatgaaatcatttctgcaagacccaaactagcctctattaacacgtactaacaattcagaacaccagagaagaaaagttattggaaacaaaagggtctaagcgctgaagcactgtatcgcacttgaaatggaggctgaagatttgagaaggatggactatgcatcttgtttaccaaatgacctactacggtgtttatgagaactatacgaaccaagatttactctgttgggagcttgtaggaaagctgtaatgtctaagacatacctgaatctctaaaccttattaaataaaactttttttttctttgaaagggggcctggctcgtcccccagactggaatgcagtggagcgatctcggctcactgcagcctcgacctcctgggctcaagcaatcctcccacctcagccttccgagttgctgaggccacaggcgggcgtcgccatgctgggctaatttataacatttttgtagagacggcatcaaaatatgttgctcaggctcactttgttttcccaactctcaaatgaaggctctggccgggcgctgtggctcacgcctgcaatcccagcaactttgggaggtcgaggcaagcggatcacctgcggtcgggagttcaaaaccagcctagccaacatggagaaaccctgtctctactaaaaaatacaaaattagccaggcgtggtggcgtatgcctgtaatcccagctactcgggaggctgaggcaggagaattgcttgaacccgggaggcagaggttgcggtgagccgaaatcgcgccaccggactccagcctgggcaaaaagagcgaaactccgtctcaaaaaaaaaaaaaaaaaaatgaaggctcactgctccctccccaggaggtgccgcaaccttggccaatacagccccagagttagacaagcagacagagaaagtgtgcagggctggggttctggcccgggcagacgggaacgcggacacatctagcactccgagtccgtcaaggcagcgcgagcgctgcgccgctggaacaagtcaccgcgaaccctaatcccacccctccttaccctattaacgacagaaagcctcgttccgctggtccctgaacaaaaactcctaccctactagtacacagcccacaacaatgcacgctgccggcgctacagcccctaagcaaccggccggaagtcggccccacctcctcctgatgtcacggaaatgaagggcttcgcagaggatgtcccgcccgctcccttcagacgggcgtagctggcaccttcctgagatatgcctgcttgcccccgatttttttctccttgcagtgagaacctcctcatgtggcatctttacttattctcttcttggaaaatccatgtgacctccccgcgcttaaagtgtttccacgttacaggcgacttaaaggcagccctggagcctgacgtataattcgagcgccgatgcagaaaggagtcaggtgtttttttttttttttttttggtttccggttctgtcacctccaggctgagccgggctggcggaagaggcacgtgcgctgctgaatggagctggtcgctggttgctacgagcaggtcctctttgggttcgctgtacacccggagcccgaggcttgcggcgaccacgaggtgagataccgcgtagttagagacagtcggaggcggggccgggaaggtcgggtttggttcctacacagcagaggtgaacattggagcgcctgctgttcactggatgatttgatgaatcaaacctaagagacttaagagaaaagctaaccttttaaaccgtagaatggacattttatcaaaatgaggcaatatctgccttttctagtagacaaaaggtccacgggacacaaaggaaaccggcatttctgcatacggacaaatgagtcgtagattgtggatttaaggatcgatcccataagttgacagtattcagaatttaatgaaagaagatctcgctcttttgctgaatttctgccctggaattttacaaattactagaactagattaggataaatcccttataggtaaagcgataccaattcattatttgttgggaacttatggcgagctgggcggtggagatgcaaagatgctggaggtatggatcttgccttagagacgttgcctacataaggggtggaggactgaggagacgcatagatggagagaaattacagcagaatatgatattactagatgtgtgaatagataaaaaggtcaaataaattatcagtagtcaaataggtagataggactatactcacgactaggaatccgacctcctaacatctagctcacttttattcttgaagcaattctaagcattttctagaaaattgagtacagtacttctttatgaagtcaaggcgtcggtctttaattatccagaaaatttggaagtatatcacttggcctattgctttcgtttattttgtttcctactccagttatttgctctttgtctttggctgaaaagtgatgtgttttgaatagtcaaagatgatgctatttaattttttttttttgtagtgaaattacttaactgtgttccagacacacagtagtcctcacagcaaccctctgaggaggatgcagttattctcgttttgcagatgaagtaccaaaatgttggtcctagataggttaagtgactgctgaaggacacacagataataattgacacagctgaccccaaaatgtcaggagcccccgagggtctctgacatttgaaactcttaaccattaccctatacttctactaaatctaagcaatagcctagataacctacattatgtgaattttaaaaggttattatttgatttaaggccatagcagacccgcaaaaatgcttgattcaaaggaggcccccttggtcttaaatgatggaaggagtatcttctgtaactaaggacctgatttgcagtaacacatgttcaaagaagtttgatgggtttttttctttttcggtttgttttgcaaatactttttgatgcagttccttcagtttaaggagtgagtgagtgtgtgtgtgtgtctgtgtattttgctgtcatgcttcgcactcatccaatcagacttcctaatgctattgtcacatggcaataagcacagagttcctgagatttcgttattggtgattctctagagcttacgttggtactcatggaaacatacctttactctgttggtttttctttataagacttgtccactgggcgcggtggctcatgcctgcaatcccagcactttgggagggcgaggcaggtggatcacctgaggtcaggggttcaagaccagcctggccaatgtggtgaaaccctgtctctaccaaaattagctgggcatga

SEQ ID NO: 1882206 - DNA, 4001 bp, Homo sapiens
tacaaaattagctaggcgtggtggcgcatgcctgtaatcccagctgctcgggaggctggggcaggagaatcacttgaaccggggaggcagaggttgcagtgagccgagatcgcgccattgcactccagcctgggtgacaagagcgaaattctgtttcaaaaaaaagaaaattaacacacagtagctattatcaaatgctgtaaccgtaagtgatttaatacataggaaatgaaaattgcctatcattgttctttaatctggtttaagtggttgagccttatgacactgccatttctatgggtcaaaaatggtggaatattgtcataaaattcaacctgatttaaaggatagggcaaggaaaaaaagcaaaaaaaaaaaaaaaagctttagaataaaatataattggattataatcccagacacaggactcactagctatattcttgggcaagttacttaacttcatctttcttgggtttccccttatttgtaaaatggggataacagtctaacctaagcccaagttgtactgatgattaaacgagatatgcatgtagggcattcagcatagtgcctaggagcttaataaataagcaggccattaagaaggggattgcatcttttacactagcagcatcaaaaccttgattttgatttttctaggtactgaaacagccttcattacttagagaccatagcttttttgcaagttactattccctgcatttagaaagttcatctttaaacaggcaattcagtaagtaaatattctatggctctaaaacagatacggctgttggagactttaaaacatctgacagttacatttttaatgttgtctaccaaggctattacatttcctctgtcaaagtaacttaattttaaaaacgaactctgtgcttgttaaacgaaaaggccagaaggctactggctactcagcgttcatttgaaattcttatagtgccttcagtacaattcaaacttagaggtgattctcacaattcatgtgaagcaacattttacaaaaaaaatcacctacgttcactgttaagtcagaagacagaatgattaacaaaatctcagccgcgaattactctcacgatggccaactggatattaaataactctgcattattttaatggaatgttataaaggatttgcaacaaaatgcagacgtagatttagggactgccgacttctatagatcaaggacttcattggtgcagctgaggaaattcttccaaacaagtctaaatgttggaaatccaccaaactgcagagaaagacctcttgcctccgtattctttcttcatctgtaaaaatgttgacttctgcttttcagactacgcgcacagcctctttatttcctactgcggcttcattccctcacggaacactgacgccatcgcgaaggaagcatttcgagcacgactgacgctccccttattatttgctaagccgctgcgctcgggtctggctacgatttgctttcagaataacgggaaggtgcaacaagatcgcttccctagaggcgcgtcgcccgcgtggcccggaccccccacgcccgcccgccgccccgtgggtgcgcacgcgtgtccgcgcaggcttcccgcctggcgagtgcaaggctcctctccgccgtgctgctttccagcctctcagcaaatcacgaacaccgaaagaagccacggcggcgacgggaggggcgtcgcgcgtgcttccctcggcgacaaagcgggagccgggcgcgccggccgagggcgcccggcgcagagtcccgcagaggcggacgccgcggcacgcgcctcgaaaagcctcaaactcttatcctcggctctcccgccccacctccgccccgcagccaagacccgcgccgtggcgggcccgacggccaaggaaagcccaccagccctccgcaccgtgggcgacgggccaagacccggccctaaacggccagacccagcccctagtcggctgccgcccccgccccacgcaggcgcgctccggggccctcccctcccccaccgcgcgctcgcggggcccgacgggggcggagcgaccctcggaaggggcgtggcgaccgggctcgacgcgcgcacgcgctctggagccccacggctacgtgtcgggccacgtgatgcccaccccgaaagtcccccgtgaagcaacaggacgttaaaaaaaaatttctcttctgcggggtggataagaggttctgaaaaaactatagtaacgggaggcgaggcggaggcagcgctggcgcgtcccgctggaattcctctcgcctgccgcgccagccccgaccgcgcccgcagccccacccgccccgtgccgtggaaagccccgcgccccccccgcggccgtcggccccgcagcccacacccacccgccccgggcgccccgcacggcggcgacccagtccttgcgcccaggcccgccgagcgccgcagtccgtcacactcccgttgcccccgtcgcccgccccgccggggaggcagggaggagggggcgcggcgccggcggctgccccggtcgcggggcggcgggcagcaggcagcgggagcgcgccggccgggacccgctaacggccgccctgcgcggccccgcccgccgcccgcccccggccctccccgcgccgctgcccctccccccgccgccgccgctgctgccgccgccgctggcagcgccgcctgaactgaggcgaactccgccgccaagtgagtgaggaggaggaggaggagaaggaggaggaggaagaggaggagcgcagtcggagcgcggcggcagcggcagaggcgccgcggcggggaccagcccagagagaccccccgagcccgcggcacaggcggcggcggcgctgagcgggctcgaccagccgagcgagcggcggccccggctcctcctcgtccggcgccagcagcccgcgccccgcgcccgcactcggccagccgagacccgcctcccgcccgcccgccggcctcgtgagggacgcgccgagccgggcggccgagagcggcggcggctgggagcgcgtcgggcccgggcggaaagtgcctgcggggggcgggcgagcgcgcggtgccggccgccccggggctcggcgcgggagccagagcgggagccggcgcggagcgggacgccgggtcccgagcggcccgcggccggggctcgcccccgcccctccctcctctccggcggcggcggcggcggcggcgggcggagtgagctgcggagcctggaatatggtcggggaaatggaaacgaaggagaagccgaagcccaccccagattacctgatgcagctgatgaacgacaagaagctcatgagcagcctgcccaacttctgcgggatcttcaaccacctcgagcggctgctggacgaaggtgagcgtctccagggccccggccccggcccgacccccgccggggcggcccctttccccgcttgggatggtggggagggcgggaaggtcacggccgggcgggaccgagcgccggggggactgggaggccaggagggcgcacaaaggaggtgccgggccgggcttgcggcgggcgggcgggccggggtggacccgccggtgccggacgccccctgcccggccgggaccccgcgccgctggcgtccaagttggcgcgttgcggagggctgcggggtgagccctgcggcccctctagcttcggcggtcacatttccgagaggtcggcgggggctgcgcggactcggtggtcctcgccgagccctcccgagagcaggcccacgccgcgccgccggcctggaggacgcgtgtgcccggcgcgggccccgctcctccgctcggcctcccgagcctgctctgcgcggacccccaccgccccgcgttcgggagctctcccctcccgtgaggactaaagcggggtttcgtggttggggagttggtgcagctgttcaatactaagtggaagtcagtgtggggctcgttagtttaaagaaattccgtaggagaccgaaattatgctg

SEQ ID NO: 1882207 - DNA, 4001 bp, Homo sapiens
aagttaaaagacaatgtttgggcgtttcctcaagttattgacagtgcatgcgctttgatgtttcatttgtcttgtcaaaagtaagtccaaggaagtgaggaaagcctctagcacttgggaatatatgagagaagaaagtggagaaggtaataaactatcctggcatcagaaatgatctcacaaaacatacctgaagataataacctttaggttattctgcatgtagaattcaaaaagcctattctgcatattcctaatatttagatatcacctcagataaggcatacatttgcccactttcaataaacccccaacttcagtctccaaaatgcttttcctttttttttttttttttttgagacaaagtctggctctgtcacccaggctgtagtgtaatggcacgatctcagctcactgcaacctcagcctcctgtgttcaagcgattctcctgcctcagcctcccaagtagctgggactacaggcacgcaccgctacgcccagctaatttttgtattgttagtagagacggggtttcgccatgttggccaggctggtctcgaactcctgacctcaagcgatccacatgtctcggcctcccaaagtgctgggattacagtgagccaccgcgcccggcccccaaaatgctttttctacaaaccaaatgacagtatgggataaacaactcctgtataaagtggaaaagcgctgggagaaattgtacctaaagtggcaacgtttactgggtgttgagtgttcccctcattcgcgcatgacccaacctagaaacattcctaagttaagctacttaggaaacaaagttagggcgtcttccttagcctataaaaacggagtggactgcgctgcctcttcaccccgcagcagcagaaacagccatccctcttttggacgggcgtggcagatagaaacaaaaggttaaaacacaaaaggcggggcggaaggctgggtcagaggagcttctggggctcacgttctgctttctattcaaacacactgaagtggggttgggggcggggggtgatggaaagtgagagaggtgaggacggataccaaggattgcctgggttattccgggtggatcgtgaaactgaaaggggcggacgggatggctctaactagtggtccaggccccatcccctccatccctgcatctctgacagtctgtaacctgtggcttcctccaccccatctcagccccgaagaaaactttctgaactcttagctgtttgttgtaaacctctccttgaccgctaacacaagggaccaatcccctccaacccaaacctttcttccttccattgttgcagcgtttttatattgtgcgtggtatctacagagcgctctgcagacagctaagttatacaaacgacccccatatccatatcgctttcttttgcatgaccagggtcagggctagggtgggggcgaggctggacttgaccctctcaatttctgcatattcatccctacatgagtgcagctggaagaacgcgaagcaataccccctcaccccacccttttgaaaccctcctccccatccccccagcccctcatataaagaagcacataagataaatgcctacttggcttttgcctattaaaaataaacaaatgaaacaattgcgcgagttctttaaagaacaaaagagaagggaacggggaaaggaggtacaatttaccagccaaactttgccactgggctactcctctgccctccgaagggcggggagcggggcgagttgaggggagagaggtaaacaagacaacagtccccactcaccttcttccccacttcgtcgcacttttaagggacatttcccccgctgcagtccacgaggcgttcggacactttttcccggcctgacagcagagaaagtcggggcggcaaagttgcgagagggagataccccggcgtccgggggagaggggaggaaagagagttcatcagagttcccccttttgttccaagtcccggagcagacaaagaggcggcgagcggcggcaggtttctccctctcaccccttcttcctctctccctcccctccctccccgccccctccctctccccgcatctcccgcccggctcgggaacctccgaggcgagctggggctgctcggtccccagttcatcacaactctgcccagacggtctcctcccactgccaggctcgaaactttccccgggagatgccagccctggccccctccgcaccgcgcacaagtctggggtggtgggcaggggatctccaaaatcattgtttcccggagatgcacctctttgtttgcactttccctgccaatcaatgtgaaacattcacttgggcgtcgagtttctgtccatttttcgtcatcccaagagacaaaatgcaaagggtagggggtcaaccctagataaaggcgcttacacaatcagaggtggggcgcaggctaggctcttcatcctccttcctcctctcggattcaccctcctccctcctctcggattcaccctcctccacccaatacacagaacaactcaaaggggctccaagtgttaggaaactcctctcccgcccttccccacctacccccacccacgctgtccctctggagagccctctaattggcaggacaaaggccagctccgggttcggccggggcctccgcccatccctcggggctacctgttgctgcaggcgcagcgcaactcggtccaggggctccgaggaagaattcccagctccagcatcgcgcccaccttctcaggccccgaacttcccctaatctcaaactgcgaaggcaaggctctcaggatgaccaggcgccctctgaccctacagccaggcgctgctcactcgtcctcttccctacaccacgtcctcgtgctcaccccaaagatctgactcggggtcccaggccgcctcctcatcctccaccccctgccgcgacacgtcccagccgagcatcccctctttccttcccctcccccactgccttgtccgggacaaatcaggtgtctcggaccaggaacagctcccgacccttccccaggtcccttccagtcattctcaacctccagaattgggaccccatccacatggtcccccacccctcgaccctgatcccaacttcgggccatagcattagctcgctgagtgactcagagcagcactcgttttccttctagatccactagaattgaagaaaaagaaagcagggaggtgggggaaatgggagagagtaggggcccgcatggggaagcaatttctagggcaaaagaaaaaaacatttcaatgcgaacacccaccctccagttggtatccagcccgtcgcgcacctttgcctccaccctctttcctttctccccatcccagacttggaatcctttcgggttggtgaagtttgggggtagaaggatgaggtagacggaaccttggggacctgggggctatgtcctgggttggcttgcggggggaggggcattaagaggagggctcccgctgggtccggaatgtggtggcggtaggtccctgcacccgcccggcgactccttgccaaggtctctcctccagagcagaacaaagacgccgcgaggagagcttctgtcctcgcctcccccgccccgcgcttcactcgcaccagcccacgccgctctcggaaactttacaaccaacttcccctagagttcgtgcgcgcggcgagtgggccagaaggagaaaccgggacaatcgcatcccgggaccagagatgccctcttccgcgtcccctcctggacagggagcaccacctcttgcaccgcccgtcccagtctgcgagctgggcgacccgcggtgccagggcgagcggagcacgcgcttttcccagccccttaagcgaatgatgtttctttagtctggacgcgtacagtactgggcagtggggtcggagataaagaagcggccgccggccacgcgcagggccgcggctctggccgcaaagtgaggccgagagcgcaggaagagc

SEQ ID NO: 1882208 - DNA, 4001 bp, Homo sapiens
ttccttccttccttccttccttccttccctccctccctcccttccttccctccctccctccctccttccctccctctcttccttcctttcttgctttcttccttccatccatcattcctttgctttctaacttcttcccttcgccctccttgctttctacttatgactttatgaatgcaaaagtatttgtagaagaactaaacatttattacaggataaataatatgcagctaactaaaatgaacccaaacatataatgacacatttaaaataatatgcaggcctaatggcaagttatatttaatagaaccaaccattatataacatgtaaatattatctatataagatccatcaatatcttgggatgagtatttcagcctattttaatatatatttttctttgtaaaaaagaaaaaaataagtgtttgaaattaaaaagccgtctattagtgtaactgaggacataaatgttgatctacaatgaagaaagccttttatcaatagttaaaaaaatatattcagtcttggaaaattgcagagattcatttgggagtggaaaggtcagaagcctatttctgtacaccttgcctaacatggtccctaacaatatttttatgtaggcaaattaagaatcaaactgtatgtgaatatttcaggttacatagattaggtaccactaaattatataaatcataattctacttaacatgaaaaaaatgtttctctatcatttttcctctgctcattctgccacacccatctcgctaattaagttccttaaccttgaagataatgatattgcagatttttttaggaagaaataaatttgaggataaatttacatcatattaaatgaaaactgtacttctgagaataaccttgaaaaggaccataatatttgctactgcagatgaataaggttatttgaagaaagagatgagtgtagtggcaggaaataaagtaaaaatatgatatttgtcactgtccttggatttttgtctaagcccctaattacagatataaaacctgataaagatcatgttttaatgttttaaggttttcctgtgagaaacaatatacaactttattcttacatactagaatatatctataattttgtagaatactgcccttatctgaagattaaataagcttttttgaaaacaaaacaaagcaaaccttataacttatagaaaagtgtgctttatttctcacatagataaatattccaactcaaatatagcagtctgcattaaggagaaattttaaaatctacacaaattgtaggactctgggttattattatattaaatcaacaaaaatcatgctgtatttggctattcttattactagatgttcattactagacatgcatgttttaacttaaaatgacttgatgttgaggtataatgagtgaatgaaatgtcacaaatacaaaataagtatttcagtataaaaagttatacatttgaaatgcatctgttccctttaacatctatcattgtttctccaatgtttaataaaataataatctttaggtctctgtctcacatttacacaggactttacaatgatctttatcttctcagtagtaacagatcaactatcagcccctaatatttacacccctctggagacccaccagcaatgacagaaggcagactaatgctatgcagccaggagcacaacataagcaaacaaaataattagatctgtgaaatataaagttgatcctaggaaacgattttaaaaatgccccttctagcttggagaaagggcaactgtgtcactgcctgttatcttcccagcctgcccacatttccatcttccacctttcaccaaaatccacattctggtgtttttggagatcctgagacttaccaaggcttgatgatttctgcaattaaggatttcttcaaatcagttgcagtcttatctgattacgtgtcttggaggattatgaaggcttaataatttggactggattaaccgagaacactcagcagacaccacggaactttttcatgcctcttcagatggcagcttaccagaagtatgatgagtgatttcatggcagctaatcaataaaaattctcccccaaaacgttgagcacttgttttcaaaatggctttgaagacagttttaaaaatcatagagtacatggacaattctttagaaacaaaaaaaccagaagtgtaaatatcctatgtctaaatagtgacaatttataaatcagagtattttatctttctactttgacaaatatatcttcataatgacaatatcagaaaaatttgatttagctgtagtatttacataacattgtcagcaaattttcttgtcttatctcagcaaaataataatcttgatataataaaggctttagtaaattagtgttctattggtactaatggtctaagaaattaacaagaaaatataattttattccaaatgcataaattttgaatatatttatcaataatgtaaattaaagtaaatgtaataaatcaaaaactattttcaataagttttctcttaaatattcagaatttatctatgcaaaatataaattataattattgaataccaaatttttggtggctcatgcctgtaatcccaacacttggggaggtcgaggcgggcagatcacgaggtcaggagtttgagaccagcctggccaacatggtgaaaccctttctctactaaaaatacaaaaaaacgtggtggtggcgggtgcttgtaatcccagctcctagagaggctgaggcaggagaatggcttgaacccaggaggcagaggttgcagtgagccaagattgcgccactgcactccagcttgggcgacagagcgagactctgtctcaaaaaaaaaaaaaagaaaagaaaaactttaatttttattaaattaattaaattgatataatatgttcataaaacataaaactattcacagttgtagcacattccattagttgacattgtaagaaagtggtctcacaatgcatgcttgttaaatcgacaccaacatacatacaaattcaagactcataagaattttttaacattgcaaaatgtttctcagctgccatgtgcatgatgtgctaattgtttagtgttctggaaccatgaattggaatgtgaacagaagcaagaaaatggacactcagcaccactgggaaacaataccttgtcatgataaaatctcttgcattcctgctatctgagagaaggatttgacaagttaatttgaatttccttaggtaagcacatctgcggctccaattctccctgccatttgaaatactgtccatctctaaattgggcagcaatagaagccacgagccttcacgacattccgacatcgtcaccttttgtttgaaagaaggcaaaagaagtacgacagtgtatccttggattctgaaagcccttagtcatgagtcacaggttatgctgttgccagtgccgactgtttgatcctgagtagtaggggcatctgtagtctttaatacatttatttcctatagatatgtgacacttgagaccctataaaacaggatttgacaagggcttcccttgccactgtctatagtggtcctgcttcagtacaaatctccgtgataatttaaatggcttcctaaggcacgtacagaagaacagtgtcatgtatatgaatatggatctatatgaagctatatgtatatacatgaacacgtatatctgtacgtatgaaatgtatttatacctactatgaaatgggtttttcattgttttaggagtaagagaaaatactacttggagaatcagaaagtgttgaacatctttcctaggaattaagagtaagaataaggaaggggaaagggaataagagaagaatatgcttctggttgagtttttgttttagcacaaagatacaataatagagaatttgagtcatgagtttagagacaatataatccatgacactagagttatatccatttaccttcttgagatttgtaca

SEQ ID NO: 1882209 - DNA, 4001 bp, Homo sapiens
cctcatgtgtttatcttataatataacctgtgctgatgagcactgggcgtataaaactacagcctcaatcattcttaccacaaagacttttaggtcattgatagctaaccaagggctgtttacaagcttcttaatagggagtgattggctctgaccttgccatgtgagtttatgaaggccaggaaggaaacgggaacgaaagaaaactaatatttaatgggggcttatatatcctagaatttttacataaatttcaatccacagaacatttttatgagacagatactatcaccccattttatagatggacaagcagagacccagagagtaaagtacccagctttcagtaaccaagtggcagaggcagagtaagaaccaggcctccagactcccaacttggtgcactttggggtatagcccgtgaatgtggaatcaaacagatagctgtgcagtgtggagacagtctataagacagtttggacttttcctttgcccttctgattgctgtcatttatgagagtatattgtagttctgtctttccaagtattaagagcttcatagaacttccagtgaatattgaaggtgatttgaatcacctttaatcactcaccaatgccctcagttcctccccagtcacctctcaaagggttgggacttcgaggaaattcaaaacatgctggacaattgccaagcttagcaaaactgacaaggtaggccacgatatcatgcagaggagctatcagttgtagagttcgctttaaggctttaaaagctgcctgtggataaaattaatacaaggaaatacgttttaggaagtttctaagaggcatataaaaatatatgaacactgaatggggatgatatctttaaacaagaatatttccataaacattgtcacagtatatacaggataatatcagaaaaagaacaataaacctattgatgaaccaaggttacatgcccttggacaagggaacccctgtggggggttaaagcaatgtgtttctttgtttaaagtcactgaaggccatgaacacatcaaaatgtttgtatggccgtcaatgaattacaagggtcacaaatcaattcatagaagggactcatattcagacaacaatcttgagagaatacctgtaagcaaggtatagatatttatcaacattgtttaaaccaacacatgactgaaaatcaaaccatggatcttatgtatcaatgtccaagtggaggaaaagtgaaaaattatgatctaactgcagaaggtagtatttccatattttaaaaataaaagtctgaaacttcttcaatgaaagtaggggtaagaaaccaaggttgctaaacaagatttcacttacaaagaaaaatcagaatattcccaaatgccattttcaacattgtattttatttctttagcaaatacttatgttttatgtgtttctgtgttttcttttttaaaaaaattgttaccaacattgcccttaatcagtaagtgagttacacagagcacccctcagaaaacagtaaccctaagttacaagtgtgatctcaacctctcattaacttcagagcaccagtggggttttttggaagggttggaaagaaattgaagattaataagaaatgtcagaggcttgaactaatgttcattagtgaccagggagaaagagaaatcaaagcatagtgaggcccaagacaaattataataaagcagaaaaggctgctgtgaaaagatttcagtagttagatgtctgaataaaagaagggatgttctctggaattgatacgtttaactgtgagacaaaaaccagccagtttccattctggcacacatgcaaaaaaatacaaaccttttctggcagagttttgaacataaccagcacttcagaagaatggggtatgaaccatcaattgaggaagacttttccatccgctgacagcaaacatcgtggccggggctgaaatcttctgcaagtgttagaaaaaaggacccatagcacgcattgccctctaaacaagaggcatcatgaatgaccctgttgaatcaccaccctccgtcacacaggcctgtcaccataggcccagcatccacgccccagggcagcagcccttttcatgccactcccaggtggccagtttataaataactcaacaggaagaagagcagttaggctgattttagccagagctgtgtgggggaaggagtggggatggagggagggaaaaggcatggtaagaaaggacaggaaggccatgaattagatggccagcaccacactaggtggtacatatattatgtcacttaattcacctggcaacctcaggatggatctatttttgttcctctttcacaactgaggaaattgatgccctgagaggttatggagatctacccagctccgaaaagacaaagttagaattcaaatgaatatctctttgggaggctgaggtgggtggatcacgaggtcaggagatcgagaccatcctagctaacacggtgaaactccatctctactaaaaatacaaaaaattaaccggactcggtggcaggcgcatgtagtcccagcgactcaggaggctgaggcaggagaatggcgtgaacctggaaggcagagcttgcagtgagcggagatcgcaccactgcactccagcctgggtgacagagcaggactctgtatcaaaacaaaacaaaacaaacaaacaaaaaagaattcaaatgcacatctatctgtcccactgtagaatctgggctccagaaccaggctctgcttcctcttgccttgacatcacatttgttgccaggttctccagcttctggtcttcttttccttctttcttctcctctaaataccatattatttcttaataaggttagtcatctcttcgtttagtcatctctttgttgcaggtttatatacaaatatattgtccatatatgtctggtttaaggattcaaacaagcccaggtaggtacacaccacctggcctgagaaaaggaatgttgccagcacccttgaagcctgatgtgcacttccctggtggcccccagatgaaccaccatcctgatgattaattttaaataattaaatttgattaaattatttatttaatttatttatttatatttaattaatttatttaatttaaataattaaaattgattaattttacatttatcaatgccttgttttttttggtggaaaatccttggtgcatccgtgctgctgcaaatgactgatttgtgggttattaggttgattctatatcttggttgttgtgaatagtgctacaataaacataagtctcaggattttaatcagttaattctaaactcaggaataaagtatggtcttagtttggagaattgcctttcttttagcaaccacaaagtcaaacaattcctgtcctgaaacagatcaaaaccagcgtaatccagtctcatctctattattcagttcaccatgctcattcctgcccagaggtaacaatgaatatcaaaactaaaaagttgcagggtctgcatccaggcacatgggactgcaatccacatgctggcaggtgctgctagcagcaaggactgaaccagtccttccttggcctctgagaagcacatgtgtccctggagccactgggctgtctaccaagtgctatcctttacttcttatctgttatttcctgccatttccagtcctgcctgcagtgagcagccgtcggctgagaagagcagagatgactgcagaaagctttaggtgctcagtacatgaagcatagcctggttctcagccccacaagcagacttgcccctgccccttgtggatggcctgccaattatctggcctggcagttccccaacctgctcaacactgtcccctttcattccccttcagctgaccacttctgggccacacccaagactttattatcctctgaaaccatatcacctccaaagtcttaactttcccagctccatattttattcctccagttttctgagtcatccactctc

SEQ ID NO: 1882210 - DNA, 4001 bp, Homo sapiens; identical to SEQ ID NO: 584938

SEQ ID NO: 1882211 - DNA, 4001 bp, Homo sapiens; identical to SEQ ID NO: 584935

SEQ ID NO: 1882212 - DNA, 4001 bp, Homo sapiens
gtgtgtgtgtgtgtacacaacacaaacagaaaacattcttttgattatacctaaaacatctgcaataatagatcacatattaggccataaaggaagtttcagtaagttccaaggaatcaatcccattctgacaatgttttccaactacaatgccatcacagaattaatattttttaaaagatggctaaaataaagtcctgcttattcagaaactaaatagcacactattaaataacatttggactaaaaaaaatagaactgaataaaatactacatgattgaatttgtacacatctaaagcagtacttaaaggcaaatttatagtcttaaatacattaattaacaaaaaagttaaaaacaaatgaggtttcctaataagatattatctcacacccactaggatggcaactataaaaaaatcagaaaataacaagtgttttgaggatcagcttaacttttaaattaggtactatccgcatatgataaaatgcacacattttagaagtctgattttttaaggtcttgaatgcccaggtaagggatttggatggctggaggtcatacaatacagtaaacagtttaacagacagccgggggctgtggctcacgcctgtaatcccagcactttgggaggccgaggagggcagatcacgaggtcaagagatcaagaccatcctggccaacgtggtgaaacccagtctctattaaaaatacaaaaaattagtgtggtgtcacatgcctgtagtcccagctactcaggaggctgaggcaggagaatcgcttgaacccaggagacagagtttgcagtgggccaagactgtacgccactgcactccagcctggtgacagagcgagactctgtctcaaataaaaaacaaaaaacagacttggcattgaattacagtttagtcatttgctcactatgtaatcttggacaaatgacttgagcctcagggccttatttcctcatctccaatggtgacaggaatacacccctggggaatgtagaaaaggatcaaataaagtattgtgtgcaatgtatacctcttcttggatatttgacttcatggaatgcatcttttccttaaaaaaacctgattgaggcccttattgtagaaaacacctggtagttggtgcctctgttttatcttccaactctggtctccatcctgaacactgtaaccaagttaggctctgttcagcattgctttcaccattctgttccttccacaaaagcttttggcgagtccccactggcctgaggtgaaaatctgaatgctttacattagagttcaaggccttctgaagtctgtcctcaatctgctttgccactctctgctcctctatatttgtagttttattttatttattttacgacagtgtctcactgtcacccaggctggagtgcagtggtgccatctcgactcactgcaggctctgcctccaggattcaagcgattcttattcctcagcctccagagtaactggaattacaggcgcgcaccaccacacctggctaatttttgtaattttttttagtagagacggggttttaccatgttggccatgctggtctcgaactcctgacctcagcccgccttggcctcccaaagtgctgggattacaggcctgagccaccatacccggcctaattgtagttttaaaactcttaaattctctataaaatctgatgtggcaaaaaacaaacaaacaaatgaaaagaaaaaaaaaccacccaaactcttaaagttacagaacccagagctctttgttcaaatggaatctcttgttcaaaaacattgtagctccatccatcaggcagatgagagtgaagcttttggttgaagccgggatgagggtcccagattgacttcctctcccctcccatttcctcctttccattcctacctgcttagttccccgagatgagtctcttcaggatattgtttgaaacccattgccttccgggaatgtccttaggtagaaataggtcctctctcctcaaggaacaaaggggtcactgaactccatgtgtgttaccctccactgggcctctcgcctgaccctcctctggtggtttgctcatcagtcagggaccctgcctcataaaaggccccctctgtgatgtaatgttaacatgctcagctacgcctctggcatgagtacaacagcaattttaatcatatgcctttttgtagcagcctttaagcagccaagggtatcgcaacaaatcacagccccgtgaaaacagttttaacaggggactgtctgatgtggtacaagcattcccttggtctgatttcacctagaaaatgttgtgtcaagagcagtggttttcaaacctgcagatggggccttggaacttgtgtttgcagataatcccctgagttcagaatcagtagtatgggcactagaaaacagctaaggagaatggaaatttctagttgagtgcaggggtgcagggaggatggtacactcagagacgagaatatgtgctgtacttcgtgtggatattttctcacatgaaggaacagaagagtggaaagtgcagaagaagtaggttttcagggggttgtcttgctttcggttttgagcagatggagtttaaaacagccatgggccaatgaagtgcagatttccagcaggtagttggaaatttgagtctgggactcaagagtgaagtgaggggtgagctgataaaacagaatcatctgtatgaaggagagagttgaaggtgtaaaatgagtgagttttttaaggaagagaggagagccttgtgaaatgcctatgtttagtttccagaggaagagagtagagtgagtaaaggaggtgggagatgtggccagaaaggaacaacagaagttcacctgccaactcacagggagggaagagcttctaggaggaggaggtgggtgggtggccaatggggtgtgatatggttaggctttgtgtccctatccaaatctcattttgtcttttttcttttttttgagatggagtctcatgctgttgcctaagctggagtgcactggtgcgatctctgctcactgcaacctccgcctcccaggttcaagagattctcctgcctcagcctccaaagtagctaggattacaggcacctgccaccacacccagctaatttttgtattttctctacagatggggttttgccatgttggccaggctggtcttgaactcctgacctcaggtgatccacccacctcggcctcccaaagtgctgggattgcaggcgtgagccactgtgcccggccaaatctcattttgaattgtaatcctcagatgtcaagggagaaaagtaattgaatgatgggagtagtttcccccatgctgttcacgtgataatgagtgaattctcacgagatctgatggttttataatggtagtttttctcgtgctgtcacacagtctctcttgcctgccaccatgtaagatgagtctgctcccccttctgccatgactgtaagtttccttcccaaggaagttggcttcccaagacatgtggaatttaagcctcttttctttataaattatccagtcttgggcaattctttatagcagtgtgaaaacggactaatacagggtgaatgttattaactacagttcctggggaggataaaaggtgagaagcagtcaggactttggaattcaggtcaccttgcagtatgtatgatgtggatgggtggttttcatgggcctgagagctgagtgggaagtgagaagtctcctttacctttctgggacttcatggagatcatttcaatctgataagtctcctgaccaccttcttactcttgctttgtacagaaaatattatttttaagaagtctggctggtgtggtggcttacacctgtaatcccagcactttgggaggctgaagcgggtggatcacttgaggttaggagtctgagaccagcctggccaacatggcaaaaccccatctctgctaaaaatacaaaaattagctgggtgtggtggcgca

SEQ ID NO: 1882213 - DNA, 4001 bp, Homo sapiens; identical to SEQ ID NO: 584958

SEQ ID NO: 1882214 - DNA, 4001 bp, Homo sapiens
aggaacccctccagccaaatctaaatgcagtgctgctttctcccatctcaaagatgctctttcgcaggaccacgagcactcttcccatgtgggttcctgatccagttccctatcatcacccactggtcctcccctttctaagggagcagggtttgtgcttcctccatcagactgagctctctctggttgtgtagaatctgagtaatgggtggattccacatgagaaaagcagacagaaaaggatatccaagaacactttcagggagctgcacatagcaggcaaaagtctcccaggaccttctctgcagcattttataacacagatcactcttttaaaacaacaacaacaacaataaagcttgctttcccatctttatgccctccccactacccccgatttcctccatcctccctggctagtccttctttctcttcctccttgactcctctccctctgtcatcccatctatgtgattgatccttgggcatcgtcttaatcatctaaagatgtataacccctcaaactgcatttttataccagaactctctgctaaggtacaattgtctacccgagataactgctcagaacaacggctgactttttttttttttttttttttttttgagatggagtttcactcttgttgcccatgctggagtgcaatgacgtgatctcggctcactgcaacctccgcctcccgggttcaagtgattctcctgcctcggcctcctgagtagctgggattacaggtgcttgtcaccataccctgctaatttttgtatttttagtagagatggggttttgtcatgttggtcaggctggtctcgaactcccaacctccggtcatctgcctgccttggcctcccaaagtgctgggattacaggggtcagacaccatgcctggccccagcagctgactttgaacgtggtagtgggcattattccaagcacacttatgaggtatacacagttattacccccatttcacagatgaggaaactgaggcattacagagttgaagtaacctgtgccatgttacaaggacaagaggcaaagctggtgtctgaactctgaactctaaagtagttggctttagagtctgcaagttgagccatacacagtcacctgcctctctgcataggaaacacagcatgtttagaaacaccgtccttatccttctccccaaaaccaggcgtgtgggtgagagatcttagagcacaagaaaacgaagcaacttccccaagtagcacctgacttaatgtgggatcttgccaccgagtcatgagaaaatccagtctacatttaagtgaagtgaagagcaggttggaaagagtgagaggagggggcatggaggcagtatctggttactgcagaccaaggggacctggatctagaaattacagaggaggggtgagtacagtgataggcctaaacacggagcacagaatcgtccctcagggaacaaaaaaaaatgcaaggctgctgaggtatgagagttgggccaggccactgacgctccttgatgacactttggagaggaggaccatgcaccaacaaagtttaaaaagtagaaaatagactgaatgggtgggagatttggaagagctaactgagggggaagcaagagctgaagcagcagtttctgatgtcattattcatcttagtcccatttttgtgctaatagcaataatcagaataatcaaatttaacagttacgaggccagacactgcgctaagggttttacatgcgctgagttataaaatagatgaacctgcattacaaaccttggtgatattattaattaccttattgccagataaagaaactgaatgtaaagtccattttacagatgcagagccagaggctcagaaagaataagcctcttgggtaaagttgtgcagctagaagtgctgggattcaaacccaggccgggaattgcacatgtacttgttttacagctccctgtagattgttagttcatggagggcaatgactttgtctcgttgccttggcaactccagaacctagcacagtacctggcacataagcagtgccctttaaatattagctcggacttgtagtcactttatataacttgtggttttttgaatgaatcagtgaatgactgaatgtacaaactaatggatgattctctccattactccagtactgctgggatggctcccacggatggggtctcggttgtggtagctggggacttacaaggctttggggaacaacagggaaattttacttggtggttcctgtagccaccacaggagtggagtggagaggtgacccaccatggagaaccatgtaacagtgttggcttttctcatgctttcattttgagagggcagaaaaggatcatgacctgggccagtgtgtgtatgggggctggggcattagtgaccaggtagaggggagggagggctctgctcaagagaaagtaaatgaaaatacaagagaaaccctctaaagaaagaaagttggagaactaggtgcagagctgaagatccagagggaaaaaaatggcaaagtaatgtagggcggcatgtggaaggaggcctgggcctgaatgctgatgctcttggggagaggccacagccatggagctcacacagagcagaaaggggatggaccatctcccgggtcaggggctgtggggctctgggaccgtaacacaggagccatgctgctctctacaggagggcaagccttacaggagccttcacctctggcttgctaagcctaagaattttggacccagttgaccacaactcgggggtattgggtgggaggaaggacaagtaaagaggaagggaggggtgtgggcaagttatagttccagggaaggaatgtgtggtgtcttgttaaacagaaggtggaatagcacatctggggacaggctctttgggaaagcagcaatgttggagctttgaaatgtgcaaatgagttaggggaagcaggagtcacaagggcaagtctcattacagaagaaaacagggtgaaacagaagaaggggaaacaatgaaaattggagagtactgagtttataagaaatggatatgcggcatttggtggaaactggctttggacttgggaataggagaactgtaaatatggataatatgtaaacaccatttataattttaaaaatctggagggctcaaatgagataatctttctgagggcactttgacaagtatgaaagaagatatttgtggctaagaggaaaggatactgggtgtggagtctgaaaacgagggttcgagagccagctctgccttgggggtagacaagtcatgggtcttctcgtttggttctctgtcctcagccgggaaagcagcaatgactcttctttcccacaatggctctgaggggccatattcatttcctaggactgttacaacaaagtaccacaagctgggtggcttaacacaacagagacttttccccttacagttccaatatcaaggtattagtaggtgtccttccttgcctcttccagcttccggaaagctaagagttccctggcttgtgacagcatcaccccagtctctgactgtcttcacatggccttctctcctctacatgtctgtgtcctctcctctcctcttttttttttttttttttttttgagttggagtgtcgctctgttgcccaggcaacagtgtgatctcggctcattgcaaccttcgcctcctgggttcaagtcattctcctgcctcagcctcccaagaagctgggactacaggcatgtgccatcacatctggctaatttttgtatttttagtggagacgggggtctcagactcctgacctcaggtgatccacccaccttggcctcctacagtgctgggatgtagtcaagagccaccacacctggcccctctcctattcttataagaacaacagtcattggatttagggactacactaaatgcaagatgatctcatcgccaaatccttaactaattacagctgcaaagaccctat

SEQ ID NO: 1882215 - DNA, 4001 bp, Homo sapiens; identical to SEQ ID NO: 584977

SEQ ID NO: 1882216 - DNA, 4001 bp, Homo sapiens
atggacttcagagtaatgtggcatatatctattttccagaattgttcttttgtttgttgttgtcctccccctattttctcttcacaggacatgagacttcacaaccttctaaaaaggagctttcctaataactcaggacctacctatctaggaataaaccatcctagccatgagagatcagacgaaacctgaggccagagactcattttcttctaaaatgcgttctccaacagatttttaaaaagaaaaggggggaaatgtgaaagtattttgggcccctcaaatcactaaactaaaggaaaacttcaagtggggaactgcttagggtaaacctgcctcccattctgttcaaagttatccctctgctcaccaagataaatgcatatatcattgccttctgtggagaggctaattagaaactcaaaaaaaatgcaaccatttgtctcttatctacctatgacctggaagccccctccctgcacctttccagaccgaactaatgttcatcttacatgtgttgattgatgtcttatatctccctaaaatgtataaaaccaaactgtgctctgaccaccttgggcacatgttgtcaggacctcctgaggctgtgtcctgggtgcacgtcttcaaccttggcaaaataaactttctaaattaactgagacctgtgtcaggtcttcaggattcatagtggttagttagcatttaaaaatcaaataacatgaggggctgggccttgatactaggtacagagcaaagtaaatctgtgtgaacgttagacagcattctagatttgggtaacaggtaactcgtggacaactactcagctcttattctgaatgcaccagcactaaactacccctaaatgacctgagaaataagattgacaacacagtggaagaaaaaagcctaataccaagtgactaaagccacatagggcaaattaggctaaagcaaagcttgaaaggtggggtaaacactcacagagttactggtgttgagaattagactgacaaaacacatgcccaagagcgctatctgactctgccaggccatgttgctatttctttggcagtcattgagaaaaaaactaacaaaacaatcctgtcctggtattgctgctgcactggggagaggtgatctatacagaagggagagaaggggaagggacagtagaggaggggaggggatgggagggaagttggcaacaatatcagttctaggaaatggtcagaagagtcactgttcagggcaggaacagtcggggccctgctatttttgtttagtaatcacaactagcctcccgggaaaattctatctgctgtccagcaggctttggaaaagagccctcctatacacacatgcacacacacaggagcatgcacacacacacacacacacacacttatgggagagagaggaaggagacccataggaggcttgggtctttgaataccaaaccaggtaaatgtgtgctttacctatgcacacccaaacacacacacacacacacacacacacacacacacacacacacacacacataccccagagaggttttactatttatcaagtcaggaataaattttaaattagagttcttataagagagaggaaaattaaatagaacatacaacttttagatcagagaaatggcctaaacacgcaagagtaaaattttctaggggaagtaatttgcttattggttcatttaaaatttctagatgaacacatttcctgccaaatctaattgcaagaaaggtcaccagtgagagaaagcaaaggactcttggtaccttccggctaaatcctcgatatcttttatgaacaggcctccttggtgcttgcacatattcttgcatgccctcagtcggctcttattcttgtacaagacgtagtctttgccagtgctcttattgcgaaagaaattgattccttccttaagactggcaacttcaacaggtgataggcacaacaggatctcagttgtttgttcgatgctatgaaaaggcaaacattttgagggggaaggttaataatgttaggttttaagagacaatcatttcaaactgacagctcaaaaccccttttccctaaaatattttgtaagccccttgcgttccaagtacccaggtttagtggctacctgaggatgcatttctccccaccctgatatgaatgtaaatatacttcttacttgttaaatatgcctctccacttttctagggaactaatagccctcttacttgcctgcccatcgtctgccggttcctctgcctgggtattttgaaagaacagcagttgctcatatcgtttctgttgctcatttgctcccctaaggcattagtcagcctgaaaacaggacgtttaaggtattttcctttaacagttactgatttcctttgacagttttctccctctaccacagctcttttagaagtctaacaccatattcaattctgagaagccactgtgctgtccctcccatctctgctcttgcgcatctggacttcctctgcctggaacgcagttcctctccttcaccacgcagcatcagtcttgggtcaaatagaaacgaatcgtccccttcctggttaagtcttccaagacacaccagaggtccaggctggcattcttggtgtacatccctcttctgtagaacattataacactgtaattggcacactgccctgttgacttacatttaggcacttttgaaagcactctgtatcttccttctccccctaccacttagcccactgcctttcacaggatatgtcttcactagctctctacttaatgaatcacccctcccactgcactcaatttgattaatttacaaaaagctccagccgcaaaccaagcatttgaatcttttttttcttttaaggaaactagccgttacacttctcaaaccccaatttctaaacactctgtttacagtgcaacactgaatcataacagaatatgatttctgccaagaaaggtttcaaaatagcttttgcaaatccatggtaggaaatctgggcacatgttgtttagttttatatttgactccaaacaaaaagtagccaaaattctctttgcatgttaacttaaaactgatttggagcacaagcatatttgtggcactttcagtttcatttttagaagcgctgcaaatttcttaaaggagataaaaataattttaagaacactccagggtagaaaataacagagaaaccacttccaattttaaactgatgaaggcatagctctgtaatattatgatctactttctcaaagcagattctcattgtcacctctgtcccaaattcctagtaattgtgttcccaatggacttgaaattattccaaaaatatgttctaaatgtatttgacaggaagaagccattctaaatttcatgacttctcttttgactttgttcttacgagtacagatatctgacaccaagctaacataagcactgaggcaattcctggaataattagtctaagagtttaaaaggcaaacctctctagatttttgttgttccattgaatgaattcatatagccaaagttctctgttagatttcaacttatatcacaaccatgtagaacaggttcactcaaccacacttttgtcctcagttccacgtgaaagtcacattggagcagaaggcaaaagaaaaaaatatgtgcacctatatacatgcttttctgtgtattgtttaaatgattagcttttccccaaagtatttttaaagatatcaatgaatttgcttctatcaaaatcagaaaaataaaactgtagcaaattcttgttttgctataaaacattaaaactaaaatgaattgccttttttcgaattggttttgggggtagattcgagttacaaaatggccgcccggagcgtgttcggcgcggttcccccagcggtctctggctgaaccggcgctctcgcctccctgctgaacacagcgtgaggaccccccctccatggacatggtgtttgagtct

SEQ ID NO: 1882217 - DNA, 4001 bp, Homo sapiens
accaccttgggcacatgttgtcaggacctcctgaggctgtgtcctgggtgcacgtcttcaaccttggcaaaataaactttctaaattaactgagacctgtgtcaggtcttcaggattcatagtggttagttagcatttaaaaatcaaataacatgaggggctgggccttgatactaggtacagagcaaagtaaatctgtgtgaacgttagacagcattctagatttgggtaacaggtaactcgtggacaactactcagctcttattctgaatgcaccagcactaaactacccctaaatgacctgagaaataagattgacaacacagtggaagaaaaaagcctaataccaagtgactaaagccacatagggcaaattaggctaaagcaaagcttgaaaggtggggtaaacactcacagagttactggtgttgagaattagactgacaaaacacatgcccaagagcgctatctgactctgccaggccatgttgctatttctttggcagtcattgagaaaaaaactaacaaaacaatcctgtcctggtattgctgctgcactggggagaggtgatctatacagaagggagagaaggggaagggacagtagaggaggggaggggatgggagggaagttggcaacaatatcagttctaggaaatggtcagaagagtcactgttcagggcaggaacagtcggggccctgctatttttgtttagtaatcacaactagcctcccgggaaaattctatctgctgtccagcaggctttggaaaagagccctcctatacacacatgcacacacacaggagcatgcacacacacacacacacacacacttatgggagagagaggaaggagacccataggaggcttgggtctttgaataccaaaccaggtaaatgtgtgctttacctatgcacacccaaacacacacacacacacacacacacacacacacacacacacacacacacataccccagagaggttttactatttatcaagtcaggaataaattttaaattagagttcttataagagagaggaaaattaaatagaacatacaacttttagatcagagaaatggcctaaacacgcaagagtaaaattttctaggggaagtaatttgcttattggttcatttaaaatttctagatgaacacatttcctgccaaatctaattgcaagaaaggtcaccagtgagagaaagcaaaggactcttggtaccttccggctaaatcctcgatatcttttatgaacaggcctccttggtgcttgcacatattcttgcatgccctcagtcggctcttattcttgtacaagacgtagtctttgccagtgctcttattgcgaaagaaattgattccttccttaagactggcaacttcaacaggtgataggcacaacaggatctcagttgtttgttcgatgctatgaaaaggcaaacattttgagggggaaggttaataatgttaggttttaagagacaatcatttcaaactgacagctcaaaaccccttttccctaaaatattttgtaagccccttgcgttccaagtacccaggtttagtggctacctgaggatgcatttctccccaccctgatatgaatgtaaatatacttcttacttgttaaatatgcctctccacttttctagggaactaatagccctcttacttgcctgcccatcgtctgccggttcctctgcctgggtattttgaaagaacagcagttgctcatatcgtttctgttgctcatttgctcccctaaggcattagtcagcctgaaaacaggacgtttaaggtattttcctttaacagttactgatttcctttgacagttttctccctctaccacagctcttttagaagtctaacaccatattcaattctgagaagccactgtgctgtccctcccatctctgctcttgcgcatctggacttcctctgcctggaacgcagttcctctccttcaccacgcagcatcagtcttgggtcaaatagaaacgaatcgtccccttcctggttaagtcttccaagacacaccagaggtccaggctggcattcttggtgtacatccctcttctgtagaacattataacactgtaattggcacactgccctgttgacttacatttaggcacttttgaaagcactctgtatcttccttctccccctaccacttagcccactgcctttcacaggatatgtcttcactagctctctacttaatgaatcacccctcccactgcactcaatttgattaatttacaaaaagctccagccgcaaaccaagcatttgaatcttttttttcttttaaggaaactagccgttacacttctcaaaccccaatttctaaacactctgtttacagtgcaacactgaatcataacagaatatgatttctgccaagaaaggtttcaaaatagcttttgcaaatccatggtaggaaatctgggcacatgttgtttagttttatatttgactccaaacaaaaagtagccaaaattctctttgcatgttaacttaaaactgatttggagcacaagcatatttgtggcactttcagtttcatttttagaagcgctgcaaatttcttaaaggagataaaaataattttaagaacactccagggtagaaaataacagagaaaccacttccaattttaaactgatgaaggcatagctctgtaatattatgatctactttctcaaagcagattctcattgtcacctctgtcccaaattcctagtaattgtgttcccaatggacttgaaattattccaaaaatatgttctaaatgtatttgacaggaagaagccattctaaatttcatgacttctcttttgactttgttcttacgagtacagatatctgacaccaagctaacataagcactgaggcaattcctggaataattagtctaagagtttaaaaggcaaacctctctagatttttgttgttccattgaatgaattcatatagccaaagttctctgttagatttcaacttatatcacaaccatgtagaacaggttcactcaaccacacttttgtcctcagttccacgtgaaagtcacattggagcagaaggcaaaagaaaaaaatatgtgcacctatatacatgcttttctgtgtattgtttaaatgattagcttttccccaaagtatttttaaagatatcaatgaatttgcttctatcaaaatcagaaaaataaaactgtagcaaattcttgttttgctataaaacattaaaactaaaatgaattgccttttttcgaattggttttgggggtagattcgagttacaaaatggccgcccggagcgtgttcggcgcggttcccccagcggtctctggctgaaccggcgctctcgcctccctgctgaacacagcgtgaggaccccccctccatggacatggtgtttgagtctctgggcttgccgaacaccaagtcctctgagttccgcagcgcagcaccggaagcggccgagcgcgctcagcccggcgacccctgcgggctccagacccctgcgccgctgcgccctgggtttcgccgcacccaagacccagcgagtgcagcggcggccgccgaggaggttcgaaaacacggccaaaagaaatgccgagaaggaactgacagataggaattgggatcaagaagatgaagcttaagaggtgggaacattctccatggccagtgaggaagtcttgaagaatagagccataaagaaagcaaagcgcagaaatgttggattcgaatctgacactggaggagcctttaaaggttttaaaggtttggtggtaccttctggaggaggacgctttcctggatttggtagtggcgctggagggaagcctttggaaggactgtcgaatggaaacaacataaccagtgcccctcccttcaccagtgcaaaggcagcggcagagcccaaggtagcctttggttctcttgctgcaaatggccctaccgccttggttgataaagtttcaaatccca

SEQ ID NO: 1882218 - DNA, 4001 bp, Homo sapiens; identical to SEQ ID NO: 584992

SEQ ID NO: 1882219 - DNA, 4001 bp, Homo sapiens
gcccacagctgcccagcctccagccgctccctcagcaacccagtgagcctgagtgccggtgaggcaagcacagccccagccgcacagtgctcagagctgagtgagggtgcccaccgccctggccaggttgctgggaaggagccttttgcttgtccgcaggacgcacctcagggtggtgaagcaaaaaaaaccacggcccaggagagggtgtttgctgtggtctcagtgccaccgatcaggaggtccactgcagccatgtgcaagtgcccttccaggagctgtccagagccctcttccatgctcggctgcgccaccccttggagcatgtagtccatcatgtccctccactggcctgccaccaggctctcctgcagagggtgaaaggagcgggctgagcggctggcctggggagaggagtacagagtggcaacaggcccataactggggtatgcaaaagaacccgcctcatagcaatgctgaggccggtagcatcactggctgtgggccgaggggaggccgtccacacacagtccccaccttgtgctgcctcagctgcttctcctcgttgtggtccctcttctctatggcctgcttcagcctccggagacctggattggggaagaactgcggcaggaagcatgagaatgcagctgtgggaaggagcctctccctccaccccagcctctcccctacaacccaggggtgtctaggctccaggtcctcaccctgagaaagggaatcacgtccacaatttggatggaccagtggctccaggtttttaacacctcctggatacatttgtaataggcaggcattaagttgtcctcctgccaggaaaggatggagtactttcagttcaggacaaggagaggctcagggaggggctgggggtgggcctgaggggctgtgaggcaccttgatcttgtctccgaaggtgaggtaacagttgatgctgcaggtgaggagagagaattcctcctcaatggccacaggggtgccgggctgggctctcatgcgctgtggagaaacagtgtgagttcagcaggccgctgtgcagcgggcagggcgggggctactgtgagaggcgaggctgacccgaggtggcctcaggagcccagccttacctcacagaactcctgggtcagctgctccaccactggctccatggagtcacggatgcccagcagcagggctgagcgggtgagcttcttgtgggctttccagagcagagaccaacgacaggtccgggtagttcttagacaccagcttgtctgcaggaggagctgggggctggagggtgggaactgaccaaggaagccgagggcctgaccttcttctgcctcctcaacacctgcttcttctcctgaagatatgccccccaagagcttccagtgacctggaggattggggaagcccccgaaggtggctcccacttgaggccgaggtgggaggatcacttgagaccaggaattcaagaccagcctgggcaacatagcaagaccccatctctaacaaaaaaaaaatttgtttaagaaagaaaaaatgcccccggcccttacaggtaagtggctcaggtctgccagcaaagtctgcccactttttgaccatggcttcctcaatggtcctcttggagttcagcaccaccacatctgggagacagccaaagcagcgtcagcggagagaggaccctctccgtcacctccgccccctcctatggtgagggccagagcgagatcagcctctcaccttgcagcccaaggtggagcctgtagatgggcccgaatttctgagtcaggccaagcagatagatggggaggtcgggctgcagcaggtgcaagaagcccggggcaagaggcaggaggtggaggctccggagcttccaccagttccacagcaggcgggcgccagccagcaggggcagcagcagcagcaggcccaggagcagcatggcaagacgcccgtcagggccctgaggtgccacttatagctcaagagccccagccatccctcctgctgtgtagactgttttggggcctcccttgaccccaccctcaggtgccttcccaccgacccacccacagagtggcccttttctggaatgacaccagtctcattggccttgggacgtccgtatttcaaaaaaaattaatcacccatcgagaagcaaggaagggaaatgcaaccctgacctttttcctgcatccagagtcagctttctggttccacatcacccgtgcaggcaagggtgtccgccccgacctgggccctctccctctgccaccccaccgtgggccagtttactggcatgatgtttgtctcagagagaaaatggcagtccctgcctaataggccttcctgaatcgcctgaagaacaaaatgtgatttgtgtgggtttgtttgttagtttaagctacagatagagtaatacagtttaagcctggtttgcctggggcattccagtatatacaggtatcccagtgtgattgttattagtgcctcctttcactcacaaaagtgcccagaagacaaaggaggaagtggtttcccgctgcggagtaatagcatgtaccagacactgctctaagtgctttgtgggcactcactcaactcttcacagccatgctctatatgcaacacgggtattgttcgcatgttgtggagggcaggattccagcctggaaatctagctgtcgaatatgtacctttagccaccaggagcacctttctttggttgaaaggaaaacagcccaccttgagctggtttgagacaaaaagtaaggattggggaatttcacagaactcaggaaaaagaagcagaggaggggaccccactggtcttagaaagccaaggatagggaacagaaaaagccccggagacgggcagtttcctcgctctgttcctctctcctctttcttctctctgcagtcaagtttcttgtgtttccaggcacaggcagaacatgactgccctcaggactacagtccacaggttctactccagccagggaaagtatggattcccagcacaactgggcatgccccccctcaaagtccaaagtccccaggaaggggctggatagccacagctggatcaggatcaagggtccagccctatttggggaactgaagccataaggggtgggggtcccactggactgacactcagagaccacttttgtgagtaaggaggcagtttggggatttgggaagaggccatgccaaagaggagtggccgggttcagtgagaggccagggcctcctggatggtacctgagaggtcagaggcgacccagccccataccttcccccccatttctggctctgtgccagaccctcggaccagtgggggtctctctcccctcagagcttttccagactgtgctactgcagagccagagtcaagaccctggctgtgccacccactacattggcgagttcgctgctgctgaatccatgatcaggactgagagggagaaaacaggattgggatttctggggttgggcaatgacagctactgccttcttcatggttgacctcccagaccgggccaggtcttgctgcaactgaatccctggctccggaaaatgggcttatgccaccaccatgctgagcagctactgggagaaagatctgatgagcaaccatagggccatgtatgcaagagcctcaggaaacctctgccacagtgggaaaggcccaaacttctcaaagttacgtgggataagacagtgctcatcggaaaggagcgcacctggaaggctgacgtgcttactacttgtctcaccatctccatctcttccaccacttccaaatccaaactccgaatgtggtcaattacatgcaatgtccccaaaggtaccctgtcctgcccccggcctctgggcctttgtatattctccttctgccccagatgccctcatctacccctgctcttttcctggctccttctcagtcttcagagccccacttggaggccacctgctccaggaagccttccctg

SEQ ID NO: 1882220 - DNA, 4001 bp, Homo sapiens; identical to SEQ ID NO: 585011

SEQ ID NO: 1882221 - DNA, 4001 bp, Homo sapiens; identical to SEQ ID NO: 585025

SEQ ID NO: 1882222 - DNA, 4001 bp, Homo sapiens
caagtctcggccaacccagtgaggggccctggagctagatgcccattggaggaatccagggatgagctgggacatccaggtccccagacctcgtggctccactgagctccatctgacaggggcagcccaggaagagtgtggctgtggcctagagcttagagctgagcaggttgtggaggtgccagcagctttttgaaggatgatgtggccatcccaggggtgcaggtccacagccaccacagccaagacatttttgggggtgtgtgcgtgtgttttgttttgctgctttttaagtttctttctaaaaaggaaccatcttctcccctccttgcctttggccattaatgggagccaatgcaacccaggtgtccctcctcagccacatccagccagtgccacttctgcttcaaagtacggacagaatcaaagtacgttgaaaattaggctcagggccgggtgtggtggctcatgcctgtaatcccagcactttgggaggccaaggcaggcacattgcctgagttcaagagttcaagaccagcctggccaacatggcaaaaccttgtctatattaaaaatacaaaaaattagccaggcatggtggcaggtgcctgtaatcccagctactcaggaggctgaggcaagaaaattgcttgaacccgggagggagaggttgcagtgaaccgagattgcgccgccgcactccagcctgggcgacggagtgagactgtctcaacaaaaaaagaaagaaagaaagaaaattaagctcaactcctaactgcatccagggagggaatcctagctcagcctcagaggggatgggctcctccccagtgcagagaagcccctacatcagcccagaccgtagaaaggagaagacagcaggaattctgggaatctttcttagtgtgcaaaaggggccacctccatgcaattcaggcatgggggccagggcaggtccacaaagccttggccacctgtgaagaccagaagccctggcctcgctggggccactgagtcaggctcatggtcctcgccccattcccctccagcagccctgtggctccacctccagcctcccatcgttgagacacaaggacagggatccacgccatgaatcagctcgagggcttcttggctgcacaggccgaaccctcaggtctgaacatccctaaaaataagggctggtgtcaagaggtggcagagagaaaccctgacacggacacagaagggaaaagcacagcccaggagcccctttcacatcaaagcttctttttctggggatgccgaggaacagagtacaggcaaacggtgcccttcaccttcagaaataccccgatatgcctactttccagttgagatgacacagcaggaaacttgaaaacttagtttcttctggttggaaggctcctcccggccacatgcccaccgtccagttcccgctccctcagtgccaggcagtccagaggctccaggggttcggcttggacataaccggagctcctccgactccccaggcaagcactctgtcattgtcttccagactgttctcacagatgccccgcaaaagagcacaaaagcagccgccagaggcctggagccccgccaagaggacagggcccccgggacagagggacagaggggggctgtgcccaggtggccctgaggctgcccaggactcactggctcctgctgctccatccacacagcagacagagaagcttccagtcggcaaagggctgggaacgctgcagcgccggcgctcggaatatttggattttctgaatgttaacacactggaagctcctaaggcagccaagaggctatgagctcaaaagctttgtgagagcttttctcggagagctcgttaatgtggtcatttaatggcatagtcttgaatccgaatccttaactggagctttaaataggactgataagtgctccataggctttggggaagcggatcaggcccatgtgccctccttgtccaggggcactgtttgcaaagaccacatgtggggccagggcacagggggaggagacccacaggccagggctgggcaatgcggatcttggcattaaaagcacaggccgggtaggatggctccgtgtccagagagcggcttagtggagtggtaagaggcacattccgattgcctcgctccctggagctgcctccagcactaccattaacttggataaatcccataaattcacccgaccatgagcacaagtgctgctcaacccacccagccaccccacccgcaggccaaaaatacgaggcagcacttgcctagtgactcacatcctctgcctgggccccgcccctcctgcctatagtcctgcttcgtgcgaccttcagggaatatatagagttgggggagatttctcaggatatttttgggagacagctgtttgtgattcaacttgacagttatgggtggctatggccaaaagggggctgggcgcggaaactagagctggggaacgtgggcagggaaccggtggacgtggaattcccagtataatgttgccttatatacacttactaagcgcatggatgggtgaatgaataagtgaaggattgacttctctatctgccttagagggtggagttgaggtcaaccaaatcctactcagaaatttcagacacgaaatatcagatcctaaatgaagaattcctcttctgcagtgttcacggcatggcacgtggtggccgccacagaatgattctcccctgtaatcggtttcatccccaaaccttggtgagatgtaaacctgctcctccaggccttgacttccgcagttgggccaaaatgtgtttcctgagactgtgtccccactcgatcctgaaatgttcactgctttcatggggggaaatgaaggagggggatcttgttcaaacaagattgggaaacactatacactacatttccctcttggattttacaacattcattaacactgaagacggaaaagtcctgcaataaagaaacctggtttgttttttttatttaacccaacatgttccaaatttacttgtccaagaagaacacatttttgcaaagtctcggtgtggtagagagaacgatgccccctcctccaccaaagacgtccacgtcctaatccccagaacctgtgaataccttacctggcaaaaggaattttgtcagtgtgattctgtgaaggatttggggatggagggattgtcctggatgattcaggtgggcctaatctactcacaaggatctttaagagagaggcaagaagattaaagtcaaaaatgacaggacgatgactacaggacaagttttgaagaggaagaggccacaagtcaaagaatgtgggtggcctctagaagctggaaaaatcagggaaatggattctcctgtggcatctctgcaaggaacacagccctgctgacaccttgattttaggacctatttcagagttctgacctccagaattctaagagaacccatttgtgttggtttgagctactaagtttgtggcaatttgttacggcagccataggaaatacgtattgattactagaatttgggaagtgaggacacccctgcttaatgatcacacactgtaaatatgtgtccccagcagcccatctgcttctcagcttcaggccctcctggagtttgtgtttgtggatatggtaaaaagctgttgaaggatcgcatccttgaataaatcagtgtctgttattacctgtttttctcaaagctggtcccatagagctgggactaacgggctgagcttctgttttcatggctggcccaacacaaaactgtgaaaagtctcctctgaggggacacagctgggaagagcacatgccaatgttctgcccaggagtgatgagtctctaagagttaagggccctgctgtgaacatcctgaccttctcaaagttcagggacaaatctaattaaagaggcactgtcacacttctcagccttctccacagaatcctttgggaaaccagttctatgt

SEQ ID NO: 1882223 - DNA, 4001 bp, Homo sapiens; identical to SEQ ID NO: 585050

SEQ ID NO: 1882224 - DNA, 4001 bp, Homo sapiens; identical to SEQ ID NO: 585051

SEQ ID NO: 1882225 - DNA, 4001 bp, Homo sapiens; identical to SEQ ID NO: 585059

SEQ ID NO: 1882226 - DNA, 4001 bp, Homo sapiens; identical to SEQ ID NO: 585063

SEQ ID NO: 1882227 - DNA, 4001 bp, Homo sapiens; identical to SEQ ID NO: 585065

SEQ ID NO: 1882228 - DNA, 4001 bp, Homo sapiens; identical to SEQ ID NO: 585066

SEQ ID NO: 1882229 - DNA, 4001 bp, Homo sapiens
tgtttatggtcataaaatcatccgccttttataaacaaatatatgcctaatatttaccacttcagctacagaaattctatattaggaagaaaaactctctattaggaaactatatattaggtgattgtatgacagttaagatttagccccggtacctacagttactcactctgctactgcacaaaactctgcaagggctcccacaccgccccaggtgtgggatgctaagtgtatggtgcaggtacctccgtgcacagccacacgggctgctctcaaccccaataaacatgtttaccacatgagcctcacatgtggtaaacattttttttttttttttttttttttgagacagggtctcattctgtcgcccaggctggagtgcagtggcgtgatctcggctcactgcagcctccacctccagggctcaagccatccttcacctcagcctcccgagtggctgggatcacaggcgcaggccaccacacccagctaatttttgtattttttatttaagaggcggggtttcgccatgttgcccaggctggtcccgaactcctgacctcaagtgattcgcctgcctcagcctcccaaagtgctgggattacaggagggaaccaccacgcccgccaacttcccatgcttgagggagaaatggaagaaagttcatgtaatactcaggcaagtccaattttttcgacgtctttcacttgggccacacacacaactaaagtaactagaagcgcaggctctaggaggccaccgttctgttcacagtgaagagggtgcgctcaccgttggtcgtgtccgctggaagccccgcgtcaggccgggagcgggacagagactcttgctcagggccgttatccgaactgatccgcttcccaccgcacccccagagaaacccacccaaccccctaaacctaagaaacccagactgcgcaaacctgcaggaacagagccatttccccctaatgtgtgcttcaaacccaccgaagcccaactgtaagcaagaccagcgtgcccgccctgcacgatactgcttctccccgcagcagcggctgccgatctgggcagcgggtgggtattcctggggctccgtggacgttgagccgccgcgcgaaaccggcgccggctggacctgcaaatcgccgcccggccggcaggggacgccgcggacgcgagggcgaggtcggtcgcccaggagggggcgcgcgaggccgcaggggcggggggcgccgcctcacttgccctgcgcccctcccccgcgcgccctcctggcgcggcggccggcgaggcccctgtgggagagggggcggggacgaaacggccccgaggctcggagcgccgcgcggcggcggcgcgagcccgagggggcggggaggcgcgggcgggtgtgcgcgcgccgggcgtgggtgtgggtgggggtaaccggcgcgggcgccgagatagcgccgggcagagggacccggctaccctggacagcgcatcgccgcccgcccgggtcgccgcgccacagccgctgcggatcatggtgagtggggccgcgcgccgccaccgacaccgccgcgctttctttctctcctggacccacgcaccgggcgggaaagggccgagcgggcgccggcgcgggcgctgcgggttcgccgctggaacccgctaccctcggaggggccgggtccgcgcgggcctggggagcgggagctgagcgtttgggccgggggcgcgcgggtcggcccgaggcccgcgggtctcgggaactttgtctcggtcccctctccccggtcccgccccggcacctcgaggcgcccgctcgcgcccagtcccctgttgcatgcacggggccgggcgcccgggatgcccgaggaagccgcccctccttcgcggcggccattcccgcgcgcagcccaccctccgaccctccggacccccgaacctgctctcgccaccgcccgccgacgcctggagcggagaacggcgtttcccgcgcgcggcacacaccctgcctcgggagttctggggttcgggccctaacggtcaagctcttgcccctctcctcccttcaccgcgcctgcaccccgggggtgtgtctgtgcactcgtgggtgcctcctgggtttgcagattggcttgggaagcggctgggtttctatcagtgtctgggctcggaggggcttctggtgtgttctttccgacaactcctctctctgcccgatttcccaggccagtcctccactctggattagtaacgcttctttctcctcggcagtaagctgtgtgtgtgtgtgtgtgtgttcacccgtgtccgatgaactgcctgacagtaagctgtgtgtgtgtgtgtgtgtgtgtgtgtgttcacccgtgtccgatgaactgcctgacagttttagtagcagagcctggttctttggttacaaagggagaacatctgttgtgccatcctcaaaggactggtctttaggcaaaatgtgaaatccgcgtttgtcttcagtggtccatattcagtgtttgcctcacccccttcccgtagggttttctctccacttcaggacttgttaaaataagcgcacttcctttctcttccccactccatctgattttgctctggctacccttttaggcacgtaccatctgcctgattatgtgtgaccacttaatcttaaaattccaacctttcctaccccgcccaccacagtgtatattccccttgcctgcttcatttgtcttctcttgagcatgtattagttagcgtactgcatattttgtttctttagcttgtttcttgaacgtctcctctaccagaatataggtttcaggaagacacagatttttgtcatttcgttcattgcttgctagatttctagtacctacagcagtgcctggcgcacagtaggtacttgataactcttttgaattaacccaataaagcaagctgctttatgttaatgcacaggtggggagtaactgcaaagattatgcagttgacatttgtaatgatgagagtctcaagtgaagtttgggaggagggagatactcccgacaggagggacccgattttggcagccttcaatgacgagtctaggcggctatctcttatgccttgtctgtcgcttcatgctctttgcaccttggcatcagagtggacaaagcatttttaggaccaactggctctccttttgggctctgaagctttgtcctaaagtataggtaggaattgtagtgagtaagggaataagtccaaggaaatctctttagctgaataggaaagtcatgggaatgttaacctaaaagagctaaaatcaagggcaagctcttgaaagctttatcctgcccaagtgtgatgcttcctgtttagataagtatttctcagaaactgtgggtcttcagaggaatttttttttaatacccaaatccaaattgtattacttttttcttctttctttttttgtggcagggtctcactctgtcacccaggctggcatgcagtgatgcaatcttggctcactgcaacctccacctcctgggctcaagtgattctcgtgcctcagcctcctgagtagctgggattacaggcgcacgtcaccacaccaggccaatctgtgtatttttggtagagacagagtttcaccatgttgtccagtttggtctctaactcctgacctcaagtgatcaacacccacctcggcttcccaaagtgctggaattacaaggcatgagccaccatgcccggctgaaatcgtattactttaaaaaaaaaatgggcagggagtaggaaagttagggggttgaatttataaataacttagtgggtcagttcagagagacatccttttcaatacatgtccaatatgaactgtcttgtaagatatctctgctagttagtcttattattccaaaataaatattttttctttcaaatttccttttgtttttctataatgtggatttatggcattggttttttaaaaattagtctggagaaatgtattaattggaaacaaa

SEQ ID NO: 1882230 - DNA, 4001 bp, Homo sapiens
cttcaagacccatagagagtccattatactttatgcagggtcagagatgcctctggaatgaagtagatactcccgcaatgtgaaactgatagcaaatattaaacccaaagcaaaaccaaaaaaaaattcatattcttggtctgtacctgaggtcatcttgatggatctcaagtatccctgtatagtattaaaccctctggtgctacttatacacaataatgtcaaaaaatcactatctagattaagaattcacattatactgcatcagattagtgatacagtgaaattcaggtccagagtttttatcattcaatatccaaaagacgtggaagctacttttatagctttcaaatataacacgtatcaaatagaagaaagaacacaggtaaaacagaaagaataaaatcattccaaggaaaaacaatatttggggactattcgtgtgaatttccttcaagtctctcaatatcataatatagatcatcacaggttctaaaaactcctaacagcagggactgtgtttttcttcatcactgtaaccctagctgttaccaaaacgcctagcacatagtaggcactgaaatctttgctgagtgaacaaagtaagtgaagctgaaatcaaattgtatctttgatttgggccacacttttttataaaaatatgccagcattaaatagaatatcactttctgattctcaaatgcatcaaattgataacaaatcaataactagtacttttgtaccagatatttttctagagttttacccatattaatttaaccctaacagctacatgtaatgttaagtgctattttatcccaaattcgtaaatcaggaaactggagcatagacagtttaggtaaccaacccaataccacacacccagtatgtggcagagctgactcctgagatttttatcagactaggttaacctgtttatggtcataaaatcatccgccttttataaacaaatatatgcctaatatttaccacttcagctacagaaattctatattaggaagaaaaactctctattaggaaactatatattaggtgattgtatgacagttaagatttagccccggtacctacagttactcactctgctactgcacaaaactctgcaagggctcccacaccgccccaggtgtgggatgctaagtgtatggtgcaggtacctccgtgcacagccacacgggctgctctcaaccccaataaacatgtttaccacatgagcctcacatgtggtaaacattttttttttttttttttttttttgagacagggtctcattctgtcgcccaggctggagtgcagtggcgtgatctcggctcactgcagcctccacctccagggctcaagccatccttcacctcagcctcccgagtggctgggatcacaggcgcaggccaccacacccagctaatttttgtattttttatttaagaggcggggtttcgccatgttgcccaggctggtcccgaactcctgacctcaagtgattcgcctgcctcagcctcccaaagtgctgggattacaggagggaaccaccacgcccgccaacttcccatgcttgagggagaaatggaagaaagttcatgtaatactcaggcaagtccaattttttcgacgtctttcacttgggccacacacacaactaaagtaactagaagcgcaggctctaggaggccaccgttctgttcacagtgaagagggtgcgctcaccgttggtcgtgtccgctggaagccccgcgtcaggccgggagcgggacagagactcttgctcagggccgttatccgaactgatccgcttcccaccgcacccccagagaaacccacccaaccccctaaacctaagaaacccagactgcgcaaacctgcaggaacagagccatttccccctaatgtgtgcttcaaacccaccgaagcccaactgtaagcaagaccagcgtgcccgccctgcacgatactgcttctccccgcagcagcggctgccgatctgggcagcgggtgggtattcctggggctccgtggacgttgagccgccgcgcgaaaccggcgccggctggacctgcaaatcgccgcccggccggcaggggacgccgcggacgcgagggcgaggtcggtcgcccaggagggggcgcgcgaggccgcaggggcggggggcgccgcctcacttgccctgcgcccctcccccgcgcgccctcctggcgcggcggccggcgaggcccctgtgggagagggggcggggacgaaacggccccgaggctcggagcgccgcgcggcggcggcgcgagcccgagggggcggggaggcgcgggcgggtgtgcgcgcgccgggcgtgggtgtgggtgggggtaaccggcgcgggcgccgagatagcgccgggcagagggacccggctaccctggacagcgcatcgccgcccgcccgggtcgccgcgccacagccgctgcggatcatggtgagtggggccgcgcgccgccaccgacaccgccgcgctttctttctctcctggacccacgcaccgggcgggaaagggccgagcgggcgccggcgcgggcgctgcgggttcgccgctggaacccgctaccctcggaggggccgggtccgcgcgggcctggggagcgggagctgagcgtttgggccgggggcgcgcgggtcggcccgaggcccgcgggtctcgggaactttgtctcggtcccctctccccggtcccgccccggcacctcgaggcgcccgctcgcgcccagtcccctgttgcatgcacggggccgggcgcccgggatgcccgaggaagccgcccctccttcgcggcggccattcccgcgcgcagcccaccctccgaccctccggacccccgaacctgctctcgccaccgcccgccgacgcctggagcggagaacggcgtttcccgcgcgcggcacacaccctgcctcgggagttctggggttcgggccctaacggtcaagctcttgcccctctcctcccttcaccgcgcctgcaccccgggggtgtgtctgtgcactcgtgggtgcctcctgggtttgcagattggcttgggaagcggctgggtttctatcagtgtctgggctcggaggggcttctggtgtgttctttccgacaactcctctctctgcccgatttcccaggccagtcctccactctggattagtaacgcttctttctcctcggcagtaagctgtgtgtgtgtgtgtgtgtgttcacccgtgtccgatgaactgcctgacagtaagctgtgtgtgtgtgtgtgtgtgtgtgtgtgttcacccgtgtccgatgaactgcctgacagttttagtagcagagcctggttctttggttacaaagggagaacatctgttgtgccatcctcaaaggactggtctttaggcaaaatgtgaaatccgcgtttgtcttcagtggtccatattcagtgtttgcctcacccccttcccgtagggttttctctccacttcaggacttgttaaaataagcgcacttcctttctcttccccactccatctgattttgctctggctacccttttaggcacgtaccatctgcctgattatgtgtgaccacttaatcttaaaattccaacctttcctaccccgcccaccacagtgtatattccccttgcctgcttcatttgtcttctcttgagcatgtattagttagcgtactgcatattttgtttctttagcttgtttcttgaacgtctcctctaccagaatataggtttcaggaagacacagatttttgtcatttcgttcattgcttgctagatttctagtacctacagcagtgcctggcgcacagtaggtacttgataactcttttgaattaacccaataaagcaagctgctttatgttaatgcacaggtggggagtaactgcaaagattatgcagttgacatttgtaatgatgagagtctcaagtgaagtttgggaggagggagatactcccgacaggagggacccgattttggcagccttca

SEQ ID NO: 1882231 - DNA, 4001 bp, Homo sapiens; identical to SEQ ID NO: 585089

SEQ ID NO: 1882232 - DNA, 4001 bp, Homo sapiens
gctgttgctgctcgtctggaagccagacgttgagaaccccttctagagtgagctctcccgcagcaaattctactggcccccaaagtatgtgttttgtgtgtcttaaaaatttgttgagaaccattagcaaaaaaacaaacaaaaaaacttaattcctagaatttcagagaaatcccatggagctttttgccagtcacgtcaaaagaggccacaaacgtgccacttaaccagagcttcggaaaggcggcggctgggccggccacgtgcaccgagactcggggccaggtgcagccgccccagggccgaggcctcggaactggcccccggtcccggccccaagcggtccagcgattcccccaagccgtccgcccctccagatttatttacgttttcctgacttccccctgcccgctgtgggacaaacagcctccccacttgcatctgcgaggggagtagcgcgcacttccgccaagttccgcccccacccagcccgaggcccggctgccgccatcttgcggggggcgcacctcacaggtcgggagctgggcgggaaggggcgtggtcccgggacccgccccgccggggcttttgggagcgcgggcagcgagcgcactcggcggacgcaagggcggcggggagcacacggagcactgcaggcgccgggtgaggcgtgcggcggccggggtcgggacgggggttctgggcggggggttcctggtggagggcccgggcgggcggcggggttcggcggcaggtgcggcgggcagcctagggggcgcggcgcggggttctcgcccggcacccccggggcaggtggagctgagccggcccgcggccccgcgaccttcccctcggcgccgggtcccctcaggtctctcccgaaggaaacgcggagcctgggtgcctgggcgccgtccctcggcggctcccgagcggttgcagtttttgaaagagtttctcaaaggcttgacggttgtgactgcagccgcggggcaacggttgctacacaaagtgaaacttgccgagtgctcggcttctcacgggcttcctggcagccccgggaagttcctcggcggaccccgagcccgcgccccctctccacggatccctccccagcgagtgcccccccgcccgccctgtgccccctctcccctgacccctccctgtcgggtgccccgcgggctcgcgctggctgtcccgggactccttcctcctaggtgttcctcctgcccctcgccctctctctcccaggcgcgcgctccctctccccgggcctttccccgccgggtatccctgggcccgcgccccctcttctccgcctctctccgctgggtgcacctcgagtgtcccccagacccctccccgcccggccggcgctctctcccctgaccctcctggccgagtgttccccggggcccgcgccccctccccccgatcctccccactgagtgttccccctgccctctctctcccgggcctgcgccccccaccagccccttcatgctgggggtcccctgggtgcgcaccccctctcctcggacccacccccaactggggggcacctccagtgcccgccggctgccccttgggcgcgcgcccccgctctcgggcgcctcctcgccgggggcccggcccggccccgccccgcccgtgccccctccccatgcccgcagtgctgggcggggcgctgactcacccgggcccgggctggccggttcttaagcggcagcgcgctgcgggcgccgagtgtcgggcgcggcaggaggacgaggcagggcgggcgggcgctctaagggttctgctctgactccaggttgggacagcgtcttcgctgctgctggatagtcgtgttttcggggatcgaggatactcaccagaaaccgaaaatgccgaaaccagtaagttgcccagtttctgggccgggcggacgggagaggcttcattggagaggggaggcacctgctcgaggtgttggggcagttcctggggaacagggttcttctcacacgcagaagacgataggaataggaggaggttttcgccgctctttgttacttgttgacccttttgtggagcgttaggaaaacaccattttgatgcttttctctgcagtctttttctttgtgagccccctccccagtagttacggtcttttctaaaaactagaggcctttttacactgcttccgtctgtttttaaagggtatagtaatacaacttagaagtttcttaaaaagtccaaatcacagggagactcagatggcttccgaccacacacaccagttctcagagctcctaagggtccgaaaccacaggcgccccagatccaactggggagatattaaagggcgtttgggagaggagactggctttcggaagttgcctttcagcttcgcttcctactaggcccatgaagcggtgccctgtacaccagcaaacttgctggctgcagcagaatttctgtctctaacagaaggttagccatggacttgaattgtagatgcaggcagccggtggagtttgataagaggttcctggcaggccgggccgagcactcctggtcagctgatgaaagggctgtgcctgcgcctctgtctccttgaatctgattgtgttgagattgctggcgagacctgggggttgtaggcacaaggcaggttctctgggactgacgcttcttagaaagttgtatgtattctacctgcttttaacactggggaactggtgactagacattagggggaaggtttaacattttttgagttttgaatcacaatggacaaaatatcaggattcattacaaattgggattacagatacatctggaatttttttttggtttttcaaacaagttggttctgtaatcaatgcttgtgtgccttttgtgggggatgggggagcggagtctctctctgtggcccaggctggagtgcagtggcatgatctcggctcactgcaacctctgcctctcaggttcaagcgaatctcctgcctcagcctcccgagtagttgggattacaggcatgtgccaccatgcccagctggtttttgtatttttatagagagggggtttcaccatgttggccaggctggtctaaaactcctgacctcaggtgatctgcctacctcgacctcccaaaatgctaggattacaggcgtgagccaccacacccggccttgtgtgcttcttctgttacattttatgttctctaagatctttgttagaggtattaattttgctgttaggataaagaattaatatgccagtagattcagaagccaatataatttttgcctaagttacatcaagatgattcatttgtgatgcagagtattttctatacaaaatttttctttttaattcaaacttaaaagtgacacgtgacatcgaggcttgacagtgcatgtggtatgaaactgacctaagtacaaccccttactcaggcagagctgagtgcaacggtatgcggaggagtggtcaagaagattacccttctgggtgtggttttctttatttcactaaaagaagaggtgcagagctcagctaagatagcactcaggaaaaagttaacctgttctccgtcactacttttctttctcatttctcataatgaatggtaatttatttttatggtttcttttttgtattttggtaaaatatacagtttatcctcttacttttaggtttacatttcaaggtattaagtacatttacattgttacatagccatcaccaaggtccatctccagaactttatcttcccagattgaaactctgtacctattaaactctccctccccatccccaccaccagcccttggcaaccaccattctactttctgtctctatgaattcgacaactttagatacctcatgcaggtggaatcgtgatagcatttgtccttttgtgacagtctcatttcctgtagcataatgtcttcaaggttcatccatgttgcaatgtcagaactcccttctctctcttatttcttatggcaggt

SEQ ID NO: 1882233 - DNA, 4001 bp, Homo sapiens; identical to SEQ ID NO: 585122

SEQ ID NO: 1882234 - DNA, 4001 bp, Homo sapiens; identical to SEQ ID NO: 585133

SEQ ID NO: 1882235 - DNA, 4001 bp, Homo sapiens
catgtgagacctgctgtccctgggtcctccacgtgaggcctgctgtccttgggtcctccacgtgagacctgctgtccctgggtcctccgtgaggcctgctgtccttgggccctccatgtgaggccttctgtccctggtcctgtggctgcatcttccggtggatgcaaccacggccacatatccatctcatctctaccacatctgagtcacagtttctagaccagaaaactcttgctaacgtttaggatttagacagcatctctttgcttctcttttcccaattttagacttcccttgtaaggaatgaaaaccattataattctgagaaacctaggccagacaaagcctcatggccattttcctcagctcatagtgccctactaggccaggggcaaggtcactctccccgcaatccacccatcctgctccaagtcaggagccctcacagagtttctcagcttcccactagtaggtctttgttcatcgcattctcccacattgaagcaaattggagctaccttcttttttccctcctcttgggagttgctttattttgggtttctttgtacaaattgttgccatagcccttgatgggaaggatcaagatggatcctctcatccttccccttactgagcagaagtgtctgaccctctggccttctatgaaccattgggacccacacacaacatgtcagatccaaagagcactggcctccgaacatggaagtaggtgggcaactgaaggaaaggtgaatagtgagaacaggggaggggaggacaaacggaagaagggaagggccgggagataagacattgacatgtgcagtgagcttagctgggcatggtggtgtgagactgtagtcacaactccttgggaggctgagaggagagggtcgcttgagcccaggagttcacatctatcctgggcaacataacgagaccctatcttttagagagagagagagagagagaccagaagtcctggacatagccaggctgtgggcagcccacggatgaggtgagatgtcaatgtgatcacccctggaagtgagaaggaaggtacggtggggttattgaatacactgtgtcattcaattactgtcatcgtttggattttatatgggatgggggctgggaattcctggtctacttgtgctggagagatgtttaggctttctcagatggttaatagagggcaccagcagttgtttggtggcattggaggagcagctttttgtatcccaaatgacccttttcagataaaattgaagctggattgagacttcgggaggataagtataaagttgtaagtgggtgggatagagaacagccatgcgaatgtcaaatctcctgtcttttcactcctgtcttaggccgaatgtgaggtgccccgttctttcctttggtggagcctttgaagatttttcttttctttaaagctcacttagcagttaaagacttgagatgggctgtaaagctgtgaaaagcctgggaggaaatggtgttgacatgaaggggtaaagccaagcttggaggggtgccagtggcagggacccacactaattcctcttgttcttatgcccttctaaatatgtctctgaagcacaggagaacattcctagggaaaaacaacgtccactcacctcattccaagaaaatctgtaacaacgtccaattgtctttgagaggaaagaagatgacattgggagacacagcatctagaggaaaagcgagaaccactggtcttcctttcagacttcacagtgggatcttggcgcctcggataaacaaaggcactggcaggaaggaaagcgaaaatcagaggagaggtctggcaggccacagccagagcagaggcagtgggtgagaaaaccctgggtttgaggaccctggttctcttccctaacagcctttgggtccctctttctgaaacaaggcttgagagcatgtcctctggcctgggggacttgggtgagtctgaggcaccccaggtagcaacgatggcaggttttgcacttgagctggggagaaagccagtggtgctgaaagcaatggagattgaggtacagagatcttcctgccgaacccattcccaggctttctgcctttctaggaatggagagagagagagaatgccttggctggtttcctgaaatccagttcatggagccacagccccagtgagtgctcactcaagaaacaaaggctcaagagaggacaggcaccagctaggaaactccactccgaaagggatcagctgttgcactcacaggcacactgctttggtccaggaagtcagtaaaaggcaaacaggatcccagcgaggtcatttgttttggagaagacagagggaggaggagggaggggcagccgtgtgaacgtgcagttatgtcagggcctccccagatccctggaacgtcctgcctgagcacaacagggaaaacctccccctgctcactagccctcgggaagtacagttctcactgaatgtctgtcagcataattaaaaaatgaacacccttccaatcgcaagatcaacgccaagggttaccttcctggggagctgtccagggggagcatggtttcctaagaaaacttttgtgatctgtgtagaatatttttgcccctatttttttttttttcttctgagacaagatctggctttgtttctatcaggacatgtttggatgttcttccagaaagtctactggtaagagagctcagttggtcttctaggagagataattgttgacatatcaggggccaaaggctcatctcttcattccctgcacttggggaagaggtggcatcatttcacccttagagcacaggataaatattatgattattcaagcaaaaagacattctactggctacttttgatttagcattacagtttctaatttatcccaaagatgcactgacagaaatggaaagatgtattcacaaggccacctatcacagcacaatttgtgtattagaaaaaactcaaatgtccatcaataggggaccctcaactatggtacattcacacaatgcagtagtacacagctgtaaaaaaaagaagaagaatatctctacatgcaagtatgaaaagatttccaaaatatatagttgataaatattaagatataatcgttaaaactcaaaacaaaatgaaaaaagtcaaacctaactagatattgagttggtggcacatcctcttgggagaaagtatttcaagtgacattaaaacctgggaattgactgtagacctcaagtgggatatacccttagaacaaaaggaactgcaaaaacacacacacacacacacacacagacacaaacttcaaatgtttccagtaattacatcgtcatggaaagttttcctattattattctgagactattgtatatgtttcccagtataaaacaagtgagtaatatgtaggtgttgttgggaaccagaaatttaggttgaaaagagatgtaaatttaagtggggtcaaataaaagccctatagtcctgaatcagactttgaattggaaacattcaattataaatatgatgttttatctacattatctatctatctatctatctatctatctatctatctatctatctatctatctacagatccattcattaacctacccctaatctcctagctttgttccctgaaaaggcctagaaacaaagaacaacctgttagcaatgatcatccctaacacacagataatgctcccctacgagtcggggctccttagagaaataccgagctgcaggtcttagtgaaagatgtgcaagatgcacctttaacacgtggtcctacctgaaaacaagtatactgttgaagactaccatggttgtgtcacaaagagtcaagagccaattttcagggattcccatttgaatatcggaaataataactgcaataagttaaagcacatcaattaaatgtaaatttatgggtttataatgagtttataaaaaaagaagttccctgggacatgatatc

SEQ ID NO: 1882236 - DNA, 4001 bp, Homo sapiens
acgaagtttcttccttcagtacaagccacagcggttctggatacaatttctaacccacccctccttgcacggcactgcctttccttcctgcctgatccctgggcccaaaaccctcgtgacttttttaagtcatatatacaccggttcagaaagacgtctggctgaaagaagagagttatgccctgattcattttcaccttaattcaatttaaatcaaagcaatcgtgagctgctgttctccatggcgacggctcatcgtagctgtggaactccacacacctcacctggggcagctggtgctcagaaggcagatgggaggtcaggtgcccctcggaagccacagctggccacccctcggaatgcttgctcctaattctgcatcctctgcttatttaagagaacaatgttacaaacccatgctgagacatccaccttttcccccgtggatcttagggtgtggggccactccagggcttactgctgcggtggcaaaccctggaagacagtgggatctcactgagacaggccctctgcgcccccaccttggctccggaagatgcctttgtacttgtgcttgcctcccacttgcacgaggttctgagcccttctctccatcaaaccaaagtggtagcatgcagctgggctgttggcagcagtgctcagtgatgggagagcttagggaacattcgctgaaagagagagatgaatgaagattcttgaacgtggaaggctgtgattttgtcagacaagaacaccatgtgggaaattagggcccagaagacttgttcccagttggaccaggcttattcgacagtcacccaggacctggtcgcctcttcttgtgggttgagaagatcttgcctctcaaagggagtaaaactgaagcaccctcctcactggaataccaggtgagaaaggccagtgagacagatgccagggccctggcaaggcgggtgcgaggccccccccccagttcaggaggagccaaaggaagcgcgttgggctggggcctggtgtccgtcgcccatcgggggcttgcacagcgctgcggctcggcggcgggaacctcggtgccgttcactccttgcggtgggggaacggagccctcgttccacaggccctcggccttccccactggtgaactcgagctgagctgtgggggcagagggggcagcagcccctccgtggaagctcagcatccacagggcacctgcagcaagggaggcagagctgggcaatatccacgcagcgtgaaggcatttagcaatcagtcggaaactaaactcaatacgatgcctcagaagactggtgattcgccccgattagacggaccagtccttacaaattgccttttcatgttgtgctgtaaataaccaacgtatgtaataacattatcataccccagatagaagattccagggggagagactcaaagctgcaggttgacagttgcccagagcccgaggggaggtgaccagttttgctcccagctgtcactgggctggtccctccctgcgcacggaagacgagaggaggcgaagctgcgggagcacctcctgagaaggcgccacatggctcccgtggcttctccggccccagctcacctctaacccaaccctgtgcggccagggcaggggcgtcctctccccccgcagccccgagggtccctgtcgctggccgggcaccagagaggctttgtgatcgtccccagccagcgttccctccctgggccatgaactctctgaagaaaagggtggtctgcttccctctgtccctctgaggcggttcctgaggcagtaggtcccagtgatcatggaaggtggaaggagaagcgtgggaaatgaggatgtggggttagcaggaagcgacggcgcccatgccactgcccgagggcctcgcagctgcttgtgaggggctgtgtccaccagcagcgagggtgtgctgggcccaaggtcaccagctccaaacagttgcaggtgcgtctcagccaggttcttccctccagcatcaaggcacctggggtcctggctcctaggtcttgtggaatttgcctacagcacgaacagccttctggagacctccacacaaagaacccgacagcccccctgtcctccagctggctacgttctacgcatcaggaaaccaaggcacacagacatcaccttgggccacacggctggtgcagggggaggtggccgtgagaccacgcgcttcagattccacagagccgccgcggccgatggagcttcctcgcggtgacccccgggccctacttcccctggggctggagcccacacagccgtctcctctctacgctgcgtaggcaaacctgtcttctccacaggaaacccagctgcctctagaaattaaccacattctagaaagtgggtttgactcctgcatacacttttactttctcatttgggtctccggaggaaatgaaaatccacgattagcacaggagacgcacgtgacccgtgtggcttgcaccatttgtcgttttcccacacatcagcgccaaccgggcatgcgtggtcctcacccacagggacttgctcgctctgggttacttctggacaaaaaagtctctgcagccgccctttcagtgtctgcacgcctcatcctccctcctccccagcccgtagcccgggcccagggcctgcggccgcttcgtgctcccaagctgtgtctcacgggggcacccaccctaccgtgccaagcaacctgctgatgggcagagggaaggagccccttcttggcctccagagcccaacaagaaccagctcctggtaacagtggggtgaagccagtgacgtgggttgataggaagccattccatttaggagatcatttgaacatgatgtggatcaatggtgtggaatacagaagaaaggcccccgggcacggcctccccaacctcccgaccccagagccaacagcacgttgtggattaagccccaggccctgagatgtggattagcctggattccccaggggagcccagtggaagaacagggtctgtacaggggacagagggaggaattcggcagcggcaggggtgggtcagcgaggctggagatgcagtgtggctcagagacagggaaggggccaggagcccaggaatgtgtggcctctggaaacgggaagagacatgaagaggttctctcggagtctccggaaggagccaggctggccaagccttggttttttaccccagtgggacccttgtcaggctcctgacctgcagaaccgtgaggggatgaatgtgtgtcttgtaagcctctcagcttgtgatggcagcgagagctccccaggaggggctgcgagccgatgaagagggagggtgcatggtggcctccgcctgccccctggccatctgcagtggtgcccccgtgtgctcattagagcttgatgcccttgtgccttgaagacttagtccagacattctatgaaagtgaagaaggtggccgggcgtggtggctcacgcctgtaatcccagcactttgggaggccgaggtgggtagatcacttgaggtcaggagtttgagaccagcctggtcaacatggtgaaacactgtttctactaaaaatacaaaaattagctgggtgtggtggtgtgtgcctgtagtcccagctactcgggagactgaggcaggagaattgcttgaacccgggaggcagaggttgcagtgagctgagatcatgccactgtactccagcctgggtgacagagtgagactccatttcaaaaataataataataataaaataaaataaaaatagccaggcatggtggtgtgcacctgtaatcccagctactcgggaggctgaggcaggagaattgcttgaacctgggaggcagaggttgcagtgagctgagattgtgccactgcattccaacctgagtgacagggtgagactgtctcaaaaaaacaaaaacaaacaaaaaaaacaaagtgaaaatggcatgggcaaatgatgccacacgtcccctggcccca

SEQ ID NO: 1882237 - DNA, 4001 bp, Homo sapiens
acccgggcggcccagaagtgttggccaccttccagaagggaagtaggagagagcagggggaccccgaggggcccggggcgttccccgcggggcggggcgctcctgactgcggagcgccgtgggcaggggcgcaggtgagcagagcgagcggagctggccgcggccgtcctggcgcctccgccctcccggcgcccgcactgcgctgcaccccggcccggggggcgggcgagggctctgccccaccgcccgggggctgccaaggggagttggggcggcgacgtgggcgtcccgggactgtgcgcccgcacccgccccgacagggtgcgctgaggcgccggggccgccactggctgcgggcgctgggcgcggcagccgcgggagccgcaggtggttcccgggccggcccttttctcctccccctttcctttctttcgcctcccctccctctcgcccggtgtcggcggcacttccctcgcttcctcctccctctccaatccggagggagggaaggagcagccggcgctttcctgcccgcctgcaaacttcagcgggactcgcggctcccctcgccgccgcggccgccgccgcccagagctgcccctggaacttcctctcgccgcgcggcccgcgaagccctgcgggtggaggaacgccgccgggcgccaggcagccacggctcggaccccattcctgccccgcgccgcccgggtgcccgctcgcccgcgcgcccgtccgtccgtccgtccttcctgcccgcccggcctctcccctgcgggcaggggccgccaggcttccctcggcgccccgccgctgcccgggacttcctttgtgttggatgcaggctggcgccccgcgccgacgggaggcagactgagggatcccgcgccgccggcccgcccccgccatgcccttccaccagaggaccctggagcccgcgcggctgcgccggcccgaggcggcgggggccggggctgcgggcgcgccactcttccgctcgctggagcaggtcagctcgcatgccctgggctgcctgctggcgcagctggccgacctgtcgcgctgcgccggggacatcttcggcgagctcgagggccaggcggccgcgctgggccaccgcaccgccgcgctgcaccgccgcctcgacgccctgcaagccgccgctgcgcgcctggaccaccgccgagtgaaaatccgtgagtggccggcgggccgggggaggggaaccggcgggggaggcacccggagagctgctcccgcccgccccctggcggccctgggtcggcgcgggggccgcggagccccgcgatgtcggggtctccagtggggactgccggaccccagcgggaggctgggcaggtggcaggggcgcagagcgctctgtgactttcggactcctggagggtcttggctacctcgagagagtgggcgcggagggtgggaattggacagtccccttgtctgctccttctgtctgtctgtgtctgtctgtttgggagaccccggggcgctgtagacagaggagagccaagttcgtgggaaaactgtcacaggcaggtagcctgttggaaaagccaggggagaatataaatttgggcatatagtagttacagttttggagacttcaggacgatccgtttgtaaaaccctggggatctcggcgagcgttggggctgcttgccacctctcttcccgccgcctacctgtgttcttaccgacaagcaaaactatgcagactttaagggttttcccatttggcgcagaattttctttcttctcccagactgacccaccagctctttgtgattcagaagacgttgaccttgagttcaggctctgaatcccattcatctttgtccggcttcctccaaccctgaaagtcaagtctatgtcctgatatagtgatctctccggtgatccatttcatttcagcagcttaactggctccggtgaatgaagcaactggaatttcctgctggcccaaagcagagaaactttcagtgtgatgtctctgtggtttctcccttttaagtacgtgaacttggtcataatcctaagtgtaaagaataaattggagatggttgatggattgctgggtgggaggggagatgttgatgtaacacacgcctagatttcagcagctctggatgaaatagttttttctcctagaatcacttcatatgcaatctcgaatagctcgttttccagctagctagaaaaacttagctatattttaactaccttacagcctaagagttcaaaattttcaattatttaatttcagtgagattgcttgctataatacatctttctccaagttgtataattaattcgtggcagttttacatttttgcgttcatctctttgattgtgccgtcaacacattcatatgaattgtggacagttcccaacctgggagagcgtccccctccaagaaaaaaaaatcagtggggaggaatcaaagtgatctcataaggttgttgacataatcagaatatatctacttaatgtgagtgatgacttcatgcatatggtaggatacactgtcctagtaggatgtcatggtctatgcggcaatcacgagttgcttctatgcgttttctgtctagggtgtaggtacgtgggagaaccagaattttacccttgacaaagaatgtgatgagggagatctgattgataggtgaactgatctattgtgggaattaaaaaacaagaggaaactccctgaaggtcaagaactccttcctttactagtttggttttacatttaaatgtatcacttttctctgttctttagtacatatgccccaataggctactgtccatagccagaaatcccccaaattctccatattaactaaggttgttctaattacagtaactgaaataactcttttcaaaacttttcacaagtttgtttgaatcttaagtggttgtgatttcatacctgtcttccaggctggagtgctgtggtgcaatctcagctcactgcaccctccgcctcctgggttcaagcaatcctcctgcctcagcctctagagtacctgggattacaggcgcccgccaccacgcccggctaatttttgtatttttagtagagacagggtttcgccatgtttgtcaggctggtctttaactcccaacctcaggcgatccacctgcctcgacctcccaaagtgctgggattacaggtgtgagctaccacacgtggccccatttttttttttttaataatcatgcaagaaggctttttattgaatataattatgcctgagtataaatgtacatgtagagaagaaagctgactatcaagacattaatttttgtggtttctttcaccttcacacactttgcttttttatgtgcttaaaagcagtgaaatgcctatgcattaccatctgttaggattcttttaaaacaatgcctcaaaccttgtttctgtgtaaaaactacagtttgaagttgttctgccattttaggcaggtcttcagaatatcatactccattagtatggatggctagacttttagacttggaattgaccgtaaaggccatccatttcgtgaattcttacccagagaggaaatccagtccaacagcattgcagttaattcaccccaggttaggctgtgggtaatgacacatccgggcctgaagcccaaaccttctgattgtctcgcctgtcgtcccactgcctgtgttccttccctttagaagagtgtggagccaggcacagtggctcatgcctgtaatcccagcactttgggagaccaaggtgggcggatcatttgaggctaggagttcaagatcagcctggccaacatggcgaaaccccgtctctaccaaaaatacaaaaattagcgagactgtctcaaaaaaaaaaaaggtgtggaaatggggagcaaagtttagatatgttccttaaacagtcctaaggataactgtgaccgttaattccacccttcttgtcagataaaccatttaatgagtctccccaggagcaa

SEQ ID NO: 1882238 - DNA, 4001 bp, Homo sapiens
tccactggtttagctctggatattcgccaggaaaagatatttgcatttgtgttttataaacttactcggaagcaagcctccagtaagcggcttgattgtatttcaagcacttttcttatttcatttttgttgttagtggtgttatttgaacattaagacgcaggcatgaagtcttttggggaacaggttaaagcttttattttcaggttacagtttttgatgcccctttctgctactccacggggtacttcaatcatccgcttccgcacatctcttgactcatttggcagaagagcccccacgggaacccttcggcttcttttctgacacctcacgtacttgcagcctgaaggccccgcaggcgacagcggtaatggatgtttggtggaaccctccctgggcccacactccgcccctccccagcaggccgggcaacaattcccagggcccaccgaggggtgcttagctcggaggagggggagtgacgtcacagcgatgttcaaaacaaggcctcccctggccccaccatagaaaagcaccaggaaggggaatgtggcgagcactccaggaaatgctcggattggggaccaggtgacactgtaggaatgtgtgtgctgggggatgggatggtgtcctaaatatgggtcaccaggagccagaaggagctctcttttttctttttctttttcaagtaaagcagaggaggtggagattgggatgggggcagtccggaaaaatcactccctaggggtgtgagcttagctcgtgttgtgcggattgtccccgtcacagcccaatcacctctgtggtgtgcctagacgccctctcccttacctccccgctttctggcttctccatcctctgggctctgggttcagccctgaaagccgaactgtgggctgcagtggggaggcgagggcaggtagaaaccagcttcagggggggctccacctggcccaggagctgggggacaacagaaaaggcaggcttagggcatgagggaaggcgcttctcctgctgcactggggcagtgattcctgggggctctgcacacacaggagggaggctgcaagtccacagctgctttagcatctttccctttgctggggcagacagagtggaagattaaggcaattaaccccagagggccactagaaaactgtccactaggctgccatcacagaccactggagcaaggtccgcttggggatgtctttgagctttttagattacttagataattgtcttagttctccattcggcctcctttgcttagaccagaatcccaggggtaggggaggatatccttgcatcaatgcccggcattcgttttcaaaccaccaggccggcaggcaacgttagtcatcggtgcgacttttcagcggaggaaggagtggggaccgaacatctgggtggccgcgaccttgggcagatactccttagctgggggattttcaagtagaggatttgtcagcacagtccctccaattcagccccgtccttagtagaaaaatttctacaataaacgaaaagagcgtttggttttcgattgttttaaagacaaagtgatccatattgcctgtctacatggttggattaatccgatagttgccctcctgggggcagacctccacgggaagtttgtgtgatgggataatttaatgtcatctaagtcccctggaggggcggttcccctaactactcacccaggagaaagccagccaacacctacctgatcgttcccgcctcgggatggcccacctatcgccccttggcaggaaagcccccgcctcgaagggcgtttcgggggctcagagccgagctaagctgcaagagggggccatggggaatgcgggaagtgaatctttaactttggtgcccggcttcaaaagactcagggcttcttgtgttcaggcagaggtaaatggagattcaaactgtcgtcttgcattaacaatccggaataaaaataaaattcgtaaagggatagatgatcggaaagaacaaatggtgcatgtgtgcgcgaacgagccccagtttctctccatccaggtccccagcggactcagagcggccgccgcactccacggcctgggaggacagaggccccgcagcctcccaacctcggctcatgtggggggcgcgccgcgcagggtgggcgagtccccaggccccagagtctgccggagccagggtgcgcggtgcggcgggagccggccgtcggaggactgcagggcgaaagcgccttcctggggctggagcagaaggcgtgtgcccctgcacggacgcgccttggctgtgggtgtgggaagaaaggctttgccccgtgagacagacccacagacagccccggagccgccggcggggtgaggtgggctgcaaccttgcaggtggctggctgttcccaggtctccggcccggcgccgcagcggacccaggcgccggggccgcagccagccttccttccgagtgctcccttcgcggaaccctgcgccctgggaccttccttccgacgtccctcaccccggccggggagtggcaccaacgcggacgcaccgccgggcctcctgcgggtaaggcgcggtcggcccccagctctgagccttctgggcaggagccccgggggcctgggccggggccggtgtttgcacctctcaggacagggacaaggccgacacccggctcggtgcagccggcctcccccgaggacctgagggccgacgcctccgggaaccgctggtcctcgcgagtgggtcggcgcctggcagcgcgcgccggtgacctggtggtccgtctgctcccaggccgcccctcacaggcttcccgccgcttccccgcgagcgtcagcagaaaaagggacgatgtggaagcccggaggccccttggccgacccaggctggggctctcaggctgggggcacctcaccccggcaggtcccgcgcctcgggaacccggggccaggcagccgtcctgggcgcccgcaccgcgcactgcgcgtgctacgagcgccccctgccgtcggaggcgttgtctccgcggcgcctctgcccgcgccgggctccaagggccggctccgcctgtccccgcacagcgtcccctgggaaccgggtctccagagaaggaggcctggggaagaccgcgccgcccgcgtgggaccccgcagggcctggcacctggttttctaggctgcaactctcatccctcagggtccgggcgggaacagccccatcggggagaccctctcagacttccaggcacagaccacggacgcttttgttcctggagtggagggaggtgacccgagactggggctttcagccaccgctacgcattccttccaggcggcccttttaattgacgtacacgttacagaaaaagcaaggccgctccatccagtgaattacattgtgggagatgccaaggaatgtatttactggcagccaggtttgccaataaaagttgcaaataaagactgctggtttccaggaaaatgtacttctgttttttaaacactccttagtcttaattaccaaaaactgagcctccaaagaaccggtttcgagaacaggaccagtgagtggcggtgctggcgaggcctcacacccccacgtgcaatcacacaccccgatgtcgcctatgggaacaaggaccatgcacacctatggctttgcccacagagaggctcgcccgtatttacatacgcagcagacacagacacaggcgaaacgttggcacacagagaggtatgcgctcggattagggctgtttagtttggaagtgaagaaataagaaaagacaaactatggcaaacaggcgaatttccacagaaataaatgtctgcgaggaaaggaggcacttgctctgtagtgtttagttatggtcgccctggtagttctttttagtccgaccgggttgactataaatgaaggcagcagagaaatgcagaatttacatttactaaaggtccgctttggcttggggtcacaaggaccccagtggga

SEQ ID NO: 1882239 - DNA, 4001 bp, Homo sapiens
gggatgggaaaaacattcagtgaaccagccagaaaagggctggagaagcccctcggaggtcacctcattcaatacccccctacagaaattctctcttttgtctccaaagcccctagttctcaccccaccctcagcctttgctgcaagaaggataggaaggagaactgaggacatagtcactggcccagctggtctgacacaaggacttgccactccaggcttggcctagggctgtccacacaccatgatttccaccagagctgggcctcaacagaaggtaaatcagatagtactaccaagggctttctttctcccagaatatccttcccctcagctaacccacaagcaggcagtgtcgcttcagagaccaccatgagcttctttcttgtcctcactgaagtggctctagttggaatctggctcatcactgaccagcagctgtgtaagcctgggcaagttacttgatctctttgtgcctcagtttcctcttctataaaatggagataatacaaatatctccctcctggggttactgtgaagattaaatggctggtgggtggtacgactcagatgttagctgttattttattcttatggctatggttatctcagttgccacactggaaaggacactgagatatccacataaatggcacttagagtcttccctgcacaatttcacacctagaaatctaaaacgctccagcaggacctaagtatgcctgtcccacctgcccaaaaaggcaaatacataaaatgtggacctgtgcaggtgtcactaacattgcagaaaagggacagaagtgatgaaaaacaacccaagagggtgcctcctctctgaggtccccttttctttcaaggaccactggaacggccaagaaatcccctccccccaggcaactaagcatcaatccttgcagctccgaccccacacctcaggcttccagctcccactccacaggggctcacatactatgccagcctcttgtccacctgcctgaggatttagggccaggagaggcttcaagagccactgtcttcttgtcctgatcccacaacaggatcctcccttggtcatggggacccggcatcactgagctgggttggggtacttcatgaggacccctgaggcctccttcacttctccccacccccaacacatgcagacagatgggagatgtttccggcgtgtgtggggcggggagggggacgggtattgagatttccacgggactctgagtggtgcgtctgctaacaacacagccctcccccttgggccgtgggcatttcctcacccagacctccccctcccaacccaaacacaccatcgccgccaccaccacaatccctccagtccccctgggcaaaagcgatgttcagagacgcggggttttgtttacaatctaatttgtccggataattgcctcaactttgcacttcactttgcccgcatggctctggccttgggccccttcttcactggttcgcagagcactttacgggaaattccctttccgcagagggaggcagtgcgcgccagggggtgaccgttcacaaagccctgaaggggcctccccaccttctaccctcggctcaggaagcccacccccagcccccacgcagtggggagcaggagggaggccagacagggcccgggcctgacactggctccgtctctgggcccccggccactccccgcgccgagcgcagcccgccgggaaccagtgaaccgtgtgggatcaggacttggccgtaccttcagactccaggggatggccggggtttgcaagcgccccataggattagtccgaggccagggtgaatccctggggtccctccacctaccatctttttcagatctgccgcctcacgtcttctccccacgttcccatttttcctcccctaaagtttggtgcacgtggttttctctcgctctcagcgggctgccaggcggggtgaaagttgctgcacctgctttaggcgaattatggtagcactagaagttggtctcccctccctccgccgcttgctctctcgctccctcctccctcgctctccgcgcgctccctccttccctctccaccctcctcctcccccgccccctcccgccccgcccgcgcgccgcccgctcgcagccactcgcagcccaggctcagtcgcagcccctcggagtccggagcccgccgtccctgcggaccggacagtgcggccggcggccggcggccgggacggagcccccagcccgcgaggagggcgcggcgcaggcggcggcggcgcggcggggaggagcccgggccggaaccagggctgggccgggggcggggacgccggggtccgggagcccgggagccggagcgagctgacgagcgtcgcggaaggaccgggaaggaagagcggagccggagcgagccaagcagcccacaaagtgccatgccccggcggggttgaggcgcgcggcggtcggcccggcgcgctgggaggacgcccgggagctgcgcgacgcggggcggcgcggaagggcagccccggcgggcggcggcgggcccgggctgcgaccggagcgagccccatgccccgcgcgggctgacgggccggagcccgcacggagcggccgggcgggacaggtaggtggcgggtcgggcccagggacgtgggtgggggctgggcgggcgaccagaccaactccctcgctcgcgcactctctcgcccgctcgctggctcactttgtgtttgcaaactgcccgcccgagacgcgctgggcgccgggcgccaggaggagccgggcccgggccggcgcactttgttccagccagggccggccgtggcgcactgaccccgcgcagccgcgacattccgcccctggcccgggccccagcgggccggagctgcctcgggaacaggtgggggctgtggcgcggcgggagtgggggcagccggaggccggggcggggaggggggcggccggagaggccaccgaggcccgcccttccccaagaatctgggccccgccccctccccgccgggcctctgggaatggggtgtacgggggcgcgaccccctccccgccccgagtcagacaaagaatacttcccggcccagactttccagagctgggaagggaagtggctccccccaactctagtcggtaccggactccccaggacgcgccggagacagatgaaaatgggggcaagagagcgggggatcgcggtcctacccgccgtgtcgtctctggtgaagaggggacttgtcttgctgaggtcgcacctcggaagtgccagggccagtcagccccttttccatcgctcggtcagctcggggatagagcggaaaacttcttggggacttgagagcgtctggaaatggcccctgtgatttgtgcgccggaggtggagggtggggaaacgatctggctgacacctctactcacccgctgtggagagagctcccgcttcaccacttaaggggggaagagagggcggccacgggggcccggaggccaccagggaaggagcccggagtgaccgagcaggacccccccccgccccaactgaggagtctggtatctcccctggacaaccccagcacctctctgaccggcggcgcttcagcctcgggctcctcatccacgccaaacaaacttccttgggctgcgtcagagcacagccagtggcgctagaatgcgacctggggtcccggccgcccccataaaggaccgggtaatttcgcggaatgcggattttgagacaggcccagacggcggcggattccctgtgtcccccaactggggcgatctcgtgaacacacctgcgtcccaccccgatcctaggttggggggaaagggtatgggaaccctgagcccagagcgcgccccgctctttcctttgctccccggcttccctggccagccccctcccggctggtttcctcgctcactcggcgcctggcgtttcgggcgtctggagatcaccgcgtgtctggcaccccaacgtctagtctcc

SEQ ID NO: 1882240 - DNA, 4001 bp, Homo sapiens
tccccctcccaacccaaacacaccatcgccgccaccaccacaatccctccagtccccctgggcaaaagcgatgttcagagacgcggggttttgtttacaatctaatttgtccggataattgcctcaactttgcacttcactttgcccgcatggctctggccttgggccccttcttcactggttcgcagagcactttacgggaaattccctttccgcagagggaggcagtgcgcgccagggggtgaccgttcacaaagccctgaaggggcctccccaccttctaccctcggctcaggaagcccacccccagcccccacgcagtggggagcaggagggaggccagacagggcccgggcctgacactggctccgtctctgggcccccggccactccccgcgccgagcgcagcccgccgggaaccagtgaaccgtgtgggatcaggacttggccgtaccttcagactccaggggatggccggggtttgcaagcgccccataggattagtccgaggccagggtgaatccctggggtccctccacctaccatctttttcagatctgccgcctcacgtcttctccccacgttcccatttttcctcccctaaagtttggtgcacgtggttttctctcgctctcagcgggctgccaggcggggtgaaagttgctgcacctgctttaggcgaattatggtagcactagaagttggtctcccctccctccgccgcttgctctctcgctccctcctccctcgctctccgcgcgctccctccttccctctccaccctcctcctcccccgccccctcccgccccgcccgcgcgccgcccgctcgcagccactcgcagcccaggctcagtcgcagcccctcggagtccggagcccgccgtccctgcggaccggacagtgcggccggcggccggcggccgggacggagcccccagcccgcgaggagggcgcggcgcaggcggcggcggcgcggcggggaggagcccgggccggaaccagggctgggccgggggcggggacgccggggtccgggagcccgggagccggagcgagctgacgagcgtcgcggaaggaccgggaaggaagagcggagccggagcgagccaagcagcccacaaagtgccatgccccggcggggttgaggcgcgcggcggtcggcccggcgcgctgggaggacgcccgggagctgcgcgacgcggggcggcgcggaagggcagccccggcgggcggcggcgggcccgggctgcgaccggagcgagccccatgccccgcgcgggctgacgggccggagcccgcacggagcggccgggcgggacaggtaggtggcgggtcgggcccagggacgtgggtgggggctgggcgggcgaccagaccaactccctcgctcgcgcactctctcgcccgctcgctggctcactttgtgtttgcaaactgcccgcccgagacgcgctgggcgccgggcgccaggaggagccgggcccgggccggcgcactttgttccagccagggccggccgtggcgcactgaccccgcgcagccgcgacattccgcccctggcccgggccccagcgggccggagctgcctcgggaacaggtgggggctgtggcgcggcgggagtgggggcagccggaggccggggcggggaggggggcggccggagaggccaccgaggcccgcccttccccaagaatctgggccccgccccctccccgccgggcctctgggaatggggtgtacgggggcgcgaccccctccccgccccgagtcagacaaagaatacttcccggcccagactttccagagctgggaagggaagtggctccccccaactctagtcggtaccggactccccaggacgcgccggagacagatgaaaatgggggcaagagagcgggggatcgcggtcctacccgccgtgtcgtctctggtgaagaggggacttgtcttgctgaggtcgcacctcggaagtgccagggccagtcagccccttttccatcgctcggtcagctcggggatagagcggaaaacttcttggggacttgagagcgtctggaaatggcccctgtgatttgtgcgccggaggtggagggtggggaaacgatctggctgacacctctactcacccgctgtggagagagctcccgcttcaccacttaaggggggaagagagggcggccacgggggcccggaggccaccagggaaggagcccggagtgaccgagcaggacccccccccgccccaactgaggagtctggtatctcccctggacaaccccagcacctctctgaccggcggcgcttcagcctcgggctcctcatccacgccaaacaaacttccttgggctgcgtcagagcacagccagtggcgctagaatgcgacctggggtcccggccgcccccataaaggaccgggtaatttcgcggaatgcggattttgagacaggcccagacggcggcggattccctgtgtcccccaactggggcgatctcgtgaacacacctgcgtcccaccccgatcctaggttggggggaaagggtatgggaaccctgagcccagagcgcgccccgctctttcctttgctccccggcttccctggccagccccctcccggctggtttcctcgctcactcggcgcctggcgtttcgggcgtctggagatcaccgcgtgtctggcaccccaacgtctagtctccccgcaggttgaccgcggcgcctggagccgggaataggggtggggagtccggagaaccaaacccgagcctgaagttgccattcgggtgactcccgagaaagcccgggagcattttggccaatgcgggtttttacctgaacttcagcatcttcaccccggtttcggagacctgcctagattcgtcccagcacgcactgtttcgggttcgggattgagggttagggcagcacacacagcttgaggggcaattgttaggactggcccgagtgcccgcagaaagaaagagcagcggggttgtcgtatggcctgtagctgcgggaaggtctgtgccggtcccactgtcgaacccagaagctcactttccacagaaaaccagggctgaagggccccctgaccgccatgccctgcgggcaccgggcattttgagctctcccccaccccctccccctgctgcgaaccagccggtaggtgcaggggccgaaggccaggcccagtggacccagccgcctgaaggggagccacggcctcagaaaacctctgcccgcccccgcggaaaaccgctgtggggaagtctgaaggcctttttttttttttttttttttcaacttgagaaacttttgcctcggggttttggggctctgttacctggtggctggagggaggatactggggctctgctcttggtacctggacagcttgttggctcccatggtgccctttcgatctgaaactcaaaaaactgtgagttgggggagtcactcacactctagtcagtggggcaaggtggcaaggggaagaggtggttttgtggttgccccctctcagcctccacacccagggccagggtgagcgctgaatctctcctgcgggacgggaccctcaggacccactttatcctggctccagccttgctactaagtttgggagaccatgggagccttctctcctggcaccaagggctgggcgcctgggtggagttttctgtccttctccctgtcctggacaggtttcccaggagttacggagttggggaacccctgagccctggagagagaaagacctgaccccagtgctggagaacgccagggccagagcatttgcaaagggtcccacttgcaaagggacctgctcctgtccctttctgtgtagggatcttcctcacacctagacgcccccagcccccttcctctgcctttagagccgaaaacttccgttctggctgtaggcaggtaggtcccttcttgccaggaatgtgcatatcctgctgggcccctaccccaaacatacctcttccttggtggga

SEQ ID NO: 1882241 - DNA, 4001 bp, Homo sapiens
gaccgggaaggaagagcggagccggagcgagccaagcagcccacaaagtgccatgccccggcggggttgaggcgcgcggcggtcggcccggcgcgctgggaggacgcccgggagctgcgcgacgcggggcggcgcggaagggcagccccggcgggcggcggcgggcccgggctgcgaccggagcgagccccatgccccgcgcgggctgacgggccggagcccgcacggagcggccgggcgggacaggtaggtggcgggtcgggcccagggacgtgggtgggggctgggcgggcgaccagaccaactccctcgctcgcgcactctctcgcccgctcgctggctcactttgtgtttgcaaactgcccgcccgagacgcgctgggcgccgggcgccaggaggagccgggcccgggccggcgcactttgttccagccagggccggccgtggcgcactgaccccgcgcagccgcgacattccgcccctggcccgggccccagcgggccggagctgcctcgggaacaggtgggggctgtggcgcggcgggagtgggggcagccggaggccggggcggggaggggggcggccggagaggccaccgaggcccgcccttccccaagaatctgggccccgccccctccccgccgggcctctgggaatggggtgtacgggggcgcgaccccctccccgccccgagtcagacaaagaatacttcccggcccagactttccagagctgggaagggaagtggctccccccaactctagtcggtaccggactccccaggacgcgccggagacagatgaaaatgggggcaagagagcgggggatcgcggtcctacccgccgtgtcgtctctggtgaagaggggacttgtcttgctgaggtcgcacctcggaagtgccagggccagtcagccccttttccatcgctcggtcagctcggggatagagcggaaaacttcttggggacttgagagcgtctggaaatggcccctgtgatttgtgcgccggaggtggagggtggggaaacgatctggctgacacctctactcacccgctgtggagagagctcccgcttcaccacttaaggggggaagagagggcggccacgggggcccggaggccaccagggaaggagcccggagtgaccgagcaggacccccccccgccccaactgaggagtctggtatctcccctggacaaccccagcacctctctgaccggcggcgcttcagcctcgggctcctcatccacgccaaacaaacttccttgggctgcgtcagagcacagccagtggcgctagaatgcgacctggggtcccggccgcccccataaaggaccgggtaatttcgcggaatgcggattttgagacaggcccagacggcggcggattccctgtgtcccccaactggggcgatctcgtgaacacacctgcgtcccaccccgatcctaggttggggggaaagggtatgggaaccctgagcccagagcgcgccccgctctttcctttgctccccggcttccctggccagccccctcccggctggtttcctcgctcactcggcgcctggcgtttcgggcgtctggagatcaccgcgtgtctggcaccccaacgtctagtctccccgcaggttgaccgcggcgcctggagccgggaataggggtggggagtccggagaaccaaacccgagcctgaagttgccattcgggtgactcccgagaaagcccgggagcattttggccaatgcgggtttttacctgaacttcagcatcttcaccccggtttcggagacctgcctagattcgtcccagcacgcactgtttcgggttcgggattgagggttagggcagcacacacagcttgaggggcaattgttaggactggcccgagtgcccgcagaaagaaagagcagcggggttgtcgtatggcctgtagctgcgggaaggtctgtgccggtcccactgtcgaacccagaagctcactttccacagaaaaccagggctgaagggccccctgaccgccatgccctgcgggcaccgggcattttgagctctcccccaccccctccccctgctgcgaaccagccggtaggtgcaggggccgaaggccaggcccagtggacccagccgcctgaaggggagccacggcctcagaaaacctctgcccgcccccgcggaaaaccgctgtggggaagtctgaaggcctttttttttttttttttttttcaacttgagaaacttttgcctcggggttttggggctctgttacctggtggctggagggaggatactggggctctgctcttggtacctggacagcttgttggctcccatggtgccctttcgatctgaaactcaaaaaactgtgagttgggggagtcactcacactctagtcagtggggcaaggtggcaaggggaagaggtggttttgtggttgccccctctcagcctccacacccagggccagggtgagcgctgaatctctcctgcgggacgggaccctcaggacccactttatcctggctccagccttgctactaagtttgggagaccatgggagccttctctcctggcaccaagggctgggcgcctgggtggagttttctgtccttctccctgtcctggacaggtttcccaggagttacggagttggggaacccctgagccctggagagagaaagacctgaccccagtgctggagaacgccagggccagagcatttgcaaagggtcccacttgcaaagggacctgctcctgtccctttctgtgtagggatcttcctcacacctagacgcccccagcccccttcctctgcctttagagccgaaaacttccgttctggctgtaggcaggtaggtcccttcttgccaggaatgtgcatatcctgctgggcccctaccccaaacatacctcttccttggtgggagggaagcagagggactgggagaggaaggcttgcttttgatccagtaattcccccaaatgtttgctgagcccctactctgcctgggcaggtcccaggctgagtactggggtacccaagcagtgaaggctggggtctgctgtctggacctcagattgttggggtaggagagacagatatcacatggtgggggggagggtggaggggagaagaatgggaacagggtgtctgtttcagaggagagttgtgaggtgcaaggggagggaagggttgtctccccaggaagccttccctgcatcttaacccttcctaccccactgccttggcggtttcctgtctctccagccacagtgcaagccccccagtcccatcctaagcaggcacaatgtctttattttttgaatagcctaaactgtgtgaaataataatttcttccatccaagaaactcctcacagtttcccttctcacagatcttaccacgctccagcttccctagaccaaggcagggcaggtactatttttgacaggactctcaggctccgttggctggaatgacctcctcagatttggttccagaactctggaacccagagcaaggaactgaggcctccccagggcagaacatgtgtcagagtggaaaaggctttggaacttggcattagagatgggactctggagaacttaattaagctcttcgaacctcaattttcttacattgtaaagtaggtcataatacccaccttagagattctgtttgggagttagatgagagagcagatgtcaagtaccttgcacggtgccgggtgcatggtagtactgatcaagggatggcgtttattattaatttgctagcactgccaggccacatgttggttgaatatggaaatactgaagtattaatcttcattttatgggttgggaaaacgaagtccagagagaagaggcaacttgtccaaggttacacagctacatggtagcacagctggaactaaaatatggggccctcgactcccagtataaccagtagggcttgagcgtgtgctgtggtgaagggagaaaggaagggatgggaggagct

SEQ ID NO: 1882242 - DNA, 4001 bp, Homo sapiens
cgaggagggcgggaggaaggcagcctgggtgggcaccctgccccacacacctcctgtggcatctgttatcgacctcaggaagcagcacagctgccgttcctggacaggttctgccaggagggaccctggctccctttaggggctggaaactgaggacacttccttccttgtccagggccagcaaatcccttcctgcctgcagcagctggaaggccaggaagggggtcctggcttgcgtggacagcagccgggtgcatcagcacgaggggtggggacatctcccgcagggcctggaacccctgaggccgctcagcagagatgagcaacgccttcgagctctttggcacagtgttaggtggggaagggaccccaggatcctgcctggccctgggaccacccagacctttgggcgctgcaggtcaggagaggcagttcccacgggcctgggctgtggaattctgtcctcagccgtgagctccatcagtttcctgccatggagtctgggatgctctgggaccttcctctagtaaggggtctggacctccggacgggccgttgttcatcttaggaaattcgcactccagccgccttaaggcctggcccggtgggtttaggaaattcgcactccagccgccctaaggcccggcccggtgggttgagaagatttaggaggcttaggcctcacctcccccggaccctggactgacactggctccctccctccctccctccgctcagatccagacccttcccagaccctcgaggccacacatgtgtgcccaagacagcagtggcggtctcttttctctccacagcaaacgtagagctgttcactatggaagatgtggggatccctttagctgagagcacaaaaagttttaaaaatggcaaaaaaaccacaaaaaaaaacagccccagagagcagaggctggatcctcatggccctgtgccactggcgcctgagcagctcgtccctgtgccgggtgccctcagccgctgcctggagtcacagtgccggcgtatcaggaagggcggcagcagctgcacctctcaggatgcctgggcgcaggacagtggcagagggcaggcaggggccagggttggggggtggcagaacaccaccggcacacacagcacagaggggacaacaggcaccaggacccctcggtggggagagccggggacacggtggggagttgtgctgggtgcactaatgatcaaagcgatggttccccacgtgtgtgcaggtgctggtgtgtgcgggcgctggtttgtgcgggcgctggtgtgtgtgggcgctggtgtgtgcgggtgctggtgtgtgtgggcgctggtgtgtgtgggcgctggtgtgtacaggtgaccgtgggccaatgagctccaaacatcattagtgagaagaaaaggaaaaggaatggaaactccacatttgtattgataaacacaataaatggattcttgtcaaagcaggacgtccctggccccagctccttccttcccacccagagtctcagggccacaccgttgaggttcagacctccagtgaaggccgccgtccatctgagtgccagggagagctgggcttgggaagcccccgttgtattcctgggagagcgcggctttttcctgaaaacgtgctgaggctccaaggcaagggtggtcgccatgagtacctcccgccagggcactgaggggacaccagaacctctgtcctcagctcatcaagaagacaactttgcaccctgagaaggcagaggcgtgaccgggccccaacactgaccccacctctgaatgtcttgtcttctcgactggcctgttcgtgatggaagaggctggcctgccacgttcgtgatgtcagggccgggcagtggacgggcagaggccgcgaggaagaggagaccaccgcccagatctcctcatggctgagccctggagtcctcctcggcccaactctctcttcttctggacggctggtttccatcctctatcatgagatagatagaggcctgctgagaacattctagaactcaagcttcggagctctaggtccacaaagcacaggttttggaaaacaatgtgggaatgctgttccgtggtgagaaggaaggcagaactgacacaggcacaggactaaacatcccactgcaagggagaagctggatgcaaaaggccgggctccattccgagacatccagcaaaggcagcatcttcggggccagggagctggcagcagggactgcagaggggcgaggtgtcctctgggggtggtcggatggcagtgatggctgcacagttcctaaatgctctgaagtttatgaaacatttcgctttagaggaatatattttacagtatgcaaactatatctcaataaagctgttaaaatacacaagttataaaacagtcacgcaaaaagccttcaagatacggcaggaagtgcacctgtgcgccataggtcaacccattccaccatgtgggcgtgagtgtgagacacgtgggtgctgtgtgagggtgtgcctgtgtggatgtgagtgggcacatgcttgcacacgtatgttcacatgcagccttcatgtccgggaatgctagggctgcccacctctcctccacgtcctcctctgcacaatcagcaacaccgactgatccctttctgcacgtcacagacccaggcgaggccctttaccgactcggctgcgatggccgcaacacccagtctgtggatgaggagtctgggctcagaggccaagctgctcagtgagtggccagccggggtcttgctccatgctcagcctccacccccaccatcgagcctgtactctgctctctcccttcggccacccgacccctcctggctgaaatccaaaaagaaacccggtgtctgctggaaggagcccaggggtgcccgctgggtccccaggaggtccctgctgtccgtcagcactgcgagggcttctcgccgtgctcagtaacacacttcctctccttgcatgttttcccagaaaagaatgttggccagatgcagcacattttactcctttggtaagtagggaaactgaggcacacagcagctaagtgacttgttcagggccccaggctccaggattcccgagacccaccgcaaagctcctccccgaatctactgaccccctcttcagaaatcatctcagaaaagagagttcattcttatgaacaaaccacgaaagcctcgtcttctgggatgactgaggctggtatctgggagatgcatcatctgacttttgctgctctgcccaagcggatagtgcagggcctgggttggggtgcgcagcagggtacagggcctggggcaaggtgggcagggtgctccccaccccagttcttccccaggcactgcagggtccaggttgggtggcttgtgagtgtcccaggcagccacaggagctgaggaatccaagcctggcccaggggcagatgctctgaggagcccctcacccgtggtgagtttacatgtggagcgccggaggtgcttgccagaaaggaaggaaaagggcagctggagacagccctgcggaagccacggggccgtatttattcaccacctgctcagacctcgtaaggtccacgaacaccctcagcccagtaaacagggtgggagggtgcagggcccaagcccatcacccgtctctgtggtgctagcttcttggtcttccaaactgacctttggctgttgagaaaggtcagtgatgcactgcagggtgtctctgctgtctcagacaggatgggcgctggaaaggccgtgacctgcctgccttatttatcttagcagcaggaagggtaaggcattcctgcaggtgaggcagcggtgccggcaggaaccgccccaaccgaacttcaaaaagtgattcagagaaaggagccgctgtgaactaagtgccatgaaaccagaacaatctcccatcgacttgaatgagaggttaaatcaacaaattaaccccaacgggaaagatgacggagaagtctgcct

SEQ ID NO: 1882243 - DNA, 4001 bp, Homo sapiens
taaatgggtgaggaatacagatgttgaattcgtttgaaaaaccgataaatactgcagttggaaaatcctgttggtgaatgtagccagtgatgtcccactggcttccccagcacctgcgcgcgatgaacgcatctatctgtaatcttgactgggtctggggactggaaagaagggcaattgccggctcatgaagcacatccctcctggaatcccccatgccagcaggctgtggctggaggcccgctgcattcaggcaagaatgtgcagctaaatctcagttccacagacaaatgcagcattgtggtccccgtgggcctccagggaaagccaggctgcctctgtgccctggatgtgaacggctgtgcatattaagttagacaggctgcatccctaagggcttgaaacctgtcccctgggactctccaagagcagcatcgtggggggtaaacaaatgtcccatgtgggggtgctggagggagcagaagctcagctgaacagaaccacgtggcatttttttttccccagtatttttctgtctgctgattttcttcctctgatgtcctggttctgttggaaagggagaagagacagagaagaggaacacatctcattttctaccacccacttttgattattcatattcatgtgggagataagaagagcctgccagggacacatttaaataacaagtactctaaaatcattactttgcccttgactacagtcaagagacattctgtgggcagcacactgtagtgtgtgtgcactcacactctcacaaatgcacacttacctctccctccaagcccccacaagctggaacttagcagtcccagttccctaaagattgctcacacagatggatgtggctttcacaacattaatgggactcgaaagaaaaaaaaagcaataataattagcaaaacagtaagtacgtattagttgaggtttcatgcttcagtatttatgtagcctctcccctcggctgaaggaaaggacaagggagtggagagaggaggaataaagtcggaaaccccattgcccatggaactgcacagcatgttggcagtagggcagaaagcaccttactctgaagtcaaaattcctccccctggcccaggtcctcaggagctagctgccaggtgttctcgaaagttcttgcaggacaaagaggcctggcatatacttccttcccctcaccaccttcctgggccatctactaagaccctttgcttcttggtgctttgaggagggaaaatgtctttcttacctccccgagaggatggctgagagggttaaggaagatgctacccatgagcaaaggcagaattcctgccctggcatcaccccacccaggtccgtgccatctgctacctaaagtcctgtaataaacctgagggaaggcgggtggagcagggaggggcactgtcatttatctcattgctcagtccctatgtctaataaagaatttaggaaacttcccacagcacatcttcttctcattaataatagagtccttactaataaatccagaaagcagcacccagaccttgttaaacctctactaattagtattgagacacccatagcccaaggtggagactatcaacacattcccaggagaaaatgaaacacacccacaggttggggttgctcaaaaatccatgtttggatctcacataagtgactgatttacccattgctatatccattaatgctgtccagtagaactttctgcaatgatggatatattctatgttgcatggtccaatatggtagctaccagccagccccatgtggcctttgagtgcttgaaatgtggctaggacaactgaggaaactgtattagtctgttttcaagctgctgataaagacatacccaagactgggaagaaaaagaggtttaattggacttacagttccatgtggctggggaggcctcggaatcatggggggaggtgaaaagcacttcttacatggtggcagcaagagaaaatgagggagacagaaaagtggaaacccctgataaacccatcagatctcgtgagacttattcactatcaccagaatagcacaggaaagaccggcccccatgattcagttaactccccctgggtccctcccacaacacatgggaattctgggagatacaattcaagttgagattttagcggggacacagccaaaccacatcaaaactgcatttttcattttatttagttttatgtaaatttaagcagccacatgtggctaatggctaccatactgcatagcacagacccagagagcatctggtatgtagctggcactcaataaatctttgttcaaggaaaatcataaatggaccgtagttcaccataataagttctgattaagcaagattctcatatttattgagtcctcattttaaacaaagccctgtttaggtcaacaaccttctgagatgggtacttttattatccccattatacagataaagaaactggggcttcaaagagttaagtgaggagcccacacccacatagcacatggccagccaaggattcaaccccgggcagtgcccacacacccatttctgtagtgcctccagctttctgaagtctgatgggacagcctcttcaaactgccttttccattgaccaaaaaaagccttcaggagcatcactttactttcaccagaatgacatcaaattagccaaggaacttttccttttgaaatagaaaaaatgaagatagacaatttttgtcacatctagggatcttttaaaagcctagccagcgtagtaactttgcaaggctctgttgtctgacttctggatcccaagtcaagagttaactattcattccaccactgtggcctcttcctcaaaccatctcccaagatggcagactactctgagagagcctcacaatcatcatttccatgagctctcacttctgaatgctgacaggtgagaaagggaggagaaagggaggtgagaaagggatttgaaacaccagtgacacaaatccagagtttgtagccccacccaccatgaaagatgggagaggcatgtccacatgtcatatgcaaatgtccttctccaaggagattattgcatccttgctcatctagtaaattattgctgcagccagccctgacccttgcaccatcaggtctcaactgtataacaagagaacaggtgctcccaccaccatcggatgtaagcaccaaaccaggggctgggcacccttcaaggcatcctctcaacagctgactctgtttaccatagcatgcccctgactccatcagacacagagctgtcttgacagcattactagctgaatcaacttttgcagttcttcccacgccctctaaggcggccatttgggctcctctcaacagggtcctttccaacactccagcaagctgtttgccttgactgaccccagagctctgtcatttgtggctgtcaccatttgagatacgaagggaaagaaagatgcaagtgacacttactgctgatgaagaaaagtatttgtagaatttcagacattcttaaaccattctaactttgctctagcaggtcaactgcaagccacacagtttatctcgcagaaccagtggttccttgaggaggactttatatcatagagcctcccatgtcttccttttcaattatttaaatcctaccccctcttctgggcccagttgaagaccaacccaccttttccaagaggtcttctgggacccttccagctctcaggaatgcccctttcctcagctttcaggcagcacccactctctgcagtgccaccttctcagcaacccaccaaagaggggaagtgcacccgggacgagtggggccccactcattttatctctgatgtcaagctcatgttccctactcaacaaaacaaatgtgcagcagtaaactggaagcaataattcaccagctcttagaggaagccccttccgggccccttgtgctgcaagtgtctcattcaaacacacaaaacgt

SEQ ID NO: 1882244 - DNA, 4001 bp, Homo sapiens
agccttgttcggtggcgactggagggcaacaatgcctgggacacagagcttgaatgagctgtcctcttccttcattttctcttcctcacttttctcctcgctgggcaaaccttggagaggagtccagccagtctctgagcaggtgaggaggcccaggaccccaggcctgcagccccaccccacccctaggcaagacaggaagcaggaggcaacatgtccctaaaggctaagaaaggggactgctccttccaggcccaggccacatattctggggcccagcctgatgtgggaaaggccccaacccatgcctcatgaccccatcacccacagaccttggccatggccgagttttgaagctccttgtccaaactgtggaagtggttccaaggagttgcctccaccctggaagaggccaacacgcagtctcctgtgaatgggtggtggtcactgacaggctggcagcaagtggggtggtccaggccttggagggcaagcacacagggggctgagttgtgggtggggttgtcttgttttctttagcaaatgcctactgtgtgccacacaccgttctgggcattttacaaagagtatctcagttcatccttgcaacttccttcaaggatagctactattatattcccactttaaagacgaggaaacagacgcagagaggttgagcaagctgccacccatcgcacggctcagcatgttagaactggcatttgaacccaggcagtctgactccagcagtccctcaaaatgtgtcccgtgtcctgccaggccccacacccctaagaagttctacaggaagagggtccgtttctggcgcttcccctatgcctatggccaccacactcaccttcaagcagacactccttctccctggtggagggctcagggctgacctcacggggccctgtggctctctgcaggtattcttccttcaactgcaggatctggataaagtggctgctaatcccaaagcacagtcaggtgagggaggcaggtggggctcagagatgtgacagagaccccctaaacctcccccaaggctcacctacaggtctgctggccctctgcagccttcctctcccatcagccccctgctctgcatctggggtcctcatcatagagggggattatcgctctcaaaagtagggtgatgagggggtggggaacagagagaggtgggtccctgtcctcacaggggatggctgccaggcctgtagaaggagctgggagcaacaggaccccccgtccctctggccctggcatattccctttctactccctagcctgtcctctttcatatctggtatcccccatccacaacccctcacttgtgggaggaccccatctctccctccttcccaaaccaaatccccatctccagcctcctccccaccagatgcttctgtccgttggccccacccacatctccctgtccttccccaccaggtgccctgttccagacctttacccacccaaggcctccctccccagaccctccccagcatgggtcccccatctcaggcccatgcccttcccccatctcatgtccaggcctcttctcagtacctctgtcccaggccttgccaacctgggtaccccccaattccagcccctcacctgtctgaggcccctgttttcccagaggcgtcccctgctggctccttcccctccttctcaggcaggttgcccaacacctcctggcttgctatgggcagaactgacttcacctctccgccaggccttcttgctcttgcaggtgtaggtcaccatacgccccatgcccagctttaagggaggctgctgtgaccgttttgagaagcccctgggtatggccacagagaaggggtggggcggcaaggcagatggtcccggccccctcctcctcacatgtccctcttggctcatcatcagggaaatggcaccctggtggcggaacatggaggagcagcctgaaattcatgatcagggcttcggagctggggcctccatcctgagaaggtccccaattcagatcctgtaacagccaccccaggaccaactgcttaagaacaggaagagttttcaaattaaaacctccagttggaaacttcccagaattctgggaagcaaagactggggaggatgggaggttgggggagattagttggaggtagagggggcaggggtttgatgaagcagggaaggaggtgtggggggcaggcagggattttgggggaaagggggtggagacttggaggaaaagatgtgagagccccaggaagcttggcagggagcaaacagggagaggcagggagggaactgaaccctgagggcaggggctattgaggactgcacacacctctgtccttcctgggtttgttctgtcctcaagaacactcccagcagccagacagtatctgtcttccctcttagcatccaggttttgtgtccaggtggtagcacagaccccactaagtctatttatttatttgtttttatttttatttatttatttttttgagacagagtctcgctctgtcgcccaggctggagtgcagtgggctatctcggctcactgcaagctctgcctcctgggttcacgccattctcctgcctcagcctcccaagcagctggaactataggcgcttgctacggcgcccagctaattttttgtatttttagtagagatggggtttcaccgtgttagccaggatggtctcgatctcctgacctcgtgatccacccgcctcggcctcccaaagtgctgggattacaggcgagagccaccgggcccggccttgtttttatttttatttttaatttcttgagatggagtctagctctgtcgccaggcaggagtgcagtggcacaatcttggctcactgcaacctccgcctcctggcttcaagcgattctcctgcctcagcctcctgagtagctgggactacaggtacccgccatcacgcccggctaatttttgtatttttagtagagacagggtttcaccatgttggccaggatggtctcgacctcttgaccttgtgatccacctacctcggcttcccaaagtgctgggattacaggcatgagccaccgtgcccggccctatttttattttatttttttgagatggggtttcactcttgtcacccaggctggagtgcagtggtacaatctcagctcactgcaacctccgcctcctgggttcagcaattctcctgcctcaacctcccaagtagctgggattataggcgcacgccaccacaaccggctttattttatttatttattattattattattttttgagatggagtttcgctcttgttgaccaggctggagtgcaatggcgcaatcgcagcttaccacaactctgcctcccgggttcaagcaattctcctgcctcagcctccagagtagctgggattacaggcatgcgccaccacgcctggctaattttgtatttttaataggggtggagtttctccacgttggtcaggctggtctcgaacttccaacctcaggtgatcagccagcctcggcctcccaaagtgctgggattacaggcgtgagccaccgtgcccgaccaattttttttttttttttttgagacggagtctcattctgtcacccaggctggagtgcagtggcgtgatctcggctcactgcaagctctgcctcctgagttcacgccattctcctgcctcagcctcccatgtagctgggactacaggcgcctgccaccatgcccggctaatttttttgtatttttagtagagacggggtttcaccatgttagccaggatggtctcaatctcctgacctcaggtgatccacctgccttggcctcccttttgtgtatttttaaaagagacggggtttcgccatgttaggcaagctggtcttgaactcctgacctcaggtgatctgcctgcctcgggctcccaaagtgctgggatgggattacaggcgtgagccaccgtgcccggcctttttttttttttttttt

SEQ ID NO: 1882245 - DNA, 4001 bp, Homo sapiens
tcctaatcaaatgtaactggtgttcttataagaacaggaagtttggacacagacacacatacagagagaacgccatgtgaacatgaagacagccagctacaagaaaaggagagaggcctcagaagaaatcagcccttgatcctaaacttccagtctccagaactgtgaggaaataaatttctatcgtttgtcaccctatggatggtacgttgctgtagcagacctaccacctgtcttcagaaaagttctctagagaaatagcctttattcttcaagcttcctctgacctaccatttcccatcattttataaatattttcaggccctaataatgttgattttttttccatttttcttctactgtcacacacttctagggcaggtgtttggtggtgtgacaggaaattgactggtgtcaacttccagtgtttgtgtgataggaggtctcaaaactacaggataaatgtgtcatatctcccataagtatcagttttgctcagtgattttttttttttttttttgagatggagttttgctcttcttgcccaggctggaacgcaatggcaagatctcggctcactgcaacctcctcctcccgggttcaagcgattcttctgcctcagcctccagagtagctgggattacaggtgcccaccaccacgcctggctaattttttgtatttttagtagagacgggttttcaccgtgttggccaggctggtcttgaactcctgacctcaggtgatccacctgccgcagcttcccaaagtgctgggattacaggcgtgagccactgcgcccggcttgctcagtgatttttttaaggaaaatgttaaataattggctcatgcattaatttaaagcgtatttacatgaaaatgagtatagttttagcatattcccgtatatttcacagacatttctagcttatagcatgttcctctcaatggaagtgttccctctcctcagcttcagggtctcttcatcactcagaggcaccatcagatgtttgttgagccattctcctcatagaacgcagaggagaggccaggtgtgaaaccagaccagtctatctatagctaagaaatattcctaacggacctcgaggagcgcgagagggaggttttaaatgtaatcctgagcttttctgattttggggttccaggtctgctatacatactcttgcacgttatattgggcacagccctagtaactctgtgatttgaaatgatgatctgaagttatcgattagggagaggaatgtggacagagaagcagagcaacggagaccgggaagtttccgtctgtgtcctggattgcagccaactgcttaggcacacacacctgctgccctcccggctctgagtcacctcctctcctctccctgtccaacgagcagctgccaaatggcagccaaatccaacagatgtaagccgggaccccacctgtgtttgaattactttctttgaaatctgccacgtccaggtttattgacccgggcagtcttttcaacatttccttatgccgcatacgggtggggctagggactttcttgtgcactggcagtcctcagaagagaaaactttgaattcagctatttggaacctcgttactggttccgagcctcaggaaaggccagaagagcgagagccagcctagttagtcactcccacatctgtgacccccgtttacgggccttgtacgctactgcccttcaggtaccataaaccgggcttctcaaagggcactgcaacaggtttccaggaattatttatcaaagtccatgaccccggccctgtgacccctgggtttgaaaattcagaccttcagcctaacggagaggtcggctcagcgttcctcccagcatcctcgggcgatattagggtcctgggagattcgggaggccactgcgtccaggccccccacggccagccaggcgagaggcgggacgcgaagccgcggcctccttcctcttccctgaggcggtggcggcggcaggccccgcccctcccgcgcggtggccgtcggcggaggggcggggcctgctacagcgtcgccggctgacgcgaatgacgctgcgccagtcaggccgcagccccgctgcttggcccgtcgggcccgccttggccggctcggcccgcccccggccctccctgcacggcctcccgtgcgcccctgtcagactgtggcggccggtcgcgcggtgcgctctccctccctgcccgcagcctggagaggcgcttcgtgctgcacacccccgcgttcctgccggcaccgcgcctgccctctgccgcgctccgccctgccgccgaccgcacgcccgccgcgggacatggcacacgcaccggcacgctgccccagcgcccggggctccggggacggcgagatgggcaagcccaggaacgtggcgctcatcaccggtatcacaggccaggtgagtgcgggggcgggggcgcgccggccgaggcagcctgggcacgcgtgctctccctacgcgccgctactcgtgggctgcggtctctccaggaacagccctctcggcgtcccggaaggggtctgctgccgggaggtgggacggaaggtacggtgcagttagtgtgttgcgtgtggggtgtgcgggatacatcgagcgcctctggtctttctctgggggctgtgagcgtgtgtgccgcgcgggatgtcgcgctcacacccgggcaggaccgcccgctctcacctgcccctcaggtgaccgcagcgtctcttcctccaagcccatgtcgtgcttcgcagctcctagtgccggaaagggaaaagaaccggtgatcaatgaacttgcgggtgaggtcttcttgatgtgtctcggctcaaggggcgcttacctgctaacgtttgggaagcaagaaaaagggtgctttgctggtttcgtcccctatcaccggatttccagatagaaaagagaacatgaaagaaagtaatgctgtggagtcacctactaggacatgtttaggaaaaagaacttaaaaaactttttaaaatcacgccaacttctgagattcaggttgacacatttggaagtgtatccgaggcacactggtccaaaagtgcggctagttccattttcaaaggaataagttcgtcgagtaaggtaatcaagaggaggtcttcggaatgtctcaggctaagcatggctggtttgtgagggtcgcctcttagaggtgttgcagtaggtgggatccgaccgctgtgtcttaccaagctgtgctgttttagattcagtggtcatgaagtaatcgtgcccacatattgctgtagaaagaatgtgatgtgtgtgctcctgggtatctctgggtggtggccaatataacactgagataaaggtgataatggctaatacatattgtgtctatcatgttccagtcgcttgcctaacattaactcatttagttctcataacaaactctttgaggaggtacttttattatctctatatatgtggaaactgaggcatgggagtttgatttgcctgaggttaaaccgctgggaagtgtccagttggtattgaaaccactctcaaagttctctagtgttagaaagggctaagtgggcaggaggcagcggctcatacttgaaatctcagcacttcggtgtgcagaggtggaaggattgctcgaggtgaggccaggagtttgagaccagcctgggcaacatattgagacgttgtctctacaaaaaaatttaaaaaatgaggcaggcatgttggtgctcacctgtagtgctagctactcaggaggctgaggcaggaggatcacttgagtccgggagtctgaggctgctgcagtgagcaatgatggtaccactgtactccagcctggggcaagagagtgagatcctgcctcaaaaaaaaaaaaaaaaaaaaaaaaaaaaaaaaagaaggagaagttgaaattggccagatgcacagtcacagaatattacacaatttcaagtattgaatacctgatttactgctggttattcatg

SEQ ID NO: 1882246 - DNA, 4001 bp, Homo sapiens
ggtaacttaggtccctggtcatcattcttggatttactggaacctgagattcagctcctttgtaaccttttctccccaggccttcacctacagactctcaaacgttctatgccttgtcctaagctgttggctccagtccagcctctgaaggcctgagcacctggaatcatgattccccatcctcctgagttcatggttcatccgtgtttggaaacctctgtcagggtgctggatccatggactggatcctcttctagactccccctcgcctgagcccaccccatgttcactgttccctcatctccatgagtctctgcaatgctagaccctagcgtacatgctgaaggcccctaccatgtcccacccactcaaggaaggacctaaatcactcctgtgttaaatctgttgatggaagaatagaaactataccatacagggctctctcctttgtgtctttcccataaaggttgtatttgctggcaatgtagttgagaatggctctggtctgcacagcttcatcctgtcaatctcaaccattgacactagctggaacatcaaactcccatctttacaaagaaggaaaaaaaaggagagtgaaatgactatgaatcccactctttcaggatgaaaaaaatggttgtgaaaatgactaaatttgtacatgaaaaagaaattattgcctggtaagatttcacctgaaagtgcgtttttaaaaagcttcctgtagtccttctttttgttaatcagcttccttttactttttatcatgttgtttcatttttgttatttatttctcctccagatacatagtagaactcttgtctttttttgtgttcatttatgttcatggatacttcaggaagatgttgggataggttacaacaggactgccaacacaatgccatttagaatgagaagttcccagaataagcctcatatttgtgacatttaaggcaggttctgagaggtttttatgtaagggtccctttctgtgctcttcaaagcctgcaatactgctacaatattaccttttcacaccccccatgaaagaacaaagactcaagacaatggtcacatctatttctcctcctttcatctaatctatgtccttgagtatccttggatggggaggcctgtatgggatcctgagctgatcaacacagctcattcatggtgcccaaagcatgaaaataaggatagggcattctcagggcgctggggatggttcctctagcaaatactctgagaagtctagttcttttagcctggagagagttgccagacctgatcaaggagccacatcccttccattttaaccactttctccctctccaccttgcccaaataccaccccacacacacatgggcattgcctgctgttcaaaattccttgtgtgccttctattagatacccacatcagaggtacttagagacttcatcttaccatttcttaacttgtccaattcttctgcagattctagaaatttctggtcaaactggagacagaaacagtaaatgagttttcgttagttcattccatagcattataaacttctgactttgaatagcccctatctggtgcatcatttggagaatataagatttctgagtttggcagtgcacacagaggggctggttgtggccatttgtaaatttagactagattcattgggggaatggcatgggtcacagcacatagcttctccgtcttccagttcactgcatctccaccccgatctcatgactatctatgattaagtcatgttttgagaggggatgtcaatggagagatggcactgagcagttcttctacttatggtgttgtcatatcttaggaaagcctgtgtctccaagtgagatcagaccacaaccttgtgtgtccctagcatggggtatgccatgggctaatggccatcaaagattctgccaccaagaggcctcttctgtaatttacctcaccccactttttaggaatcttgctaagtgtgaaataggtcatagctattgcaaagctttaactcttgcaactataatttcctttttctggagtaaatgagacaccatagggtagaatctcaatttaagaaaggaattagagtccccacactaacattatttttaaccaaaatctctggtttctgaaccggttttgtgggttcaatatcaccattttcatatattggcttcttgactttggacacattactgaatctctctgtgtctgagtattctaatctatgaaatggatatacttgtggtacctatggtacagattggtaggttggtatgaagactaaattgcaaagtcatacaaagcacttagaaaagtagcaggtctctagtaagtgctcattaaatataactaattattagaagtttgagagatagctgctatttcagcatgtcatcctttaaaaaaatctaaatcaatctaatattgatgaaactattctttgttattgatctacatccagtaacttaaaccttggagtaaattacaccttgtcctgagacaagagacattggttggaatggcagccagcaacaaggctgtctcaatttgatcagaagctcagagtggatgcaggtatttaatataaataggaaaatcagttgtgacacaacttttcacaaaggtcatcaaaaccttttacaaaaaatactcctgaaaaggcatctgtccagcaactccctgttcaaacttggcctggtgtcacccttgttattgatgtttgcagtgaatgataagtatttcaaaacatttacttaatccttcttattcttttgctttaaaaatctttttcttcctttatctccctaaggacatacatggtttactatggtacacacgtacccattacaaaactttgttcccatataaagagtctctttctgtttattaagttgacacaatatatccaaaagcagctgaatgcacaactcaaactgtcatccaagcacacaaagaaggcattgatgtgagtattaagcagtttttttttattgtactaaggacacatttaaaaatatttttctggtgacctagatgagatggtgtgaggcagtgtagaaagatttataagatcagtacttactttgttaaaggttatcgccctcgtggctcaacaacttaatttgaggtcctaatgtggttgataacctacacgttcatttcagtagctccctcccattgaaaggaatagattcaagttaaaaacagccactcccacatgtttcagggccacaggactgcctactagattctaagaaaaatggcaagtcatcctcttatcacaaggtaactggttaatatgttccttttcaaggttggcaataaaagtttaaccaaaaatttcagcagattttgctctctttataagtcagtagaaactggctttttgaagaaactcacttttcgtgacttggatgtaaggactaaggcagatgagaaatctctgctgggggcatagctgggagggcatgtctgtgaagggcaggctgatggcactctggaagacactgggttgccacataaaatacagggcacccaggtaaatgtgaattccaggcaaaggatcagtcactttttagtataagtatgtcccaaacactgtaggaaacatgtttatactaaaaaagtattgcttgtttatctaaaattctcatttattttgctgttttgtatcttatctgccaaatctggccaccctatttttatgttctttcctctctgcattgctcaaatcacccttcctggcctctgggcctttgcacatggcatttgtcctgactggaatactctactttcacttcctgctgtattttctctattgtgtctttccctgcattaatttgacatgatgtattcaatatcagatttccccttagaccttgagttcttgagagcggagccttcttgtttgagtccagtccttattgtctgggacaaaacatggacatcataggagctcctaaaataagatagtttaaaaatttacat

SEQ ID NO: 1882247 - DNA, 4001 bp, Homo sapiens
ttaaatttccatgagttttaggattagcttgccaatttttgccaagaaatcagccaagatttttgttagggattgtgtagaatcttagttcaatttgaagagtttttccatcttaacaatgttacgtgttctgatctgtgaacataggatatctttccgtttattaaaatcttcaatttctttcaatgatgttttgtaggtttcagcatacaagctttgtacctcttttgttaaagttattcctgtgcattttttctttttgatgctattgtaaacagaattttctttatttcattttctgtttgcttattgctgctataaagaaatacagtttctctttgtatattgatcttgtattctgaaaccttgctgaacttgtttattagttcaaatagtttcttagtggattcattagaattttctatatgcaaaatcacatcatcaactaataggatacttttatttcttcctttccaagctgggtgccttttatttcttcctttccaagctgggtgccttttatttcttattcttgcctaattgccttggctagaacctccttcacaatgttgaatagaaaccgggagagcggacatctttgtcctgttcttcattttgtcttgatgcttcatctgaaaaagaatcagttattttaccattaaatatgctgttacctgtgggttttttgtagaagccctatattaggttgaagaaattctcatctattcctactttgttgagtgtttttttttcatcatgaaagggtgttaaattttgtcaaatgctttttctgcatctattgaaatgatcctgtggattttgacgtttattctgtgtgtgtgtgtgtgtgtgtgtgtgtgtgtgtgtgttttaggctttacttggatcaggtaggcttaaggcaggggccatgctgcaggagaagggcctgtaaaccagtcagtactgctctttcatgcagccctgggacctcagggctgagctccacaggcaaggggcccgttaggcccctcaaagcagacacaaccactaacaggaaggaaggtcaggctggctttagtgcagggaagggtaatgttgggagggagacgttcatgaaggaaaatgggtagctgaggctttaaagggcttggatgggacacgggtttaggggaagtgaagaaggccaataaagtcttgggggtaaagaagggaataaacaggagaaaggaacaagaaggcaggtgctggggtgtagagtccagctgctctccacagcctgggcaacaggctgagtatgggcaactcaatcccacctcctggccttcaaggcactacttgttgccccagacagccatctttgtgaacacaggtctcaggaggaagcagctggatttcatgtaggcagagatctccaagccctcaaatcgggagatgaagtccttcaggtttgggaaggcgtccaaccacttgggctcaaatacttggtttctctcaaggatgccatacgcgatgaaatccacaagtgtgatcttgtccccaagaaacaatagctgcttccccagaaactgtgagtagagcttcagcattgcagggagtgcctccaggtattctggcttcagtttcttaaaatctgggttgtagcagagtctggccagctgcacgtggttgtccacaagctggttctccaaaatgtcttcccaaatcttctccccttctgtctccccacacaggttgtgcttgtaggcaatgcagcccaggatggccttgctctgggtgatcttgtgagccccatcaatcaagtagggcagattgggaaagtccaggcccagcttgaatttttcattcagccactggcttctgtcatagtcaggagcgtcccccatcatgtacttcttttcctcatagcttaagtctgtgtattgcaggagcaggcagacggcgtgggccagccctcagatgtcccagtaccccagtgtcacgggcatggtgctggtcggtgtggattctgcagaaaggcccatttactctatcgatgtggtgtgttacgtcaatttactcttggatgttaaaacaatcttgcattcctgggataaattccacttgatcgtggtgtataatccattttacatgttgccaaattctacttcctaatatttttttgaggattttgcatcttatttgtaagagatattagtctgtagctttcttgtggtgtctttggtttgggtatcagggtaataccagcctcatagaatgagttgggaaatgttcccttttcttctatattttgaaagagtttgtgaagaatttgtatcatttatcttttaaaaattgtggtaaaatacactaatataaaaatttctatcttaaccatttttaagtttacaatttagtagtgataagtatattcacattgatgtgcaaccagcttccagaactttttttttttttgaggcggagtctcactgttgtcacccaggctggaatgcaatggcacgatctcagctcactgcaacctccgcctcccgggttccagcagttctcctgcctcagcctcccaagtagctgggattacaggcatgctctaccatgcccagctaatgttgtatttttagtagagatggggtttcaccatgttagccaggctggtcttgaactcctgacctcaggtgatccacctgcctcagtcttccaaagtgctgggattacaagcacgagcaccgcacctggcccagaacttttttatcttgcaaaatggaaactctatacctattaaacaacctcccatttccccttctccctgctcctagtaaccactgttctattttctgtttctataattaaaaaaattgttttgagacaagatctcactatgtcgcccaatctagagtgcagtggttattctcaggcacaatcatagtgcaccatagcctcgaactcatgctcaagcagtccttctgccttagcctcccaagtacctcagactttagatgcatacctggctttgttcctatgattctgactgctcttacgtacctcgtataagtggaatcgtacagtatttatctttgtgtgattggtttatctcacattagcataatgtcctcaaggatcattcatgttataccatgcatcagaattttcctcctttttaaggctgagtaatattccattgtaggtatacatcacgttttgtttatccattcatctttcgacggacactttggctgcttccatcttttgactattgtgaatattgctgctatgaacaagaaatatatctttgagaacatgctttccattcttttggatatatatccagaagtagattttccagattatatggtaatcctatttctaattttgaggaatcgccatgccataatactatcatagaatagcaccatagtggtattatttcttttttaaatgcttggtataattcaccagtgaagctcagacttttcttttattttactattaattcagcctgtttagttgttataggtatactcagattttccattctttcttgaatcaggtttggtagtttgtgtcttttgaggaatgtgttcatttcatctaaattatattatgtaatatgttggcatacagttgttcatagtattcccttataatttattattattattattattattattttgagacaggatctctctctgttgcccaggccggagtgcagtggtgcaatcttggctaactgcaacctctgcctcccgggttcaagtgattctcctgccaacagcctccagaacagctgggattacaggtgtgcaccaccacgcctggctgattttgtatttttagtagagacggggtttcaccatgttggtcaggctggttttgaactactgacctcaggtgatccacccacctcggcctcccaaagtgctgggattacaggcatgagccaccttgcctggctgccttacaatttttatttctgtgagattagtagtaatgagccctctttcaattctggatttggtaattga

SEQ ID NO: 1882248 - DNA, 4001 bp, Homo sapiens
aggaagaaaaaatgacaagcataaaacaaccccagtcaaaaagggcaaagctaatacaggagcagaaaatcaaactccgcatcttctcacttataagtgggagctgaacaatgggaacacatggacacagggaggggaacaacacacagtggggaacaacacacaacacacaacacacactataattttctgtagggggttgaggagagggagagcatcaggaaaaatagctaatgcatgctgggcttaatacctaggtgatgggttgataggtgcagcaaaccaccaccacacacgtttatctatgtaacaaaactgcgcttcctgcacatgtaccccagaacttaaaatttaaatcaagaaaaggcaaaggacatgaacagatattttctcaaaagaagacactcaagtatatgaaaaaacactcatcctcactcatcatcaaataaataaatgcaagcaaaaaccacagtaagatgccaactcacatcagtcacaatagctataattaaaaagtcaaaaaattagatgttggccaggctgcagagtaaagggaatgcttatacaactactgttggtggaaatgtaaactggttcaggcactgtggaaagtattttggagatttctctaagaacttaaaacagagatacccttcgacccagcattcccattactgggtatatattcaaaggaaaataaattattctaccagaaaaatatatatgcactcgtatgttcatcagcatgttattcacaacagcacagacatggaatgaacctaggtgcccatcaacggtggattggataaagaaaatgtggtacatatacactatggaatactatgcctccataaaaaagaatgaaattatgtcctttgcagcaacatggatggagctaaggacataatcctaagcaaattagtgctggaaaagaaaaccagataccacacattctcacttataagtggaacctaaacattgagcacacaggaacattaacatgggaacaagacatgctgcaggctatgggggtgggggagagaggggagcatgggctgaataactacctactgggtactatgctcactaccagggtgcactgtacaaaagtaacaaatctgcatatgcactatctgtgtctgaaaaaaattgaaattataaaaaccaagagaatatgtttctaatgaatgtagactttatttgatggactggattagaatataatatttttttaaggggaaaggcattgggggatgcacaatgtctacaggtttctaaatctctctggtttctcacctaattcatagtctcttatgtcattctcatagttttcatattctgcctttccacctcttctttttaacaagtaaaattcctcatagcatacaaaaaaccaattttataaaaaacccctattatagatcagggacctgtggattatatgctattagaactacacaaaatgtctctgtatagttttctgtatctttggaatatctttgggtgaagctgcagaccttcttggtgagtgttacagctctgcgcagagccaaacagtgagcagcagcaagactgcaaagagcaaaagaacaaagcctccacactgtggaaagggaccccagcacgttgctgttgctggctctggcagccgcttttattcccttatctcaccccacccacatcctgatgattggtccatttcatagagagctgatgggttcattttacagagagctgattggtctgtttacaatcctttagctagacacaaaagttctccaaagtccccactagattagctagacacagagcactgatgggtgcgttcacataccttgagctagacacagcatgctgattggtgcatttacaatcctccagctagacgtaataagttctccaagtacccaccggactcaggagcccagctggctttgcctagtgcatcccggccgcgggcggagctgcccgccagtctctggcgcgctcccgcactcctcagccgttgggcggttgacgggaccgggtgccgcgtagcaggaggtggcgcccgtcccctcggggtggcgcgcgggagcccgcggctggggggcggggggcaggggacgggggcggggagcagggtgagggctccagcatggcaggctgcaggtcccgagccctgcccccttgccccgcggggaggtggctgaggcccagcgaaaattcgagcgcggcgccggcgggccatcactgttgggggacccagtgcaccctccgcagctgctggcccgggtgctaagcctctctcactgcccagggccggcggcgccagccgaccgctcagagtgcggggcgcgccgagcccgcgcccacccggaagtcgcgctggacctgcgagcaccgcaggcagcccaggttccggcccgcgcctctccctccacacctccccgccggcagagggagcccgctcaggcctcagccagcacagagaggggctcccacggtgcagctgcgggctgaagggctcctgaagcgcggccagagtgggctgaggccgaggaggcgccgagagccagcgaggggatgccagcaagctgtcacctctcagaaatacaggaagaacatcaataatgttcgaagttataaagtaggtttctatcaagaataaaacataaacgatcaaagaattccttataaaaacattttttatttctaggaagcaaaacgtaaatataaaatttgagagtccaccaaaaaaaattagatgccagatttcactataattatcagggaagcgcccaaacgggttgtttacggcgcctcggggaaactttctgtttcgtgttaagggtcttgaaccatgatgtttagaaaaccgtgggctgatgctttcagaacctctgtgattgttgcctctgacactgcatccaatagactagcatgttgattagggaaagctaaattcaataaaatacgactgtaagtggggtcaccaccttgaggggttatgttagaagagtagatgataaggtggtatcgatagggtattgacgtctgggctcacatggttgcccggggcctttcaagaccaatgactgataagaagaggtaatgttcaggacatagagtttaggattgggggacactgtgagttaagggccatgacagaagtcttcataagtaaactgttattgacacaagctgctacctgcccaggtgagcaatctgttggcccagaggagagttgcttactgacataaattgatttgcagaaatttcctgaagcaaacaataagttatttattggtttgcagccttactttcctgaaaaataattttctggaatgaattgtgaaatcatgttgacacagatggcctcaggtttcagttcggataattaagctgtgtaaatatagaaagtctaaggtttctgtgtgctgttgattcacagtatgcaacagtgatcatattacttttatttactatgagcttcagctgaaaagtccaaaagaaactttaatttcagatatttaatgaaatcattatagctgtggtaatttcctttagctgggtgtgagtgtgtgatgtgagcgtgtgattgtgtgtgtgtgtgtgtgtgtatgtgtgtgtgtactctggcagcatattccaaatttctgtaaaatttcagtttgaaattaatagaagacatattaaattgtttaaactctttgttatttaacttctatattactttagttgattactctgtattattacggcaaagctttgatatgttgccctgaatttaaatgaaaaggctgttcggcataaaaacaggaatattttattaccaaaaagaattaactaccatatgtcatttacagaaaagagtaaattcttcagggcatagaaaatacacatttccttctgtttgtgtggaaataagcaaaatacctgttataatagattcctcacagaattttgtgaagcttcaggtaaacttgaaagagaaaaattaaaatgctagagtttcataa

SEQ ID NO: 1882249 - DNA, 4001 bp, Homo sapiens
tagttggcccttaaaggcaaagatgcacaacagctatggcagaagaagtcagagagatccaatgtttgagaagaatttgaggcattatagttggcttgaagacgaaaggggcaacatgagaagtaatgcaggtactttaaggagctaagagggaaacagaaatctcagccctataacaaggaactgtatgagcatggaaacattctcctcctcccccagtaactttatcaaaactcttaaaaatttcccctctttggcacaaacatatggacacctttctcactccagagtaaaggaatgatgtactaaaatgaaggatttataccgggtggggtggctcatgcctgtaatcactttgagaggctcaggtgggcggattgcttgagctcaggagatcgatcagcctgggcaacatggtgaaacctcgtctctaccaaaagtataaaaaattagccaggtgtggtggcacatatctgtggtcccagctactcaggagactaaggtgggaggatggcttaagtctgggaggaggaggctgcagtgagccaagatcgcactagtacactccagcctgggtgacagagggagactccatctcaaaaaataaaaaaatagaaaaggctgggcgcggtggctcacgcctgtaatcccagcactttcggaggccgagacgggcggatcacgaggtcaggagatcgagatcatcctggctaacacggtgaaaccccgtctctactaaaaatacaaaaaaaattagccaggcgaggtggcgggcgcctgtagtcccagctactcgggaggctgaggcgggaaaatggcgtgaacccgggaggcagagctcgcagtgagccgagatcttgccactgcactccagcctgggcgactgagcgagactccgtctccaaaaaaaaaagaatgaatagaaaaactacagaaccagtatgtgtgaacacaacccaaggccaatatgtgtaagtctactgtttaattactatcatagaattaatacacgctggtcaaaagagaacaagaagaccttgagaaaaggttcagggaagttagaatcccaatgtttggatgaacagcatttataattttaaaatgcaaaataaagagaaatcatttctcatgtatcagtctactaaagttttgttttcattttttaaataattttctttttaaataataatacctactctgtgttggtacggatatggtcaaaatggcattcttaaattctgttaactttggtataacctgaaacaagttttttgatgggtattacggcagtaagcatcaagaagctttaaaaggcacatacccaatttttcagctttttaagtatttatacttctgaataaactaggctctcttttagaaatctaccctacagaattacatatttttaaaaatcctcgtacaaatgctgttatttacaaaaatgttcattttagcattattggtgacttaaaattagaaaaatcctttctcttcctctctctccaggactctcataactgtcacctgagttggttccaacggatacgcagaatagaagacaaatgggagaagaatattgacaaactgcaaggtatgcacccgagctacagtaattccgagttgacagctcgatctcccctcccactctgcggctcttcaaacctctgcaaaaggaagagggtctctgcctggggcagtcactcaccgaaccccgaaccccgtgaagcccatggtgaccacaagctgcgggtccggtcccgatgcgtctgagcctgtcactggagcaagaggaaaagagaggcggcctagttagtgcggcgccccagctcccccgacacggcccaccccgcccggactcgcttcatgaaacccaccttcgctgggcccagagcgctccatggctggccgcacaccgcagaaccagccacagcgacagcccaaacaactgcaggggaacttgccaataactcgcggcaaatgctggaggaagtaccgcctccaagctacagcggcgccgccgaagccaagagcggcgccttccgcagagggactgcggcttcctgcgcagcgccccctaccggacaggcggcgggaaaacgccgcgcaactcagaccactggagcggagtagtatctggagtttctgtaacatcctttccctttttttttttttttaaagccagagcctctgtcgcccaggctgcagtacagtggcgtaatctcagctcactgcaacctctgcctcccgggatcaagcgattctccttcctcagcctcccgagtagctgggattacaggtgcccgtcggctaatttttggttttttgttttgttttgttttgttttttttgtttttgtttttgttttgaaacggagtctctgtcgcccaggctggagtgcaacggcgtgatctcggctcactgcaacctccgcctcccgggttcaagcgattcttctgtctcggcctcccaagtagctgggattacaggcgtccaccaccaggcgcagctaattttttgtatttttagtagacacgaggttttgccatgttggccaggctggtttcgaactcctggcctcaagtgatccgcctgcctcggcctcccaaagtgctgggattacaggcgacaccctttgctttttttttttttttttttttgaggcggagtatcactctgttgcccaggctggagtgcaatggcgtgatctcggctcactgcaacctctgcctcccaggttcaagagattcttctgcctcagcctcccaagtagctggcactgcagacacgcaccaccacacccaggtaattttttgtatttttaatagagacagggtttaaccatattgaccaggctggtctcaaactcctgacctcctgattcactcatctcggcctcccaaagtgctgggatcacaagcgtgagccatcgcaaatacaaatattcattaaacgtataggctgtctacttactctatgacctttctacctagactaaagccaaaaaactctgacaccctaaaagattcataaattatttactacataaggtttagatgcatcattaccaatattgcacatagaaatttaatgttgttagttgagcaaacagatgccatgactatttcttctctttataaatcttggtggcttatggcagcagaagcctactccactatttaggctcctatgacagctacttttcccctgttgagaaagtttcaccttaagttgctaccaaaaaaattatacaattaatgtattttgtaactcctgaaaataattgtttatattatcatctcaagtaaaataaaatattttcatagagagatggagagatgtgtaggcaatttatcaaatattaacctcttcctaaacatggggttgaattcctcccgtaacattgtaacgttgttagaattatgtgaaagggggctttgtctcaactatcctgctagtcattcattcaacagcaatctatttatgttgtatgtttccctaaatgtttccatttttgcctccaaacactgctaatttggtttggttgctatttattttatactgtcttataaatcccctggaaagtgtattgccccatgcctgcacacactgcagtacaagagtgtactgaagtacataatggaagggttggttttttctgccactccatcgcttgagtttaaataataaggaaacacagagatctaaaacattttgaacagttaagaattattaaaagaaagtagaatgacaaacaggaaaattatctatccacatctatatatgtatatctttctagaaatgtcctataaggacaaaagaggaaaaaatgaagggaaaattatgaacccttgaatatgagtccttctgagcaaaactctgttcttagcatttctccactattatcaagtttctagtatcctccaagaaaataccatattatcatcctggaactttggtagtatatacctgtcctttctatccctatctacagagacctgtct

SEQ ID NO: 1882250 - DNA, 4001 bp, Homo sapiens; identical to SEQ ID NO: 585224

SEQ ID NO: 1882251 - DNA, 4001 bp, Homo sapiens
aaaatgtccaagtatgaacacactagcatattatcttttgcaatttcttccctcccacctcctctaaaccattgagcaagtatagacagtaatatactgctcacaaaggtggcttcacaattcaacttccaaaagtatttcctatgaattttagcaaaaagatatttacaaattggtattttactacctctacatttaatatacatcgggcacttctaaacatctagatagtctaaatgtttcaagtaaggagttaatttgtccactatgtatgtacacagcagtctcgaataaactgcaaacatgtaacaacagttataatttgaaagagtcttccaaatgtgaacattctggcctagaacccttcccatctccatcaacccagtgggcaagaatgctcaaattttcagaagacagtctttcctaggacttgtaaaacaaaatgtacaaaatatattagtttactaactctagttttgttatacactggcaacctctttaacatccagaaagactagatgttgtaaattaggactcgtttgtcctttatgtacattatatacatagataaaacaaaatgcacagacatagtgattcatcttgcctcgctgtaagcaggatggcatagagctctctgcacctccccctcctctctcctcccctgaactactgcacaaacacaatgagtattactcaacaggtgatttggccattccccccaaaaaacaacatttctatgaattgtaacaaaaagatatttacaaaatgtggttttactacctctaattttaacatatatcagacacttcagaatatctaaaaagaatagacatttcaaaaaagcttagcattgtcaactacatacatagtagtgaggaagcgaatgcacacaaaacaatggatagaatatgaaaatgtcttctaaatatgaccagtctagcatagaaccttctttttttccttctcaggtcttcgagctccatgtcatctaacccactgaacaaacgtgaacgtatcgcttctagaggccgtctaacaactcagtttccaaaagtcaactccggaagacatgtattttctatgatttcttttaaacaaatgagaatttacaagatgtgtgactttctaactctatcatacgtcggcaacctctttccatctagaagggctagatgtgacaaatgttttctattaaaaggttggggtggagttgagagcagctttttcatattatatacacaggccttccgtaaacggcctgtgaatcttcccagaggatggagggcatttccaacgggccaaacgtggcctgtcattctaccatttgtctcttccgacagcaaggtctggtagtacggagaccaaccgcccgatcgccgctaaccgttccacccgtcgtcgttcgggacttcgctcacctcccaggcccgttaaggcctttgtccgttgtcgttaggactaggtaggtctcgcccaatggcgacagagtggtcacccgggacccagatctggcggctccgtggcctgaagaggcggccgagcctgcctgcgtccctaggccgccttcccgggccctccatgccctaacgccctccgccgcgcggcgttcgagcggccgccatgcttcccggcacgctactcccgccgccacccaaaggcgctgcgtccaggctgctcggcgggggtttcgtccaggcccggcaggcttgggccgggagacccgacggccggcagggtccggactgggagaggccgccgccgccatcagtcaccgaggtagggtagggaagagacgttcgccaccgcttcaaggcctgggcccagccagtgggcagccacagcagaggcctccggtatctgcagggcagagggcgcggcctgtcccggggcgccccctagctcacccgccgacccggggccggagggcctggagcgccctggaggagcggcccgcgctctgcgtctctccgcgctctctgccagaccggaactcttgcagtgatttcttacggggagtaaggatgaggtggggaatgagactgaagaaatggaattaaaaagataactataactaaataaagaggagccctgcagtaatgtaatgagccatgaactgaagagtaacatttattcaactctgcctgtgaaggagggagagggaaagacaactagagacagaggagaaacggaaaaaggaggtgagatttcaaaacaccggtaggttctgaaattattttcggagtacagagtactttttgctgtccttggagtggctaataaaaacaaagagtgcttttattccggaactcggaaaatttattttttaaaaagagagaagaccatgtcacaaagagcaggtaggaaaacgtagcgtaaacttaaactcgatttgtgtctaaatactaaaagtacgaactgtcaggagtgggattcgaacccacgcctccaggggagactgcgacctgaacgcagcgccttagaccgctcggccatcctgacgcgcttatgctacattgtgctcaggactcacttctgtctcttgtctaaacgctattagttccccatccaccagccgcccccctaccccatgtccccacccccgcccacccccttgttgttctttttctcaagatatgggcattcctgggttaaaaggtaagccgcctctccgcgaactgcctcggacggcgctgcataggaccggttgtccgggccacagagcggcgtctcccgagtgaacgccgagtcactcccaggctgcgcggggagggctgcggcgggtggggcggcgggcgagggagggcgggtcggggtagggggagcgggacgggggcgggggcgtgggaggggcggggcgggcgtgggaggggcggggagggggcggggcgggcgtgagccagcccagggccgagtgactaaggcggaagacggcgatggcgctctgctctcaactgaattctagttaaaataatggcaatcctgttgaactcaacattactagaatacctggcttaaatttacacttaattcccaggaagttttaggcttgctccagtttttgctggaacaaggtgctcgctaatccttctcctttgcgttgtgctgcaaatctcccagcacgtggttacccttggcagggccggtggaggggacaggagcgtgggaagcctggcttgtcttgcctctctgtcggagtttatggaggatttgcgcacttttcggtgtggatgttatactgtaataaaaactttaaaaagcaaaagcaaaaacagcaacaacaaaaatggggagtagcttatgtattttactaaacctggcgcagcgggtacttgatagaaggccttgagcacaacaacttttctaaacataaacaaaggtcagaggtgacctacttcaaattttgttagcaagggttagcagtcaggatgccatggtcggaatatcactgactggaagtcaggggacctgagtacgaatttcagacagaactagaactggtcactacctggagaatcttagataagtcattttgcttctgtggacattagaaacagctttcttagacacctataatactttcatcgtgagttcaattgatagaatacaatgtttaatcccttaaattaagcattaaatccccatctccagggaatcaattagaggcaaattctgttcttctcaggcctaccgattcagaagttttgctatgtccaacatggtgactatagttaataacaacgttattgaatacttgaaaattgctaagagagtggattttaaatgttcttgccacaaaaagaaaaagataagtatgtgatgtaatggatatgttaattagcttgatttagccttcccacaatgtacacatagaacaaaacatcattttgtacatcataaatatatatatctttatttgttgattttaaaaatacaaataagtaaattaaaaagttatgaggatagagtcccacagtaagtgtttaataagtcctctgcaaggc

SEQ ID NO: 1882252 - DNA, 4001 bp, Homo sapiens
cacttgaacctgggagataggttgctgtgagctaagatcatgccactgcactccagcctgggcaacagagcaaaactccgtcaaaacaaacaaacaaaaactggataaacattgatgtaggccgggcgcggtggctcacgcctgtaatcccagcactttgggaggctgaggcgggcggatcaagaggtcaggagttcgagaccagcctgaccaacatagtgaaaccccgtctctactaaaaatacaaaaattagccgggcgtcgtgacgggcgcctatagtcccagctactcgggaggctgaggcaagagaatggtgtgaacccgagaggtggaagttgcagtgagccaagtcgtgctactgcactccaccctgggtgacagagcgagactccgtctcaaaaaaaaaaaaaaaaaaaaaaaatttgatgtaatggtttcacttttagaaatttaaggaaataatcgtggatgtttgaaaatatttatgtaaggatagtttttacagcattgctgatgaaaataaaaaattagaaataatccagttttcaagaataccactttgatatggaatatgtgcaggaattaagatttatgcaaaatatagtacttagcaagtatatattcataatatattcatttagaaagcaagttagcaaattatttactacacatgaccatttttggaaaatgtataccatatgaaagactaaatatataaaaatgttaatagttacctctgactagtgagattatggatgattttaatttttgacatgtttgtatgttctacaatttgtgtgtactttgcaattagaaaaaaataattatagttagggtaagattacagttgccatgttgggaatcacttcctggacaatttccttccaatcgaaagaaaatatacaaatctcatgtattggagggagactggggaaccagtgttcactgtacttctcactactaattttctctctatcaaaaataggatatgaaaccaaggaagtctgtggaaattaagatagagcctactgaaactcagttatttctccatgcagaaaagagacctaactttgccttacaaaaaggaaattttttttatattaacaaatacaaaaagtaagctattaggacaaaatctaattaaaatatccaactttatatttcctctatctgaacctcacagccccaaatacaagagttaagacggttgagttaaaatgtatttattgaacctctaccgtgtttgccaggcactgttacctggacggcattggtctacacatgttattttagcggtgtcgctggcctctaggggctcttgttctagtgggagggatgatttctgtttagtttcagggctccattaaaatttgtgaccttggggcttcccggcctggagctcagattgcttggcgaaggctgagaaacagaaaagtggatcaggcgatgtggtgcactccccttaaaaactaccgctgtgttccccgacctggcagtggtcacttggagcccattaatcgggaacatccgagagcgacaaggaaggccgcgggcgagcgcgtcgctcgcggagtttccccggacctgggatcgccgatccctcggcgcggacaccagccttgcccatgtggtggtccctgtggagaccttcccagccgttcccggctaccacttttagagcccaagacaaacttcgacgagtggcaaggcagtgacaaatggaaccaaaatagaggggctaaaaggggaccttcctatagaaccggggtcttttgttagggttttgttttgttcctcaccatcttccaaacaatgaagtcctgggggaggctaaccacgatcaagatttcagtaaacatcagacactggagagccgacccagcgaccgaagaagcaaaagatcttctttccttcctgaaatctgggcaggctgggagcaaaaaaaaaaaaaaaaaaaacccgcacacgtttttcgagatggcgataacagttataaggcccgtaagagacttgatccagttttatgcagaaacattttctagtcctgcgaacccttttgctttttcaatccacaagtggctttctgcccttctgttaccaagcaaccctgacgtcatcgcgtttctgcgtgcgtgcacgacacagaatcattgcttgttgatctctattttagtgcaaaaatcagggctgttatgcagtgtgtcaggatggccgagtggtctaaggcgccagactcaagctaagcttcctccgcggtggggattctggtctccaatggaggcgtgggttcgaatcccacttctgacacatacttttctttttcctctccttactttagagatatcctgatctcagcagtaggcataaacaattaccaacgtatatttttaagaatcggcttttaggtaccgggcgcggtggctcacgcctgtaatcctagcactttgggaggccgagacgggtggatcacgaggtcaggagatcgagaccattctggctaacacggtgaaacctcgtctctactaaaaatacaaaaaaaatagctgggcgtggtggcgggcgcctgtagtcccagctactcgggaatgaggcaggagaatggcgtgaacccgggaggcggagcgtgcagtgagccaagatcgcgccactgcactccagcctggggacagagcgacactccgtctcaaaaaaaaaaaaaaaaaaaaagaattggcttttaaatttatctcaaagggcttgtccaaactaaaaacattaaaagcggaagcatcgcgatatttttacgaagccgcgagatttgggccaaaaaacgcctaattaaaggcagaggttactagcgattggtctctgtgctgcagtgcgagataatcctgatgtcgcgggattcggaacgcagatagcttcctgcctcgccgagggaatggagagaaggggctctgggcgggttcttttcccgcttctcgaccaggctcacactctgtgtctcagatccaagccctcccctagatatttcctggagcactttcctaccaatctcacaacgctgtggctcgtgacagtgcagtctctttaaaaatcttacacaggtcctctgctctcctattttcaaaactcatgtaaccagttctcaaaaatgtctttcgtaaattatgcacattcacactcgttttggcatctgatcattaccgttttgtcagtcaaaattgagtaccattttaaccattgaatgaaatatgaaagctgtacgttcctctcgcaaatgtaatcaccgtgaaaaatttattgtattttttacatttcttttttctctgcattcgcatatatatataacattttgttttttttttttaacagaaatgtagtcatgctatgacatttttcacttaatatatcttgggttctttccatgtggaacacttattcttttcttttacagaagaaatattgctggccgggtgcagtggctcaggcctgtaatcccagcactttgggaggccgaggcgggcggatcacgaggtcaggagattgagaccatcttggctaacacagtgaaaccccgtctctactaaaaatattaaaaaatacaaaaaattagccgggtgtggtggtgggtgcttgtagtcccagctactcgggaggctgaggtagaagaatcgcctaaacccgggaggcggagcttgcagtgagcccacattgcccgctgcactccagcctgggcaacagagtgagactccgtctcaaaaaaaataattaataaataaataaataaataaataaataaataaataaataaaaccctatggtaggcccggagtggtggctcacgcctgtaatcccagcactttgggaggccgaggcaggtggatcacttgaggtcaggagttcgagaccagcctggccaacatggtgaaaccctgtctctactaaaaacacaaaaattagctgagtgtggtggcagatgcctgtaatcccagctactcaggaggctgaggcaggaaaa

SEQ ID NO: 1882253 - DNA, 4001 bp, Homo sapiens
tatttaaaatttgtttaattacatcccattattacagttcatttttgcatattcctgtgttgaaaatcctttggtataaatcaacatcaaaactcggtgttattccacttttcttgaactgtaatcctttttaaacaaggaatataccttttcttgtttagagaatatacgtacattcataaatcttggcaactttcaaaggccataacaaatttgtgttaagaattcagatcccctttattattgtggtaaacagacagatgaaattaagagattatagcttgttttcactctctcccaattactatcgcttgaaaaataccggatatttcattattatcctgtccggagtcggcaaactacggtctactatctgtcttcgtatacgtcaaaagctaagaatggtttttacatttttaaatgactggggagggagggccagaatccaaggggagtatttaatgacacttgaaaatgttattaaattcaaattttagcatccataataaagtttcattgacacacagccatgctcatttagcttttgtttgtttttggagacagagtctcgctctgtcgcccaggctggagtgcagtggcgagatctcggctcactgcaacctctgcctcctgctttcaagccattctcctgcctccgccttccaggtagctgggattacaggtgcgcgccacacgcgccacacgcccggctaatttttgtctctactaaaaagtagagacagggtttcgctatgttggccaggctggtctcaaactcctgacctcaggtgatccacccgcctcggcctcccaaagtgataggattacaggcgtgagccaccgcgcccagccttcatttagtactgtctaatgatgttttcatactgcaaggagaaagctgagtatggaccacaaggccaaaaagatgtcctctctggctctctacagcaaagatttgccaagccctgttatatgtcatactacttgcgcttcataattttatagttttacctagacagtctcccttttttccttccatattcagcataaaatccccttaatatcagtctctaggcaagcacattcttcacagtccttagaactggacctcctcttgttaatttccttagtctaatcacattcctcctggttatctacaaacagaaagccagaaaggagggctatcaacatcttaagcgccacaaattaacaaatcaaaaccaaatctctctctccctccgaagccacggctaaggaggctcactgcccagttagtggctttcaaactacccttacaagtgagacatcttgtgaattagaacaagtgctgctgctaaaatccctaacggctacatagcaatgtgaaaaaaggtatcaaatgtaattttctcaaatttaatcttcttcaattcttggcacaaaaaaaggaacagtaaaggtagacaactgtaattagcatgtgtgatcccaaatctttataccttagatactggattatattttcagcaagtaaatagtttctggctcccaagatgagaggttaaataatgcagggtgtttgtaaacagcagcacaatttacaccggaaattagggccctttctcaccgaggagagtacagcaaaatctgctcatctctttcaatgaatattctccatgactagtgctggcggcggggaggcggagcaagctatcttttctaccagccgtgtcacacccctcctagcactaacccctcctcctcagccttttcacacctctacccactactagcccctccccagccccatcacctcttcccgggcccctcacacctctcccagcatactcttccccagcctcatcacctcacccacttcctccaaaatcactgacctgctaagcttccagcagcaggcgggcaaagcagggaggctgtaatgcaaaagtccgcagtccctacacaaacactatctgctcctgcggagaaactcaagtcacagccccagaagtggaaagaacaggccttggctctcacccagttaacaagcgtttatccagcgcacgtgttgcggtcggaccccatgcgaaggagctaaggacacaaaggtgagcagcagagacgcggttccagctctcccccggctcccactccagcgggataggtagataatttcggtaaatttcgccaagcaggggcaggacaaagagtatttgaagtctaccgcggggagaacttacctaatccttgaatgttaaaaggctaaaaactccactagtcggaagtgacgtgccagcttagccccgcaggtccgccacgtaattggccgccgccacagctagccaccctctccccagactggcccgaagagaggaaaagtgtggaagtccacaagccgcccccgccccgccctcttcgtcgactttcagctgcaccgggaggcggcggcgcctggccagagccggggcctggagcctggactagacagcctcgccggccggggcgccagtccagcgccctgcgggcaatgggcttcagcgctcgagcacgcgcatgcgcgggcctgtatctccagaggattcctcgggtcacctggacgccagcatctcagccacctgcccctctgggtcccttcttgcccttgattccccctgctgcttctcatcgccagccctcctcctccttcttccgcaggcaccgctagacccggccgcggccgcccgccgacaccccagcttccactgacacgagcctcggcgcggcttccgcttccggcgagtattgtgtgtcgcgccgcggggcgggggcgaggggaggaggaaggagggaggcagcgctccggcggctccgcgccccgcactcccggacccgaagccgggaaggtaggtgctgtcccgccgccgcgcccgagcctggggcctgcgctcgccggccggctccgcaagccgcgtcccagcgccccgcgactgcgtcaccggccccccgcacgtaaccacagctgcctccgcccgcctcgggcccgggcggacgttttgccgccccggcgacgtcagcgcgtccggcgttgcttggctaccccgccgttcccccgtcccgctgctgctcacctccccgggtgaaactctgacgcagtcaccgcgggtctcggcagcgtcatagcggcgggcatcccatctgcacgtcacacctctttctcacctggacacgcatcccttcctaccctgccagccacgacgtttcctctttcccctctccaatgccccagccccagatctggcggaagaagatggagaacgggggtgggacagagttgtggacaacctctcaggagagggtcgcaaggtgggaccctgaacagtggtagaaacaaaatgagattgtccctgaagtttgcccttcagctgagacacaaggagtagaggaagaggaaggactaacgcagaggcactcaaggtctcactatgactgtagttgagagtcctctcccttcttccctaaccctttccccatttctctcaccacttctttgccagtctagatccgtcctggtgccttactgtgcatacagttctactcgtctcaggtgaggaggccacttaatttgtaaaagactgaggaaggggtaggatcaccacaagtcaaagttggattcccacagatagaaatcatctgactgaacttctctcctattgctgacagaagaaattcaaatccaaagaagttatcagttcctactccaaatcaaacacatttgtgtgtgccaacaatatatacaggaacaattgttgttaacctacctcattacatggccacttatctctcagcacatagatctaccaaatttccttccttccagtaggtccctggagaaggatgggggtcgggaggagaaaaggttatggggatagttaaatcaacttacccatggctaaaagtatggatgttttaaggatggagtagggggccagccttgtgttttataaatctctcctatgcatttccaattcttctgaggctgcgct

SEQ ID NO: 1882254 - DNA, 4001 bp, Homo sapiens
cccttttttccttccatattcagcataaaatccccttaatatcagtctctaggcaagcacattcttcacagtccttagaactggacctcctcttgttaatttccttagtctaatcacattcctcctggttatctacaaacagaaagccagaaaggagggctatcaacatcttaagcgccacaaattaacaaatcaaaaccaaatctctctctccctccgaagccacggctaaggaggctcactgcccagttagtggctttcaaactacccttacaagtgagacatcttgtgaattagaacaagtgctgctgctaaaatccctaacggctacatagcaatgtgaaaaaaggtatcaaatgtaattttctcaaatttaatcttcttcaattcttggcacaaaaaaaggaacagtaaaggtagacaactgtaattagcatgtgtgatcccaaatctttataccttagatactggattatattttcagcaagtaaatagtttctggctcccaagatgagaggttaaataatgcagggtgtttgtaaacagcagcacaatttacaccggaaattagggccctttctcaccgaggagagtacagcaaaatctgctcatctctttcaatgaatattctccatgactagtgctggcggcggggaggcggagcaagctatcttttctaccagccgtgtcacacccctcctagcactaacccctcctcctcagccttttcacacctctacccactactagcccctccccagccccatcacctcttcccgggcccctcacacctctcccagcatactcttccccagcctcatcacctcacccacttcctccaaaatcactgacctgctaagcttccagcagcaggcgggcaaagcagggaggctgtaatgcaaaagtccgcagtccctacacaaacactatctgctcctgcggagaaactcaagtcacagccccagaagtggaaagaacaggccttggctctcacccagttaacaagcgtttatccagcgcacgtgttgcggtcggaccccatgcgaaggagctaaggacacaaaggtgagcagcagagacgcggttccagctctcccccggctcccactccagcgggataggtagataatttcggtaaatttcgccaagcaggggcaggacaaagagtatttgaagtctaccgcggggagaacttacctaatccttgaatgttaaaaggctaaaaactccactagtcggaagtgacgtgccagcttagccccgcaggtccgccacgtaattggccgccgccacagctagccaccctctccccagactggcccgaagagaggaaaagtgtggaagtccacaagccgcccccgccccgccctcttcgtcgactttcagctgcaccgggaggcggcggcgcctggccagagccggggcctggagcctggactagacagcctcgccggccggggcgccagtccagcgccctgcgggcaatgggcttcagcgctcgagcacgcgcatgcgcgggcctgtatctccagaggattcctcgggtcacctggacgccagcatctcagccacctgcccctctgggtcccttcttgcccttgattccccctgctgcttctcatcgccagccctcctcctccttcttccgcaggcaccgctagacccggccgcggccgcccgccgacaccccagcttccactgacacgagcctcggcgcggcttccgcttccggcgagtattgtgtgtcgcgccgcggggcgggggcgaggggaggaggaaggagggaggcagcgctccggcggctccgcgccccgcactcccggacccgaagccgggaaggtaggtgctgtcccgccgccgcgcccgagcctggggcctgcgctcgccggccggctccgcaagccgcgtcccagcgccccgcgactgcgtcaccggccccccgcacgtaaccacagctgcctccgcccgcctcgggcccgggcggacgttttgccgccccggcgacgtcagcgcgtccggcgttgcttggctaccccgccgttcccccgtcccgctgctgctcacctccccgggtgaaactctgacgcagtcaccgcgggtctcggcagcgtcatagcggcgggcatcccatctgcacgtcacacctctttctcacctggacacgcatcccttcctaccctgccagccacgacgtttcctctttcccctctccaatgccccagccccagatctggcggaagaagatggagaacgggggtgggacagagttgtggacaacctctcaggagagggtcgcaaggtgggaccctgaacagtggtagaaacaaaatgagattgtccctgaagtttgcccttcagctgagacacaaggagtagaggaagaggaaggactaacgcagaggcactcaaggtctcactatgactgtagttgagagtcctctcccttcttccctaaccctttccccatttctctcaccacttctttgccagtctagatccgtcctggtgccttactgtgcatacagttctactcgtctcaggtgaggaggccacttaatttgtaaaagactgaggaaggggtaggatcaccacaagtcaaagttggattcccacagatagaaatcatctgactgaacttctctcctattgctgacagaagaaattcaaatccaaagaagttatcagttcctactccaaatcaaacacatttgtgtgtgccaacaatatatacaggaacaattgttgttaacctacctcattacatggccacttatctctcagcacatagatctaccaaatttccttccttccagtaggtccctggagaaggatgggggtcgggaggagaaaaggttatggggatagttaaatcaacttacccatggctaaaagtatggatgttttaaggatggagtagggggccagccttgtgttttataaatctctcctatgcatttccaattcttctgaggctgcgcttgagggagatctcattgcctcttttgtgtctcttaattcgcaaccactccaggacctataagttggagacacactatgcccagggtgttagttatcaatagctatattgaaagattccagtcactacaaatagactcgttgctctcttttcaagaagtcgttggcctgagctcagcaatatttaatatggttgccataatttatcagttttcagcagttctgagtgtccagatgaacacaagagaaatggaatgttgcgtgaaatgtcattccaagaagagagcagatttcctttaggctagtctgatggataaaaggaagaataatttcagattttcctgaaaagaggaggttgcctttgcctcattcattccatttgttagcctttagagcagtggtatctaaccctttcaatatgaggactctctttgcttatctgtggtggctgataaaaattatgcatggaccttctgtggtggtgatagaacaaaagttatgcatggacttttttttttttaagcttatcagctgtcattagtgtcaatgtattttatgtctggcccaagacacttcttccagtgggcccagggaagccaaaaggttggatattgtgatttagaagaatgagagaacagtgtcagagaatcaagcttagactccagtggattaatcataaagctcttataacattaaactttaaaatatggttaatttaagaaatgttaatatttttatgacttttttacttctcagattcctttcttgtctgttagaaacgtatgtcaaacgaggatacagtgtctggaactattggttctaagatataagtggaatgagcctggatcaggagaagtatgctgagctagagttgaaggaagcttctctttctaacaagagaaagcagaggtaagagacaagatagatcaattgggggttgtgtgtcagtttactaacaagaaaaaaaaggttgatggctgggagtcacaagttttgaaaatggagaaacaaagaggttgaattga

SEQ ID NO: 1882255 - DNA, 4001 bp, Homo sapiens
gaatacatgtagcttacatggcataaattttgaacttttggtactctgcccaaatctagtcatccctccctactgctgacgctccacatttttctaatagggttcaagtcttccttccttccttccttccttcctttccctctctctctctcttttttttttttttctttgagacggagtctccctctgtcatccaggctggaatgcaatagcgcgatctccactcactgcaacctccacctcccaggttcaagcgattctcctgcctcagcttctcaagtatttgggattacaggcgtgcgccaccagacccagctaatttttgtatttttactagagactgggtttcaccatgctggccaggctggtctcaaacacctgacctcagatgacccacccgcctcagcctcccaaagtgctaagattacaggcatgagccactgcacctgaccgtttctttcttttctttctctttttctttctctcttttgacacagggtcttgttctgtgattcaggctagagttcagtagcacaatcatggctcaatgcagccttggcctcctggcctcaagtgatcctcccacctcagcctcccgagtagattagactacaggcatgggctaccacgcctggctgatttttttggtttttgtagagatggtgtctcactatgtcgcccaggcttgtctcaaactcctgggctcaagggatcccactccttctcatcctcccaaagcgctgggattagaggagtgccaaatttttcatttctccaggaaagttgaaacaaagaaacttaaataaaatgcacaaaatcaaaagcagagcatttccttaaaaggggatatgagaaagacgctggggtccctgcttccctgtggcaggtgattgagggtagataacagggtccggagttcccaaggttcactcacctattccgtaccttcgctcgggactggccctgtctgagtcccaagaggctccttctccagggaccctgactccatctctccaggtcccggggacttttgcatccttctcaccaaaattaactcctccaccccgttctgaacacctcaggagaagcaggagcagcagaagggggacgtagcggggcattttcttctcatctcaagagaatccacatggtgctagccaggacaccttttcctccctccttctctcaaactttttccaccctgcccttctccttccacccgcagtggctgtgggtttatatgtgctttgccgagggaagccagagctccgggtcttccttcctggagggaggagcagcttctcaattaccccctgtcactcaaaggagtggccgggcagggcagaagaggctgtcatgaggggaaggggggctctcagctttggaccagagcccagagtcgagcagccacaggggatcaagcctgtcagcgtgagtgcactgctttctgatgtggagcctagttgaaaaccatcctccacccggtgtttcagtgctcagggagggcctcggccttccttcccacaggtggccacagtaaagtcaggatgaccaaggagggcataggccaggcctgcctgggggatgatgcttggcaggaggagagctgggtgtcagagggtagaggacatttggtaaggaccaagagaaggtcctccaacagaaggagaggaacactcatgagggggctaaaacacccaatctctctgtctcttaaaacctcactctttgctcaatcatccacccaaatcctcttccttggcttctctccagcccacggatctctctccttgctccccctgctcgagtgccctcaccccagtgagctttctcaattactgcatgtattagtctgttttcacgctgctgataaagacatacccaagactgggaagaaaaagaagtttaattggacttacagttccacatggctggggaggcctcagaatcacggagggagacaaaaggcacttcttacacagtggcggcaagagaaaatgagaaagaagcaaaagcggaaacccctgataaacccatcaaatctcatgagacttattcacagtcatgagaatagcaagagaaagatgattggcgaaaagagaaaaactccccacagcatgaggggaattgtgggagctacaattcaagttgagatttctgtggggacagagccaagccatatcactgcacaaaattagtccacttgtggtgaggtcaggcctgaatgagaatacccacatcttttcctccttctctgacccttatccctgccttgcccactctttagaagatcattgttggttcccatcttcattcagagatgtctctcaccatttgtggggcctctctctttcccagtgtccttctaactaaaagaggagtgtgaaattgcaggtgggccgggaattgttcctctcttagaaggcagctgatttcctgaaaatcaatttaatgaatggctagtttaccacatgtaactgactatgttaactactagtattatttgaatgtattaaatattttctcttttccttccttccttccttcctttctttctttctttctttctttctttctttctttctttctttctttccttctttctctttctctttctctctctttctttctttttgacagggtcttgctgtattgcccaggttggagtgcagtggtgctatcacggctcactgcagcctcgatctcccaggctcaagtgatccttccacctcagcctccggagtagctgggactatatgcatgcaccaccatgcccagctgattgtttttttatttttagtagagacaaggtctcactatgttgcccaggctggtctcgaactcctgagctcaagagatcctccctcatcagcctcccaaagtgctgggattacaggtgtgagccacatcacccagcaacattttcaaacatagtatttaaacacactcaaaagaatttgtatgtatttagtataactaatgaatagatttcaaaagagtatagtaaggaaaatatctgattttctaagtcaagaggtataatttgcatatgataaaattcaccctttttcatgtacaggtcaatagaatttttttggtttggctttgttttagaatttttaaaacttcattttgagataattttagacttacagagaattacaaaaataattaacagagttcccgtatatttttcccctagcttttcctcatgtcaatatcttacatagtacaattatagaaactgagagattatatatacaattatagaagctaagaagttattgttggtacaatactatatatatttttttgagacagagtttcactcttgctgcccaggctggagtgcaatggcacgatctcagcccacagcaaccttcccctcccaggttcaagtaattctcctgcctcagcctcccgagcacccgggattacaggtgtgtaatcctaatggtgatagattagattccttctacatttattaattgaaattcttctgtaagaaaaagtcgtgccctctccccattttatttattcaactatttgtttatatcagaatggactcataaatgtttattttgttctgtgagttatgatccaatactatcactatttattttgttgctcaaactttggccactgggagctctttcagatgggctccagtgccgttttaatgtcctccatcctttttttgttttgttttatttatgagacaagacttcactgcgtttcctaggctgaattgcagtggcatcatcatacagcctcaaactcctgggctcaagggatcctcctgcctcagcctcctacaagtagctaggactacaggcatgcaccagcacacccagctgatatctccattgctattttgttttgttttttgagacagggtctcactttgttgcccatgctagagtgcagtggtgcaatattggctcactgtaatctccgtatcctgagctcaactaatcctcccaccacagccttccaagtag

SEQ ID NO: 1882256 - DNA, 4001 bp, Homo sapiens
tttttttctgagacaaagtctcactctgtcacccaggctggagtgcagtggcatgatctcagctgactgcaacctctgcctcccgggttcaagcaattctcttgcctcagtctcatgagtagctgggattacaggcatgtgccaccatgcccagcctatttttgtatttttagtagagatggggtttcactttgttggccaggctggtctcaaacttctggcctcaaatgatccactcgcctcggcctcccaaagtgctggaattacaggcatgagccaccacacctggcctgatcagtttatttaagatggtgacaattaattgtccacataggtggaactgagaaaataaaaaatatatatatacagttaaaaaaaagtgaaagaaaatacagctgcataagggggagaaaaatctgatcactaaaatataatcttgaaaatcttatgaagtgttgtaaaatccctcctccagactttttgagaaagttgatacaggaaattgagtcaggaaaaaaattttacactttccgatccaagcgaaaaattatgtatcatctatacgaacatgtcaattttattgttagagcaaaataaagtgcacaatttaaaattaataattataaaataaacaaatataagcagtacatgtaacacagtaaaaatattttaaagttataatgagttcaagaagataaactatatgtggaagacagaagaatgtcaacaagacttttggaaagaatgttatgaagtgagaagacgaggacctgctagtgacgctctgctgctctccaggatggcagacgtcagaggcatcgcggtcccatgcggatcactcatgaacagcactctgaacttgctcttctgggccatcatttttttttctatttttaaactcataaatttaaacacataaatgttagaaactacacattattcttccacaaatgtttacacattaattttaataaacatttttttcaattgtggtaaaatacataacataaaataaaaccctttaaccattttaaagtgtacagttctgtggtattgtatatgtgacattgctgtgtgaccatcatcatcactttctagttccagaatattttcatcgccctaaacgaaacttcatacccattaagcagttactacccatttttcaccccctactccccaggtaatctactttctgtccctatgaacttttctattctgaatattttatataaatggaaccataaactatctgtgtatgtgtatgtgtatgtggcttctttcccttagcctaatatttttagagttcttccatgtcatagcatgtatcagtgcttctttcctttttaaaaaaaaaattaacagacattatttttaagaacagttttagatttataacaaaataaaatggaaaatccagagagctcctagatccctcctctctcccccctatttctgctattattaacatcttacattagtgtggcacatttgttacaacccatgaaagaatagtgacacattattttcaactaaagtccacagttttacattaggttcaccttttgtttatataatctctggagtttaacaaatgatttttacatttacattgatctatctttatatttatgaagacttaaatttattagtaaatatactaggtttacctgaaaatattttaacactattttgatttaatgtaattaaaaataatttattgcacaacatctaaaggttaactattatttttcacttacttttgagtcttccttcccagtgaatgtagctctttgcttgttagtctgtgcttgtgaaggccctatgaatacatatattcactttccagggagaaagtctcaagaaaattggttttatcagtcacattctctcactgtatattagaaaacatactttcctatagcttcccaaattggtgattaatgtactttctgagttccagttccagttagaaaagccacaggaaggagaggggttggtggcattgaggatgatgccccagtcactggaagtccctgtggctgttgggtgggtaatcgggttggtgcctcaggatacagttccctcccctcctggtgtgtagacagctgggtgtagtcattaaagtggggccactctcagaataaatgtgcagattggctggatctcagtttcagggagaggacaggaggaagccacagagactgaattgttaactccctgacattttcctcctttgtcagtacaatttaacttccatgaggacagtgatttttttccttcttgtctagccccacaacctgtaaaaatgacatacattgattatcaataaacatttgtaaaatgcatgaattgtctcataaagtgatatttattgaatatcttacctgttgaatgtactatgctaaggcctagagatacaatccttaataagacataattcctgccctcaggtctttcttttttgcagtggagtcactctgtttttggaatgtcttattataccttcataaactttactaaaaatgggagtgccagagtagtccagcaataaagaattaattgatgtagccaggtggtgaattcacttttccagaaaggataggctacttggagaccctgcactacttattgatttactcaaagctacaaatgaaaataagatggacactgttatccctgacaggtctaaagctctgagtccaatcaaccatccaccttcacgttttctaccatgtccacctgcagccactgctccccaatctctaagcttagaaggacaaacacccattaaaatgagtaaagaagtgacaagtttaagaatcttgttgtagaaaaaatatgaatttagactctgaaaaagagatagtaaaaactcctcttgaacctcatgctgaatgtcctaagtgtataaaaaagtaaaatgtctaaggctgaacctgttacatttcgtgttctataccacagttccaccccatttgttcctgttttgttgttacccccatgtttagggctcgcatgtccagaaatcccttctcatccaccatgtccatttgattataactattaatattttatcaccatttatttacctctgtcctgccttgattatttcttgatgaaatatgtaagcctccctttagggtcagtgaaattaggactaggctctggcttgattcttcctggcttcgaatactgtctttgccacttagtgtgtgacgtgaaatttcaccaaggagatacatctacaggacagattgttagaggcacttgtggtttacagatctgcaaatactgtagaagaaaaactaaggggatctcttccatcatcaggaagaaagggttcatttaacagaagaagctcggccaggtgcggtggctcacgcctgtaatcccaacactttctgaggacaaggcgggtggatcacaaggtaaagagatggagaccatctgggccaacacggtgaaaccctctctcttatactaaaaatacaaaaattgtggtttccaggttcatccatgtccctacaaaggatatgaactcatccttttttatggctgcgtgggaattgaacaatgagaacacctggacacagggcggggaacatcacacaccagggtctgtcgtggggtgggaggagcggggagggatagcattaggagaaatacctaatttaaatgatgagttgatgggtgcagcaaaccaacatggcacatgtatacatgtgtaacaaacctgcacgttgtgcacatgtaccctagaacttaaagtattaaaaaaaatacaaaaattagctgggcgtggtggtacatgcctatagtcccagctactcaggaggctgaggcaggagaatcgcttgaacctgggaggtgcaggttacagtgagcagagatggtgccacagcactccagcctggtgacagagcgagactccgtcaaagaaaaaacaaacaaacaaacaaaaatacacaaacaaacaaaaagcaggagaagctcatattcta

SEQ ID NO: 1882257 - DNA, 4001 bp, Homo sapiens
tggcaccagtatcattcaggtgacctgcaagtcccaggccccactcagatcccccatcattaattattttccccatctttttgctgggctcagcatcatctaagtgacccttggtcttcagttactagctgtgcccaaagttctgtatgagccctaacctgattcttttttttttgtttgttttgttttttttttgagacagagtctagctctgttgtccaggctggagtgcagtggcacagtctcggctcactgcaacctctgcctcccaggttcaagtgattttcctgcctcagcctcccaagtagctgggattacaggtgcctgccaccacaaccagctaattttcgtatttgtagtagagatggggtttcactgtgttggccaggctggtctcgaattcctgacctcgtgatctgcccgccatggcctcccacagtgctgggattacaagtgtgagccactgcgcctggccgcctaacctgattcttaatcatcactattagcaccattttacggtttgatccctcaatgactttctttgaccagggagcgctgacccagctgatccagctctatcatcgcttccaccgggtgctgtcccagccgcagctccgagccctccctgcccgggctgagctcatcaacattcaccaccttatggtggagctcaagaagcataagcccaacttctgatgtgccagaaaccgccctgagatctgccggtcatctccatggacttctgcaccccattccatacccttcttcacctggggtaccccttccagttttccccttgcttcccaggcccttgacatggcttacctgccttcactcccagcaccttgcccaacaggataagctggatccccttggccttctgaatatcccagtgtcttcaggtttcccaagaccacttccctgtgggcttccaaaatggcctttatcatttctccagtctgtcaccctcctttcctgctcccatacacccaaggcttgtttcttcccctgtaaaaaccactgcctcaatctctggttcactcaactagtcaccatgtcctgaggcatgaagcctcctcagctcttggaattgctggcaaggggtgactgcctctgagtcattgtgtttttcaaagtgatttcttttctgtagctttttgacctaagatctcagcaatttgaacactaacctctcccctcctggctcaagaattactccgaagtcagtctgcagaaaataaatatttagtatgacatgacacttatcccatttcctttctccttcctcctgaaggtttttcaggtggccccatctctagaatgacctttcctttctgactacttcctgggcttacatcccttctggtgggtgtaacctctaacctctagctactcccaggccattggaggaaggtggcccctggctaaaatagcagatgctgcaagggatgagaaccaggccgcgcagccccagacactgtcccaagggctcccttgggacaagcccaagctgactctggaatccctcctccgtagcagctccatagctcctctggttgtggctgtgacagccccttgctcgggggctgcagcacccaacccacacccacaccgttggggcagggctagaccaggcgaaattcgtaccatccgtttgtttgacttggagccttcctgctgtcctcgcctatacgcctcgtttgaacttaggctctagactggagagacacggggacccctttaaggcctaagaagagaggcgcagttaaggaaaaatgttacgtttcctgtgtcctccacccctacggcctaaacattccctccccaggtccctggagagtggtggaaagcggttcctccccgcttaggcccttcggatgcaggtctagcccgtcggcaacgggaggtgtcctgagtgggtctgtgactgccgagcacacccgccgcggagcggaggctgctgcttcctgaggctgagagtggatccggctccgggctctcctaattggcggacgctggggggcggcgtggtaaggcagaacggagcggcatctcagctctcgccttttcagggttccgccccatatccgagagccgctctctaattggcttgggaaaccgtatctcagcgctttggcctagcgactttgaacgtgtttgcgcctgagaccgaagtgcagaagagggcgagcgcaggaggagaggcttggtgaatcagcgattcctgattggccaggcgtgccttgagggcggggccagaactgcgtccttaactgacctcgcccttgcccagatcaccgcctccgcgttgctccgggtttaccccgcctgactcgctgcgctatgcgttccctcacgcctgccggatgccaggcggcgatgtgccaggctctgaggggccgcgagctcaccccagacgccggccccgggaatcctctgctcctccactttcccttcccgctactggtttcttgcccacccactcccaggtgtcactcttgggacatccagatgttctgacatttgacctgactccagcctcagcgcgaggacgggagaagggccaagggtatgagattttggacaggagaggcattggctactctgacaaagagcgtggattcccaaagaaagggtccccagataccccgcaggggagactgtcgagacaggcgactttagccaactaatgctcgcacgcgaggagggctgtgcaggcaggcaccacggttcttcacagccttccttctttccttcccctgtccgtcgcagaacccaaatcctcagagctgatcgagaagcgcgtgttgttgcagaagtcactgaggggcagacctggaatgtgagccgtggggcgaagggacagctctggagactcgtgattccggaacccggtgggcattcaagtgatactggagcacgcagttttcggggacattaagctcgccccaggggtccacaggaaccctctgacccaacggtctctctggacaggatgatccagaacagacggtgaagagacaaaacagcgtgaaagggagcggcgatacctaaactgacctccggagggcagcatgatcaagggaaggagctgttctcgctccgctcaaacccccgcgcagcctctgcagcttactcctgcttcggaaggcggcgaggttccacccccaccaccccggtccccgccgccctcttcgcgctgaagctgcggagggtctttttcttcagcccccaaatcctctgctctgtggcttaagattcccaggcttaaacccataactgctagggtcatcactcctcaaacttctccctcacttgttttgctgatgacggacacaggggcctcacagactcagaagcatctggagtcatttcgaaggacagaactgtggcaatatcctctttccccctcctaatctctgagaacagtgtctgtatatggcacgggggtccctagtgtcatatagaaggactcggagatgtcctcatgggctgtaacggcccccggtgctattcagggatctctgttctttaaagaaatatcatttccccttatttctctacctttgtgccctcacctcgccctgaattgtttcttaaactgggctttctgggaaacgtttacttcgtgttcaacagcaaagtctcggcataaggcgagggcggcagggggtggggggcgggcgtttgctcgccttggcattaatttcagagctgctgaacgtggacaaaagagagggaacatcctcctttcttccattcctgtaaatatggacccacccaccctccacttaagatgggtggcttttctgattttaagatatcaagcagcctggcgaggtggctgacacctgggatcccagaactttgggaagccgaggcgggaagatcccttaaggccaggagttctagaccagcctggccaatatggcgaaaacccatctctactaaaaatacaaaaattagcctggcgtggtggtgcctgcctataatcccagcta

SEQ ID NO: 1882258 - DNA, 4001 bp, Homo sapiens
gacttgctttgttgccatggtctggagccaaacctgcatatatctgaagtatgactgtaatttccctttccctcttcttgctggcccagaatgaccttgtttcttgcccctgtctagccctgcatgctgtaggggtttgccttctctggtaggtctgggcactttgtatcccttgtaactctggctcctggaatatgacactggtacagggctcaagctctgttggactagtgagcctcctcccattcttcctgaactagaaccaaagctccgtgcacacactgtgcatgtgtgagcctgtgtagagatgtcggcttcctgcagcgtgttctgaaggggtgtcctgttgtgactgagggcacagccacaggccactgggcagaggtggttcagaagggagtggatggccccagttttgatcatctgaaaacagggaggtcctcagagaaaaaccaatgtcttagaaggcaaaactgcccgagagtggacaatggctaaccaggtcactacctgggacatcactctgcactaggagggaagatggcctctgccatggtatagaggtccaggaaccaggcagggaggccttcccggtggtcagtgcttctcacaattggtagctaaagtaactttagatgaggccaaaggcctcatgttcctcactagctgacttgttcccactcagtggaaaaagaacacagaaactttgtaaaatgttaggggagaggtactttccctcttgactcttagtgctagggttatgcatgacgcatacttgcattgcaatgtgtacacagcttaaagtcttaatcattagaatataagaggcccaaactactgtttttatacatatgtgaaactgtacatataaggttaaacaacctgcaaccagttaactttgaagatacatttatcacatttgtagattttcaaacaatattggcaggcatttagaaaaacaacaaatgagactcttgcaagacaatctaaatgatacgctgataacattgcttcatgaagaggacatttgaaccatctgagtttctgccttaggttataactccaaaatggacgaacccccaatagtttatagcaggcagccccaagccacaaacaaatgtgtcagtgcagacctgagacctggagtgagtccccctcccccagggacatgagtgaatcctctaagacccctcttcctccaggccctccatccagtcatcagggagacaagaaagggtccacacagcactgaggcccaactatctccctgtcctcacctccatggacagagcccaggtgaaagccacccctgagcctcctccctcgtctcccacagcctcagcaccatcatctgccttgagtccaccaggactgagctcatcatgccttttccctgtttgtgtcagtcacactgggtcccccaaacaccctgcattcacatccccacaaggctctgcacacccctattttgtctccccataccccattcccaaatccagaagtcttcccgctgtgccccttggaattctcagcccatgatcagcaaaacctccacatcctgtctcaggatgttcctggacctcacagctccagcgatgtctgtgtctgccagaggatgtggtcccttccaaagtcctcccacatgggggagtttgcacagggaccttgtacccttggcccagaggtggggtggcatcctcactcctcactgtggttctcagacctttctgcctccttccttcctaagcccccaaagctgtcatcagattcaggccccactcccctcattgcagccattccctgtgggccccaggccgttcctctcagtcctgactcttgtagttcctggttcactatcgccctctccagcagtgctgtctccttgatcctcggtgacttcaacatactcagatgtgatgggccgagtaatggttcccaaagacgtccaatctcaatcctgggcacccacgagtaggttgcattacatggcaaaagggaaaatactgatgtgatgaagattaaggaccttaaaattgcaagattattttggactatctgtgtgggcccgatcaaatctcacaagccattaaaagcagagaagctgctctggctggagtcagatgctgcagaggaggaaggcagaggagacaccgcagaagggggaggtcagaggttccaagcaggaggattggatatgttgcatgggatatgtgtgaggaactgagagagggctctaggagctaagggtggcccctggacaggagccagcaaggaagtggggatctcagtcctatctgcaaggaagtgaattcagacaagaacctgaatgagcttgacagtagatttttcctcagagtcagaaggaacacagacctccccttaccttgattttagccccatgagactgttgaagttgtaacacacatgactgtgacatgataaagagatgctgtttaaagccacttgttttgtgttaatttttatggcagcaataaacacccatagagcagagaggatgcatcgccctctggcttctcagatgctgggactcctctcctccatgaccttctcctccctctgcctgaatctcatgcccttgtcatataagcattattttgtaggagagctgctatcatcccgccatggccatggtctgtccctgacaccaggatcctgttgctttgttgttgttctcccctaaagagtcctaggtctcatcatggccaagaaccccagcccttccatactctctatctcacacttcccattctctgaccatctttccactcatccccttgcacggaggccacaggctctgaggatacttatactatcattttatcatatgctgtgacgtaatatcagtgaaccactcattgcctatgtgcctgctttccaggcttggagtctgccctgtagtacatcaattccaacaatccttccacccactctgggattcccaatccagtgatcctgccatctactcactgtccctcacccttgatgtcctctcctccctcttcagccattttgaattctattgtaaataatttccatccctcccttgcccctcccttgcgttgccatacttgtttggcaaaactacacagctggtggaatccacctctgcctacgctgcacctgcccccatgagctgaaggaggctggaaagcagcacacagcatgctgacttctctctctaacttcatgacccaaacctcatggggaccccccaccacgaccagcaatcaccctctccaagcatggctcaccctcagcctcctactggtctgggtgactctcacacaccttctctctgctcacacatccaaccttctatctgcattcttacttcagctgatgaccttgcttcctacttcactgagaaaactgaacacactagaagacaatttcacagattccatctgctcatgcatttgcagctgcactgcatgctgggtcttctaccacatggatggttgttgtgggttaaccttcccgctcccagccagaggcagtccctctactggtgtcccaaacatcatccttctcatctacttaaaggtatcagttcatcagttcatacctttttttctctttgatcattaccctttgtcctttctccccactggattgttgtggcagtcttgagaatgcacatcccagcccctcagctagaggaagcacagctgatgatgctccagctgttgccgcctgaaatctattgctacgtttgctctcagaccatacttgccattggcttcttcgattcaataattgagagaacaggagaaacaaagacaggattgtctctcctttaaaggcccactgaggctccagggctcaccattactgaacttctcttaacctgcactgggtctaggatactttcagccaaacttccttccctctctccttcactggggtttaaacttgcattgcagtctggttgggcacagtggctcacgcctgtaatcccagcactttgggaggccaaggtg

SEQ ID NO: 1882259 - DNA, 4001 bp, Homo sapiens
ccactgatccttgctgaattacttctttgaggctgagataaacttcacatttcagcctcattaataagattaattgtaaatccaaatggcctgcaaatctataaacagtcgctcagttgattagccagaacattgaggactgttaatgatacaggaaaaggcccattttggaggtgagaagctgaggagcctgaaactgtttccattgtttatgaaagtaatctgacaattatgaatgaaaatacccaccaccccccgacccagcaatccaaggtgggaaatatcttttttttttttgagacggagttttgctcttgtcccccaggctggagtgcagtgatgcaatctcagctcactgcaacctccatctcccaagttcaagtgattctcctgcctcagcctcccaagtaactgagattacaggcgtgtgccaccatgccagggtaatttttgtatttttagtagaaacgaggtttcaccatgttgaccaggctggtttcgaactcctgacctcaagtgatccgcccacctcagcctcccaaatgctgagattacaggtgtgagcccaaactcctacttttaaatcactgcataatagtccatagtccattgaatggagtatagcaataaacactgttacatattctgaacctcaactccctccctccctcccttcctctctctctctcttctttctttcttattttttgacacagggcctcactctgtcacccaggcggagtgcagttgtgggttaatcatggctcactgcagccgcgacctccccaggctcaggtgatcctcccacctcagcttccggagtagctgggactacaggcatgagccacctcacccggctaattttttgtatttctggtggagaaggggtttcaccattttgcccaggctggtcttaaactcctaggctcaaaccatctgcctgcctcaccctcccaaagtgctaggattacaggtgagccaccacacccagccaactgcctttatttctgtaagagatatttcccggccaggcgcggtggcttacacctgtaatcccagcactttgggaggccgaggcgggtggatcacctaaggtcaggagttcgagactagcctggacaacatggcaaaaccccgtctctactaaaaatataaaaatcagccgggcgtggtggggggtgcctgtaatcgcagctacttgggaggctgaggcaggaagaattgcttgaacccgggggggtgggggttgcagtgagcccagatggcgccactgcactccagtctgggtgacagaccaagactgtctcaaaaaaaataaaatacataaataaataacaataataatatgtaagatttgtcccacggcattttgaggtgatggcaggcagaaataaagccagtcccaccctttctgggctagggaaagctgagatggtcttcggctccgggtgagtcactccccagggtccaggcctggctgcccgttcccctccccctccaacccacctacagccccttctgctctgccccatcaactacattttctccctcagcactcgccttagattcctggacccacagcacagaggcgacctcctccttgcagactttaggcgccactgcggggtccggaaaaaaaagagaaacggcccagcgctgtcacttacataacccagggcggggctgcgctcggcgaccgcaagcgttttgaattctgcgccccagagttcactgcgaggactgggatcacccgtcaccccgccctggtctacggaaaatgacaagtgtttactgatatagaaacggaataacggcgctgtgggctggggtgggcggagctgccttcaggcttctggtctccagcggcggggaactcacacctgccgctgtgaaaatgcagacccgcggggcagtaattccgagtccagcctggggcgcgatctggaatcttgactcgcttgaaacaccacgacggattcggagacaggtgagtagagaaatgagcctcagcccctcccacgggccgcccacggattccaggatccggaaactcttcctgctgctgcgtcaccccaggaaggcagcgcccgcctctgggcagttctgatggaaactggcttcgccgcccagaggaaaacccacaactaaggggccaagaaaaagcctccatggtcccgccctttcagtgaggatcctaatttataccccgagtgtggcccccatcaaagtctgcagtgacagccgagcgcggtggctcacgtctgtaatcccggcactttgggagaccatggcgggcggatcacttgaggtcaggagttcgagaccagcttggccaacatggtgaagccccttctctactagaaatacaaaaattagccgggtgtggtcgtaggcgcctgtagtcccagctactcggaggctgaggcagaaaaatggcttgaacgcgggaggcggagcttgcagggagccgagatcgcgccactgcactccagcctgggcgacagagactccatctcacacacacacaaaaaatgtagagtgacgttcactgaaatgatactagaccagcgggagggacccagagcgctgcggttcacagaatgcggtgacagcgccgcctcgcgtcctttacttcaactgccccaggcagacgtggtcacgtgtgttggcctggaggctggaatacaccggggtcaaatgcagagtggagaaaggagggaaggatgggaggacgtgttgaagaaagacagtaagagctagcgctatggttcatatctgtaaaactagagttttcggaggcgaggcaggaggatcgtgtgagaccaggagtttgaggtcgcagtgagccgtgatcacaccactgcactccagcctggacgacagagtgagaccctgcttttatatacttttcatattttctgtaattaagcaagttttgtgtccggaattggtgggttcttgatctcactgacttcaagaatgaaactgtggaccctcgcggtgagtgttacagctcttaaggtggcgcgtctggagtttgttccttctgatgttcggacgtgtccggagttttttccttctggtgggttcgtggtctcgctggctcaggagtgaagctacagagctttgcggtcagtgttatagctcttaaggcggcacgtctggagttgtttgtttctcccggtgggcttttggtcttgctggcttcaggagtgaagctgtagaccttcacagtgagtgttacagctcataaaagcactatggacccaaagagtgagcagtagcaagatttattgcagagcaaaagaacaaagctttagcagtgtggaagagaacccgactgggttgccactgctggctcgggcagcctgcttttattctcttatctggccccacccacatcctgctgattggtagagccgagtggtctgttttgacagggtgctgattggtgcgtttgcaatccctgagctagacacaaaggttctccaagtccccatcagattagttagatacacagtatggacacaaaggttctccaaggccccaccagagcagctagatacagagtgtagattggtgcattcacaaaccttgagctaaacacagggtgctgattggtgtgtttacaaaccttgagctagatacagagtgccgattggtgtatttacaatccctgagctagacataaaggttctccaaggccccaccagagcagctagatagagtgtggattggtgcactcacaaaccctgagctaggcacaaggtgctgattggtgtgtttacaatccctgagctagacataaagactctccacgtccccaccagactcaggagcccagctggcttcacttagtggatcccgcaccggggctgcaggtggagctgcctaccagtcccgcacggtgcgcttgcattcctcagcccttgggtggtcgatgggactgggcgccgtggagcagggggtggtgctcgtcgaggaggctcgggccgcacagg

SEQ ID NO: 1882260 - DNA, 4001 bp, Homo sapiens
tacagagccttgcagggtgatctttgcagttggcctttaataccttatgtgggtctgcctaaaaactaatttttttatgttaatcaggtttaaaaaatactaagtgttcatataaaatatacacaacacttagaagtggatacttcctaaaaacaggcagtgcatgagcactggtgaggggcattgtgactgcattgagtgcttgccactgtgagatgaataaagtccgtactggctcctggttacaacatatagtaacacagtggctaccttgtattaggagatgtcctggactcacacagaaactcagggctatggaatgaaggtaaatttaaaatactacaagcgggagtcacagatacattgtctgggaaagtgaaacttaggagctttgtgattcctgttgtaatgcttttagacacatttatatgtcaagggaccaaagtcacatttttggccgattagattcctgatcattaggagttaccaagattctgctacccactgtagttaataaacaaaaagcaaactggtctctattctatctcatgcactcaggcacaacttttccagatttaaaaaacaaacaaacaacaacaacaaaaaaccctgtctctacacctccattcccagggcaagctcactctctggcaacaagctccctggggtgatttttcttctagaagagtccacggggacaggtaaggagtaggaggcagggagtccagttctgggacggggattccgtgatgcaaagtgaagagagagggacggggcccattccgagggtttctccctggtttctcagacagctcctgggccaagactcagggaaacattgagacagagcgcttggcacagaagtagcggggtcagggcgaagtcccagggcctcaggcgtggctctcaggatctcaggccccaaaggcggtgtatggattggggaggcccagcgctgggcattccccatctttgcagggtttctcttctccctctcccaacctgtgtcgggtccttcttcctgggtactcaccgggctgccccagttctcactcccattgagtgtcgggtttctagagaagccaatcaatgtagccgcggtcccggttctaaagttcccacgcacccaccgggactccgattcttcccagtcgccgaggatggtgtcatggcgccccgaaccctgcttctgctgctctcgggggccctggtcctgacccagacctgggcaggtgagtgcggggtcgggagggaaacggcgtctgtggggagtagctaggggcctgcccggcgggggcgcaggaacccggttgcggtgccgggaggagggtcgggagggtctcagccccctccttgctcccaggcttccactccttgaggtatttccacaccaccatgtcccggcccggccgcgcggatccccgcttcctctccgtgggcgacgtggacgacacgcagtgcgtgcggctcgacagcgacgccacgagtcccaggatggagccgcgggcgccgtggatggagcaggaggggccggaatattgggaagaggagacagggaccgccaaggccaaagcacagttttaccgagtgaacctgcggaccctgagcggctactacaaccagagtgaggcctgtgagtgacaccggccgggggcgcaggtcactacccctccacatcccccacggaccgcccgggtctccccgagtctctgggtccgagatccacgccgaggcagcgggacctggagacccttgacccgggagaggcccaggagccgttacccggtttcattttcagccaaaatccccgcaggttggtcctggcgagggcggggctcggtgggcggggctggccgcgggggcggggccagggtctcacacccatctagaggatgtctgtctgcgacgtggggtcggacgggcgcctactccgcgggtatcaccagcttgcttacgatggcaaggattacatcgtcctgaacgaggacctgtgctccttgacagccgcagacacggcggctcagatcacccagctcaagtgggaggcggcccggggggcggaggttcatcctcacagggataggcacctattagatgtggtgtggttttcctctctactcttagaccctcagccagtatcactattggcattcctgagccactggctcagaatttcagtacattatctgcccgcgggacacacctcagaggaaaggggatgaagcgtggtccatgaccatggcaccccctggtcttatcaccacctgcacctcccaggggctgccagccacacagagtcatggacaggtctctacagacacaacttagtgccagcttggatgaaaccctctgaggaatgggtgccatctttcaggatgtggtgcatgtattgaatcaaagatgtctctatagtgctgtgtttacagaaggaagaatacgtgggtccaaaaaccaagaagtagaagcaggtgtggctccatatctaaacccttatattcaccttcagggtgattttgcacttctcatctccaatatctgggctctgtaggggaggaggtcctggtttcccaaagggggcaccctggcaaggagacatttaaatgagagtccatggaaatatacattatggctgcccccagggatgtttgaatagtatgtgtccagatacaagcaggtgagaagaggaggaggcagggctgctatcacacaaggagggcaggagatgtgtgtgtggaaataagagatccacttggagaccttatggttccccttgtcctgttgtaagtgtgagcagaatcatccagcaacccagcctgagagggtttcatattcaagagcccagaaccctcaggaaggaaggattgagtgatactcacaggtaatgtcccaaggctgtgctcctgtgctctgacatcctcagcaggattggtgcaaagccctgcttcccatgggctgttcccagccagtgactggtcacagcaggcattaaggcaagccattcctgggagacacgggactcctctgatggctaactgtagctggaagactcctccacggccttgctcaactctccttagattgcctgtgctctaggatgcgtcaaacaaactttctctccttctgtccagcacttggggtcacacttgcatcgtggtctgccgccttttctcagggatttctggctcacttcccatattcccttacgggtgtgtccccttataagatgtcgcagactttaagctcatcttggcatctgctccttgaaggacttggactaaaaattatttccatctgcatatcaataactcttattccaacctgtaaaatccttctctttatccaacttctgccacccccacagaatctattttacttgtgtgtgtagtatctctttgagttaacagatatttgttctattaagctactaaattttgaggtagtttgtgacacagcacttgataactattaaggctttcttaagtttccattattccatggatattatctacatatcttttaatcccttgcattttaataacattagctatacttgctgtttccaactctttcctcctatttttgaacattttaaattttgtctttctctgtccttccttccttctttcctcctttcctccctcagagctttctccctccctccatttttttcataaactccaagtgtttaggccaaaaggaagcattatttgaactttatgctaaaagtataatgccgtaatttataatataaaagtaaagaaaaggaagttgttaatggaatatgaaaaaatgcctagggtgattctatagccaagacagtaccttttaacatttaatttctgcctccaactgaatgttttcagaacacatgagcaacacaagctctttcccattcttggtacaagcacttgagaaatcaaattagccttatctagtatgattaatgtccatacatcatataatcccaccatctgcctcctgatcataccccctggggacat

SEQ ID NO: 1882261 - DNA, 4001 bp, Homo sapiens
ggactgcctaaaaactaatgttttttatgttaataaggtttaaaaaacacttagtgttccttctttgcagttggcctttaatactatatttgggactgcctagaaactaattttttttaattaatcaggttttaaaaatactaagtgttcctataagatatacacaccacttagacgtgaatacttcctaaaaacaggcagcacatgagcactgctgaggggcattgtgactgcattgaacacttgcaactgtgaggtgaataaagtctgtactggctcccggttgcaacatatagtaacgcagtgtgctactttatattgaggagatgtcttggactcacccagtaactcagggctgtggaatgaaggtaaatgtaaaaaacaagcgggagtcacagatacattgtctgcgaaagtcaaacttagtagctttgtgagtcctgttgtaatgctttcagacacatttatgtatcaaggggccaaagttacatttttttaccgattagatacctgatcatttaggggttgccaagattctgctacccactgtagttaataaacaaagagaaaacttgtctctatgctgtctcatgtactcaggcacaacttttccggatttaaagaaaaaaaaaacaaaaacctgtctctacgcctccattcccagggcgagctccctctctggcatcgagctccctctctggcggcgagctccctctctggcggcgagctccctctctgtcaccaagctccctggggtgagtttttttctagaagagttcagggaaataggtaaggagtgggaggcagggagtccagttctgggacggggattccgggatgaaaaatgaagagggacggggcccatgacgagggtttctccctggtttctcagacagctcttgggccaagactcagggagacattgagacagagcgcttggcacaggaggagcggggtcagggcgaagtcctatggccccaggcgtggctctcagggtttcaggccccgaaggcgatgtattgattggggaggcccagggttggggattccccatctccgcagtttctcttctccctctcccaacttatgtagggtccttcttcctggacactcaggatgtggactcagttctcacccccatttggtgtcgggtttctagcgaagccaatcggcgtcgctggggtccctgttccagaagtccccgcgaacccattgggactcagattctccccagacgccgaggatggggtcatggcgtcccgaaccctcctcctgctgctcttgggggccctggccctgaccgagacctgggcgggtgagtgcgggatccggagggaaatggcctctgcggggaggaggtaggggcccgcgcactggggcgcaggacccggggagcagcgcaaggaggagggtcggacgggtctcagcccctcctcgcccccaggtacccactccataaggtatttcagcaccgccgtgtcccggccgggtcgcggggagccccggtacatcgcagtgggctacgtggacgacacgcagttcgtgcggttcgacagcgacgcggcgactccgaggatgtagccgcagtcgccgtggttggagcaggagggaccggagtattgggaccggagcacacggaacatcaggcccgcgcacagactgacaagagtgaacctgcccatgccgcgccgctactaccaccagagctaggccggtgaatgaccccggcctggggcgaaggtcacgacccctcctcatcccccacggacgtcccgggtcccccccgcgagtctccggctccaagatccaccccgaggctgcgggacccgccagatcctcgacccgggagaggcccaggcgcctttaccaggtttcattttccgtttaggccaaaatccccgcgggttggtcggggcgggggcggggctcggtgggcggggctgaccgcgggggcggggccagggtctaacaccctccagataatgtatggctgcgacttggggctggaagggcgcctcctccgcgggtatgaacagcacgccaacgatggcaaggattacatagcccggaactaggacctgcgctcctggaccgcggcggacatggcggctcagatcaccaagcgcaagtgggaggcagaagaatttgcagagcagatcagggcctacctggagggcacgtgcgtggagaggctcgcagacacctggagaacgggaaggagacgctgcagctcacgggtaccagggaacacaagacgcctccctgatcgcctgtagatctcctgggctggcttcccacaaagagagaaggaaaatgggaccaacactagaatgtcgtcctctctctggtcctgagggagaggaatcctcctgggtttccagatcctgtacaagagagtgactctgagggtctgccctgctctctgatacaattaagggatgaaatctctgaggaaatgaagggaagacaatccctggaatactgatgaggggttccctttgacaccagcagcagccttgggccccgttacttttcccctcaggccttgttctctgctttacactcaatgtgtgtgggggtctgagtccagctcttctgagtccctcagcctccactcaggtcaggaccagaagtcactgttccctcctcagggactggaattttccacggaattcggagattatcccagatacctgtgtccaggttggtgtctgggttctgtgctcccttccccaccccaggtgtcctgtccattctcaggatggccacatgcgtgctgctggagtgtctcatgagagatgcaaagtgcctgaattttctgacacttcctgttagacctctcccccagacacatatgatccaccattccgtctctgactataaggccaccctgaggtgctgggccctgggcttctaccctgtggagatcacactggcctggcagcaggatggagaggaccagactcgggacatggagcttctagagaccaggcctgcaggggatggaaccttccagaagtgggcagctgtggtggtgccttctggagaggaacagagatacccgtgccatgtgcagcatgaggggttgcccaagcccctcaccctgagatggggtaaggcaggagatgagtggagggggggtcatgtctcttaggaaagcaggagcctctctggagaacttcagcagggtcggtgctgggggctgagggtcagggacgctcaccttccccttttttcccagagcagtcttctcagcccaccatccccatcgtgggtatcgttgctggcctggttctccttggagctgtagtcactggagctgtggtttctgctgtgatgtgcaggaagaagaactcaggtaaggaatggatgaggagtggggtctgagatttcttgtcccactgagggtttcaagccccagttagaagtgtgtcctgcctggttactgggaagcaccatccacactcatgggcctacccagcctgggccctgtgtgccagcacttactcttttgtaaagcacctgtgacaatgaaggacagatttatcaccttgatgattatgatgatggggacctgatcccagcagtcacaagtcacaggggaaggtccctgctgaggacagacctcaggagggcagttggtccaggacccacacctgctttcctcatgtttcctgatcctgtcctagatcagcagttacactttcaggaaacttctctgggatcaaaggctagggggtttgtttagggccgtatggccctgactcctttctggcctctcataggacattttcttcccacagatagagtgagctactctgaagctgcaagtaagtatgaagtgggctgatccctgatccttgggatattgtggtcgggagcccatgggggagctcacccaaccccagattcctcctctagccgcatctcctctgggctctgaccaagtcctgtttttgttctaccccaggcagcgaccatgcgcagggttctgatgtgtc

SEQ ID NO: 1882262 - DNA, 4001 bp, Homo sapiens
cacccctgtgtctcagagccagagcactgattctcccctgggctgtgggcacaggtaggtgaaagtcagggaagttgtggtctgctattggttataataagtcacagatcattatgctttctcagataattaaagaaataataagagaatgtgtaattaggacacttagaagactacaataatgcaaaggtttttattcatctaaagaaggtaacataagaaaaatagttgagcaagaaagagataatattagaaggcagcaaatgacaatggacagacttaaacccaatgaggtcaataattacattaaacataatggactcagacactccaattacaagacaaatagtgcaggggggtaaaaataaataactaaataaataatcatgggctgtttacaaaagacataatttcagtagaaggtaaagaaaagttgaaagtaaaaggatagagaataccagacaaacattcatgaaagaccacatggagacgccatttagaaaaattacaggatatgagtctcctgagacatagagtacacgtagacagctcacaaggtctttttcccttttttcagagacagggtctgttgcccaggttgaaatgcaatggtgatatcataccttactgtaacctcaaactcctgggctggagcaattctcctgcctcagccttccgagtagctaggaccacaagcctgtgccgccacacctggctataatgtctcattttctcatttgctgtggtgtgaacaaggaaacaataccatgccatgtatttgacttgcagcaggcacacaacaaatgtcaggtgaattaagaaataaaaccacttagtaatccaagccatatccacatttacatcttacagatgaggagcaacatcccagacaagtaaagtaaaataaattgatttacatcatccagagcagaatcgagaacacattccctgtgctaaaggaatcagagctctactaagggtcatagcagatatcatgcaagtcacatatgttaattactagaacaggaattgatacatttcaagatatactaaacaaagggtttggaaggattaactgaatgcagaaatagaggaagaaaatggatttgtttaaaagatggttagaatctttaaagaaacaacatttttttaaagtggccttatgtggaccaaagcagagatgaactcaagtgtcaggtgggaaaatgcctaagtgcagcttctagacccaagggagacctaaaaatcctgggacattttcggttgtcacatggggattggtgggagggggtgagtggggtgttgctggcaaacctcccacaatgcacaggacagaccactccacaagattctctgtcccaaattgttaatagtgctgctgttgagaaacccgccccagaggtaaatgctgtaatgtcctcaccatttcacagattaagaaactgaggcaccagggggagaagtgtcagtaagacctgagctgcaggttgaatccaggccacttggctacagggtcttggctcccctggttaagtcagggacccagtagccgaccacaaacaatcccagctgcacggtgccttcatggtctgtggcgccccctggtgttgacactgggcctgtggccaaatgaggcttgagggaaaaggaaaaaacaggtttgggtagggggatactctttcaggctctccagatttccagccacgacttacgctcagaaaaaataacgtccaccttaattatctctccaaccctgtttttccctgtcccggctagttccctcccttgactccatcaacatcggcacctgccagacgcccaccacccaccatgtaaggagtgaaaaggccccaggactaaatgacaagacgaggttccaccccagccatccctcccctcctagagctctagctctgtgcctttagtgcttaggctcttaacctggggtccaggaacccactttcctatgacactgcgtgaagaagtgatgttacacgcacacatgacttcactacaggacattggatattaatattcatcagatcagctagaggcccaagataccactcttctcccaacagtttgtgatcctctgaattaaagaaagggtagggattgagggaggccctaactccaaatcttctaccacttctagcgaagtgctgagaagaagtgcaaggtactcaacctgctctggggatacagcaggaaagcagagtgtttacggatttcacattccatcaaagaaaatccattttgacaaaatatccaagtcacttttctaagccccaggcagcagttcaaacaaataacatcaaaaaaaaccaaaatcttggcccaggtgaaatcattgaagctataaaactttgtgagacctgtagttagagagaaggacaattcagtttagggctgcagcagaaaattcctatatcatattgtgttcttcttcatcatgaaggtcccctgaagggaccttctcccttcagcagtgcatagtgaggccatttccgtgcaaaaagatagaatctcctgggattcctgatgtttacacttactactcactccttcactttgtagatgccaacttcacattagacatctttcagttaatttccttactctgtctaagcagaatatttaaacttctttctgaagcagaaaaccagggactggttatgtgagctatcaccccactctgtggctctcttaagcaataagcataagagattgtgggccaacagaatttgtagcaaggtaaacataacccttcatttcagcctatgtttcagcttgtctagtgatgttccagtcttgctccagtcttaacattttaaaatttataattttacttgaatatgattttataagaagtcatatatattcatttctgttgagtctgtcagtgaaagccttctcaaaacaactgtgaagtaaagacaggtaaataaatgcatggtgctcccatgtattaatgctcactgcatcttacaaatgtgtcagccccactgcaacagatggtgcatcaacaaatggtgctggaaacctggatatcaacatgcaaaagaatgatgctggaaaaaattcatgtccttccattacacccttttcaaaaattaagtcagaatgactcaaagaactaatcttaagaattgaacctgtaaaaccctcaagaaaatactgaggaaaatcttatggacattagaattggtagtggtttcttggctggtgaccaatagtacaagtaatataagaaaaatgacaaattagaatgcatcaaaatttaaaaacttttttgcatcaaaggacactattaagagaatcaaaagaaaatgcacagaccaggaggaaatatttgccaatcacatatctgataaagaattaatatccagaatatgtaaagaactacaattcaacaatagcaaaacaatctcattcaaaaataagtaaaagacatgaatagacaattctccaaagaagatatacaataaggacataaaaataaggaatgctggtcaggcatggtggctcatgcctgtaatcccagtactttgggaggccgaggtgggcggatcacgaggtcaagagatcaagaccatcccggccaacatggtgaaaccccgtctgtaccaaaaaaatacaaatattagttgggcatggtggcaggtacctgtagtcccagctactcaggaggctgaggtaggagaatcacttgaacctgggaagtggaggttacagcgagccgagattgtgccactgcactccagcctggcaacagagcaagactctgtttcacaaaaaaaaaaaaaaaaggaatgccaataaggacataaaaatatggtaaacttcactaggccaagtgttggtgaagatatggagaaactggaacacttgtacactgctggtgagagtatacagtggtgcagccaccatggaaaacagaatagtgattcctcaagaaagtaaaaatagaattactatatgagccaacaattccacttttg

SEQ ID NO: 1882263 - DNA, 4001 bp, Homo sapiens
cggcgctgccttcctggggtgacggagcagctggaagcgttttcggatcctggaatcagtgggcggcccgtgggaggggctgaggcgcagttccctgctcacccggctccgaatccaccgcggtgctgtttcaagcgagtcagattccagatcgcgctccagccgggactcggaattcctgccccgtgggtctgcattttcacagcggcaggtgtgagtgccgcgcagctggagaccagaaccctgaaggcagctcggccctccccagcccacagcgccgttattccgtttctatatcagtaaacacttgtcattttccgtagaccagggcggggtgatgggtgatcccagtcctcgcagtgaactccgggccgcagtcctgagaacgcgctcgggcgcccagcgcagccgcgtcctgagttacacacgcgaccacgctgggccttttctctttcttttccggacccagcagtggcgcctacagtctgcgaggagaaaatcacctttgtgctggtaagtccaggaatctaaggcgagtgctgagggagaaaacgtagttgatggctcagagcagaaggagctggaggtagggtagagggggagggctttggacagaaaagacctgggagatttggttggggaggggcagccaggcctagaccctggggagcgactcatccaaagtccaagatcatcactgcctcccctgccccagaaagggagggattggcttcatgtcttgtcgcgatcacctctaaatgcgttggaacaaactttgcatattattattagtatcatcgtcattgaagtattaaaagtcttcttgggggtgagctgaatgagatcctttgctggaactgccgcagggagaaaaagtcctcgagagagggtagacactgtggagggaagagcttgggaccagcgtcaggagagctgggtccatctccctctctgcccctcactacccttgtgacctttagcagtgtaaataatccctctaaggtggggacaagaccccagtccctgctgtgctcaataaatgataatgctcgaaataaataatcagtgaatgtggatgggaaaactaagtaattgttaaaactctgtggtgtatgacattttcatctacagaaaagtgtaggctaggggtcctggggaatggttagtaatcataggtggagttccattgggaaaaaaaatgctcctaaagctgacgaagatggaagggacacagttcgtgatcatggatggttcattgtctaatgggggttggtaccagatggtaaatgacagctggacgtggtggcactcgcttgtagtcccaactactcaggaggctgaggtggcaggattgttctagccctcggctagagcgggagcggcttggcgtttctggggggtctgaatgggtcgcagcgagcgcgatgcggtcgcggcggggctcaggtgcgatgtgcagcgaggtgcgggagctggacgctgccggttgccgccactcctcagccctgcttttcagtctcttttcagtcctcctcgggatcgcgcatcacccccaccccctgcactttctggtctcttcttgcacttgctctcctcacctctcctccgcctcctctcacttttcggacaaaccagcccttctgaagtccctgggttcctgggctgttcctgtgaatggcattcgagggcccttccagctctgccgctgaggcagtcacatcccccggtgctcagagcggctctcgggtccctgaagccctgtcctctccctggagtccgcgtgttctcagctccagggcgggccgcagtccctggagttggggccctccttttttcgggaccaggagctggtgcttcctattgctgtggggactatggggctcctgactctcaagctgaggggttggagcctgccggctccaggcagaggattcttcctgcgactgctcccatccccagctcattatcccttcgcctcccgttcccagggttctttcctctctgtcaaccctcccagctactgtggactccaatgatctaaggacaccaagttccctcctacttcctcagcttcctttctcatggccccctgggtcctgttgccctccctgctccctgctacccctttctatctgcagttctctgatccatttgtagggtgtcctctgccctcatcccctgctcccgtccctcctgcctcccttatgggcctttcctacaagcagccttcacccagtgctgcccctatgcctctccattcccagctgtccctgaccctaactttctggtgctgccttttgtcgggggagtcttccctccatcccactcccctccaggccacttaaggggagccctggtgctaatgaaagttgggccttaggcagggcgcagggcagcgcagatgccccctcccctccagtgcagatgcctgctctgggccctgcctcaggtgacccgttccccactccttcatcctcagcctcaccctcttgaggaccccaccctgaaaccctcaggtgctggaccatccctccctggtccctctgcccctctctgccttgggaccttatgctgttcccacctcttgaccagctgccttcggccctcagcaagttctcaccttccccaaaccccaccctcccccagacaacccctcccttcctgttctcactttaccccaagttctcccagggtcacccccacttccttctcatgccaccctttagtccttgccctgcccatctcctcacccccacccagacccaaaacaggctctagtccaacggctccttgaccctcatcctctttcggttccttgaccccggtgggctgtcagttcctagacttcatatccaaaatcttcacttaccacatagtgggctgtggtcatcccctcctctgggccttctcccagcaccaccttcctcctgtgagggttttctaacctgagccctcttttggagtgtgactgctccgccttcagcaccactcctctctgaaggcccttcctcaggccttggtttttttctctctgaccaggaccccagcctctttctaattctatattattgtttggtacgcggtgacaatttcttttttgttgtttaattgttgtaaaatatacatataaagttcactattttcaccatttaaaagtgtacagttcagtggcattaagtacattcacatttttgtgcatcctgaaactctgtgcctactaaacagtagctccccattcctccttccccctggcccctggaaccactggttctactttctgtctctatgaatttggttattgggaattatgctgctatgaacatgagtgttcaaatatctttttaatgttcctgctttcatttcttttgggtaaatacccagatgtagaatttctggattacatagtaattaattttttagtttttggaggaagcaacacactgatttccatagcaggtgccccactttgtctttcccaatgtactacacaaatgttccagtttctctacctctttgccaaacttgctttctctctctctctctctctctctctctgtgtgtgcgtgtgtgtgtgtgtgtgtatttgattatagccatcctaattggtgtgaagtagtagcccattgcagttttgatttgcatttccctaataactacagatgttgagcatcttttcatgtgtctattggccatttgtatgtcttcttcggagaattggctattcaaattctttgcctacatagtttttttgagtcttatgtttgtgttacaggaattctttatgtattctggatattaatcttttattagataaatgatttgcaaatattttcttccattctaatggttgctttttcactctgcagattgtgttttttaatgctcaattttttttattttgatgggtccaacttatcaattttttctttgttgtctgtgctttggtgttatatccataaaagtgttgtcaaaacctatgtcatgaagattattcccaatgt

SEQ ID NO: 1882264 - DNA, 4001 bp, Homo sapiens
ggagtaaggccatgtcatccacagcacagaaatatgccccatccaaagcagagaaatatgttggaagcaacttttggcatgttactgtaggccctgataagatagaatgcttgaccatgggacacaaaacaaccatgtgattccaagtgcccctacgaattagcatctgtgtaactcatgaagtcatacattggacatgcccaacagcatccatcatgagatggaaaagtttcttgtgagttgagcctgaatcccatgttaacatccccagaaaacacccaaacctgaaatggccctgaacaaccaagcagaagcactgaaattagccagccttccccatgggtcagcccaggccgggtaggatgggtacataaatggagcaaacacagtggcagggatgaggctacctatgggtccaacagtactgactccctcctaccaaggtagatccagacactgccacctctaaatgtcctactcatcagcatttgaacccaatgatcttccctggtagggctctatttctttaggtgaccaaccagaccctaagtgaggagttgactacattgcactccttccatcctggaagggccagaggttcatcttcacagggataggcacctattccataggtgggttttcctgtcctgctctcagaccctcagccagcaccactctctgggggctgttgatattcctgatccacaggcttggcactgctctccgtgcagtatcttcgtgggggacccacttgacagcgaaggaggtgcagtgtggccatgctgtgggacccactggtcctatcaccatctgcaccaaccaagggctgctggccataaagaatgttgaaaagagcttctataggcacagctcaacgccagcttgcaggaagcactctgcgggtgggagggtgccatctttcaggacatggtgcattttaaaaatcaaagacatctctacagttctgtaatctcagtaggaagaacacgtgggtccagataccaaggggtggaagtggatgtggctccatatcccattccttcaactcacctgtcgtgggattttgcacttctctcccaaaaccacactctgcagggtagaaggtcctggattctaaaggagggtacccttaaaaggggacaaatgagtgcccattgaactacacattacagctgccacaggggaattggacagtatgtgtccagagaccagcgggtgagaagaggagtcccctcctctccaggcacaggtaatagatcctgatccccaggaggaggcatggctgctgtcacacaatgagggtaggaggagttcgtgtggaacccagggatccccttgggggcctcctggttccccttgtcccattgtaagtgtgaggagaatcgtccagccacccaacctgagagggtttgatttccaagagcccagacccctcaggaaggaagatttcagtcgcatttccaggtaatttcccaaggcctcgttcctgtgctctgacatcctcagcagcattggtgcagaggccctacttctctcaggctgttcccagcgggtgatgggtcacaccagggacaccaaagcaggaccattcctgggacacagaggactcctttgatggccaatagtggctggaggactcttccacggccttgatcaactctccttagattacctgtgttctagaatgcatccaaaacaccttctctccttctgcccatcacttgggggcacacttgcatctcagtctattgccttttccagagttgtaatgtaaaaatgagatcatttctgccttgattgtaattgtaatctgtaattaaatatatgtgcagatttactcctccgggcgggcccctcgctccttcccgcagaggctttttccctcccgaccccgcactcacctgcccaggtctggatcagggccacggctcccgagaacagcaggaggagggttcgggactccatgacccgcaaccttggcgtctggggagaatctgagtcccggtgggccggcgaggactttagaaccaggaaccgcggcgacactgattggctgatctaggaacccaacacccaatggaagtgagaactgaggccgcatcatgagtatccaggtaaaaggacctgacacaggttgggaaaggtggaagagagagagcggagctcgggaaaccccaaagctgagccggcccatcccaggcaccgccctcggggcctgaagcccagagagccaagctccgggccctgggacttggctcttacccccttcttttatatcaaacgctctgtctcaatgtctccccgaatcttggccccggagctgtctgagaaaccagagaaaaaccctcagcatgggctcagtccctctcccttcacttttcatcccagaatccccctccctgaactggacttcctgcctcccattccttgcctgtccccctggactcttctagaagagagctcacccaggcagcttgatgccacagagtgagcttctcctgggaatggagggaaagacgggggttgttttttctttaaatctgaaaaagttgtgcacctggggatttatgtggtcttttgtctttgcaggtatttgtttagaaacaaaagaaaggcagtttttccatgactcagattaatctggagcaaatccctggaacactgatcagcagtcccctttgacccctgcagcagtcttgggcactgtgactttttctctcaggccttgttctctgactcatactcagtgtgtgtgggggtctgattccagctcttctgagtccctcggtctccactcaggtcaggaccagaagtcactgttcctccctcagatactggaactttccaaggaataggagattatcccaggtgcctgtgtccaggctggtgtctgggttctgtgctcccttccccacctcaggtgtcctgtccattctcaggatggtcacgtgagtgctgctggagtgtcccatgaggagtgcaaagtgcctgaattttctgattctacatttttatttgccccagagaaagaatccacagtccaccctaggtccctcctagaaacaagggtgtctgccttacagaaagatataagcgcagaagcctctgtctctatggagatgaggtgtgccgtcctcccagcacgtggacatgcggatgtgctcaccaactgggaagttctccaaaactcactgtctagaggtgtctatggaagtttcattgtgtaggcaagattggtgaaatcattggccattgatgactgagctcaacttccagcccccttttcttccccagaggatggggatggcagtgaaagttccaatcctctaatcacagctggtgtttctggcaagcagcctccatcctgaaactatctaggagcccctcaccccatagtcatctcattgccatattaaaatcatgcttatcactgagggactgcaagcgttttaggacctgcctgtcagggactaggggcaaagaccaaatatatttattggatcacagatcacttcctggtctttaaccacattatttcttcttataatttctatttatttatttattattttattttagagacaatgtcttgctctgttgcccagggtagaatgcagtggcacaatcatagctcactgtaacctcaaattcttggactcaagtgatccttccgcctcaagtctcctgagcagctggcactataggtgcacaccaccatggctgactaatttttaaatattttgtagaaatgcagtctcattatgtgccccaggctgttctgcaactgttggcctcaaaagcaatcttcccaccatggcctctcaaagtggtgaaattataaatgtgagcccctttgcttggccaaccacagatctcctatagcagaagaatcatagcagtaaaaagatactggcccattaccagagtcctgtttagtcattatcaattcgcccattgcagtccaaaaatagcaatggtctcagcaacatacggcttcaacc

SEQ ID NO: 1882265 - DNA, 4001 bp, Homo sapiens
atcacaagacaaatatttccaccctacttatcaagcttgcatcctttcccgggtacccgtgcctgctcccattcccacaacgaaggttatcataaatgggcccaggacaagagcgctgttcagaaactgctactcaagtgtaccctcctggttctagggttccattgtggtgacaacaaattacaagcagcttacttcctcagagcccatcactaccaacaccaactgacagcttcgagaaggacctcagtaccactttccctaaccaaaattttcctctttactccaagccctgacaaggataaatctctaaactttagaaacaatgtaattttacaaattaacttatacgcagggttacttcctttccaatttgatcagggaatgcagggcaagaataacccaaaatatgcaatgtaaatcatgttgaaattaaaatgtatttccatctccacccctccacgatggcataatttcaaatcaacttatataatgcatatctagtcctctgaaaaatcatttttaaaagtagggctgttattattctgtcctagctatcgcagatcaatttagatttgttctgtaagatttcagattttccccaaatgacacaggtggttattttatatgtatcagtcattaaaagattaatcctttttaactaaaaagagacagtacggtcatttacaagttaaagtagatttattctgagctggtgctctggggtcttacttctctaaaattttgtgatttacaatacaccacatgtaggaaacagcttccaaaatttgtattgcttcctacaaatcagacaggactttcaggagaaggagcctaggatagattctctgttaaattttggaatcccttctctcaagagtaacctactataaactatttaccaagcctttgtgaaatctgtataacaggttactactccattgagcaagaaaacacaggaaacaggattcgaagatttaatgttactgctcatactccaaattatagaatgcttaagataattaaattatctgacttttataattcactacacggtgacctcaaatttacctcattagaatatttagtacttctgcacttctcccacttctcaaagttttcccataccaggattccccaccacctaggaacagcctttgcaagataccaatgctctctaaatccccaaagcagggtctatttcctgatcgaacaaagagcaacaaagaagtgggtggtaaccacctctctgaggcaagccaggacccatggagtctgatctacaacacaagcagtagcagttccacatctccctaccacctcttatttcctacgaagtctttctgcctgaaactggaaaacccgaactattattgaggaagtgaagcccttccatttgaatcctgagaaagacgcgctcaaagaacccagcgaacaaaggagagggttggagcccacgcaaaacatgggtgtgataaagccacacgcgacctgagcccccaccctcagtaactactctccagcgcccaccgggaggaggggtccggggaaagggtaagccgaggaaggagaagacgctccggccagaccgaacgcagggtaggggaggcgagcaggcgaggaggagggaaggggacgggaggggcggagctctcgcggccgcggggctttgtgtagagtcaaggccgggatagaaattttgcctcgcgggggacgggtcgagggggtaggaggccgacgcggggcaccccaaacctgcgttgccacgaatggtgggcgggagaagggagagaatgggccgcccccttcgccgccgccaccaccaaggcggggtaggccggcgccgtccccagcggcggccaccttcgaggctgcggactgcacggccgaagggggagaggcaggagacaagacgggcgggccccctgattcccgcccgcaggaaccgcgggggctgcgccaggaagagggtctcgttctaactgtgccgggccgggaacgggttaagatgcggccaaatgtcggtccctcctccttcccacccctcagccccggcgcccactcgcgacggcagccgcggaacccagcgcccggccccgcgcgcccaccccgacaccggcccggccgctcaccgtcgtagtagtagcagactttttttttgccgcctccttgactgtacgccatgggctccccggccaccgccgccaccgggctcctcctcctgctgctgctgctgctgctgctgccgccgcggctcggccgggagagaaaagggctgagggaaacgtgggggcgatagtcccgcggggaagggcaggccggtgggaggagaggagggggcgccgggaaggctcggtaccacccggcagaggtgccgaaagctcggaatcggaggtggcagcggcaccaactcgcgaggagggggccaccaaaccacctcaggaggccgcagggaggtgagcgcatccactgcggcctccacgggggaggaaggggcacggctggagaaggaggccgtttcgggctcgaggttagaggccctgttagggtgaacaacctgcgcaaggcggcgccatacacagtgttaaaatgaggaagaagacaagctttcgctgcgcaagtagatccagggagcgtgcagccgggtggacgttctccccctcaggtctgcgcgcagtggttgcgcctgtccccgagcctgcgcagtcggcgcctcgtagccttggcggtctggacccctcctcggcgtcccacgctgctcccctcccccactgtcgcgaagctcccgcccaagccgaccacgtgccgcgagcccggcggggagagcccactcccgcgccccttccgggcccactaccccgccgggctgtggcccatcgccccagtgcctggtagcctagttttctcgtttgtcgtttgttcacttatttattattattattattattttgactcgtaatgggtatgaggtgtaagggggcctattacggatgttaaggggagagggcaccgctcgggttttaataagcatctgtggagctcatttataaggtacagttctaagcacttgcatttataatatattccattgataatctatttataatatttaatctcatttaagactctcaacaactctaggaggtaagtggcaattgtactccttctttataggtggaggcagattaaggaacttgttcttactgctaactgataagtctggaggtttgaactcattctgcaaactccacgcaccctagctgttccactctgcagcaatgctgctggctagacactggaagattggagcagaaagactttcgaaactcttggaggttatgaatacaagtgttcctctgttaaataaatccacatttatcaagtacctaccttaagccagccaccttgcaggtgagggctggaggctaacagcctgttttatagcacccaatcccagttatataaaattgctatccctaccccccaaatacacccctattaaaaaaaaaaaaaggctgtattgatgctggaatttaagagccactaccaaaaataccccttttaatttgctgtttgacttcaaaatcccgaaagtgttcatgcttaaagcagcaattttccccaacctcacccccaagagatttagaaaaagttaagtccagggtggcccctgccctccctccgccccctcctctgtatttttaacaagaccccaggtgactgatgaagttgctagagaaattacggtgagtgaaacactggcctagaggtaaagttaattgaccttctaagttgtgctctatcaagtacaaaatcaacttggaagattctgagaacagaataagtgaatttagtagaagtgaatgttcttccccagggccaacacaatgaagtctgaaatgacactttgtttcttttgggaagacttccctgacccctctcccgccaagactgttctccatgccatgtacgttgtatgctgtagctcaacacttaaccat

SEQ ID NO: 1882266 - DNA, 4001 bp, Homo sapiens; identical to SEQ ID NO: 585227

SEQ ID NO: 1882267 - DNA, 4001 bp, Homo sapiens
atttgaggatgttagctcattggtaacctcatttttttccccattcatcttaatcctcactgctttctaggtttaatttaagcaatttctattttttcagaaattcttacatttcttcaatattttcaaatatgttaacataggttgttttaaactatgtccttgtaaccttaaaacaattcctaaatatcgctatctaaattaagttcccaggaggtttaataattgttttcaacaaatagctcttatatttatttaattctataggtttagggtaataattttatggacacaaggattgtgaagaaaataacttttggccgtgtgcagtggctcacccttgtaatcccagcactttgggaggctcaggtgggcggatcaactgaggtcaggagtttgagatcaacctaaccatcgtggtgaaaccccgtctctactaaaaatacaaaaaactagccaggtatagtggcacgtgcatgtaatcccagctactcgggaggctgaggcaggagaatcactggaacccaggaggtggaggttgcaatgagattgtaccactgcactccagcctgggcgacagagcaatactctgtcatacacacacacacacacacacacacacacacatacacacacacacacacacacacagtattaggctttggtttgagatataacccacatactaaaatattagtatctttatacttataaatacgagtatttataagtatgaacatatttatatctcagtgtgtccattatatctcaaaccaaaggctaattataggtttgtatcttagtgtgtatgttataaaccttataaacattataaactttattatagtgtattaagcacttcacataagtaaggtatcacatacctgtatgtaccttttatcttttggtttattaacatagcatggctacggtcttctagacatataaccatcctagaattctcggaaggtaattctttggcagaagaaaacatgcgccctaggagtatgtttagatatgcccattccttgactgatgtccatacagtcatgctctcccaacaagagttgtgctgaaagctgcaagtttacaaatcttcctttccttctaatcatttagtctaattcgacactctaactaaaattcaacccccaaaatatgattccccatcttcacattatttttctcaggaattacataggttgtcacaataacatcctaatttgtttgttcattttcccaagaagaatggcattttcccttccaggagcctgctataatcactgctctgcctacctgaagtaggtgctgaaacagttccacccagaaacatcaagttctgctgtcaatactaccgagtattaaaggaaactgcttcggataccccaataaccagaactgttctgagtcctgtttacgaaagctgtagtcttattgacgaaacagcattttgtaatccttttgtaaactagctctttctcagaaattgagtggctctgaaaagggcctttgatttcagctttggggtttttgtttttgtttttgtttttgtttcttctagacattagacattcaagtcacttcgctggcttttacaacttgggtggttattcatactggactttgtggtagtggctcccaatcctttgggacagcagcacagcttggatgttgggcaaaacgtcaccctaagccattgtcactcgggccagcagcttgtcgagctccttgtcgttgcggatggccagctgcaggtggcgcgggatgatgcgggtcttcttcttgttccgacggcgttgcccgccaactccagggtgtcggaggccaggtactccagaaccgccggcaggtacgctagcgtgcagcccccgaccctctcggcatcgttgcccttgctgagcagcccgttgacaccgcccacggggaactgcagaacctctctgaatgaatagcgcgtacccttcccccgagtttccctagtctaagacatagcccaaaactaaaagttataacggaaaaagacacccgttaaaacgggtactcagcgtatttctagtctgacagcagattgtggattatctgattgattggctgatagccatctatccaatcagagaaccttactgctattgccttatttacatactctacctattatccaatcagatgttggatgcaaatgacgtaggttgagggccatgcctataaatatcacgcttcactccagtcaaacatcagttagtgatctccctgtgaacttggaagataaacatgctggagcttgcttcaaagggcactaccatttccgaaaagggctttaagaaggcagttgctaaaactcgaaggaggacaaaaagcgcaagagatgccgcaaagagagctattctatttacatctacaagctgctgaagcaggtccacgcggacactggaatctcttccaaggccatgagtatcatgaattcttttgttagtgacatttttgagcgcattgcctgtgaggcttcccgcctggcgcattatgacaagcgctcgaccatcacctccagggagatccagacggccgtgcgcctgctgctgcctggggaactagccaagcacgttgtgtcggagggcaccaaggctgtcaccaagtacactagctccaagtaaaacatgatagggccagcagatgagctccacaaaccaaaggctcttttaagagccaatgaaagtttctaatagggctgtagaatgtttattttattatagagtatgcctcgttgccagactgataattttttcctagactaggcataacatggttatctttaagtctaaactttgcattaatcaactgtatctgccccagtattggtgaaagctaaaatctcacagccgaggcaattaaatgggagctcccgtaatcctgggttcatggggatattctttctgtggacagtgccatggggaaatacggcttttttgtctatgacgttttctactacaaacactctacgatgacagcaaaaaaggcctggagctccccacttagggaagtctggcactgagcattaggctgtttgctttttcttgactttggccataatgtgtgcaaaacattctccaagtccgggtggaccagctccagcaccttgtagatgtaaatagaatagctctctttgcagcatctcttgtgctttttacgctccttttcttgcacattatgaaaagtgatcaggctaactccccttgaactgctggaatttgaggtccaaagcctaaggtttctgcgtctctgtgaactccagtaaactgcttactcaatatcacagttcttatgttgcttagccgcttaagaattatctccacagggatttccagttgatcccaacagaactgttcctgaacttctgcattctctatatccatgagtaccaccctattcacatggttgtccaagccagaaatgtattttttccctaatagtctctgttcaacctccatccacttcagtctctcaagatatggtaattttacttcctacatatttctgttgtctgattatacaccatctccaccgctaacatttttgtctgcatactcatgatctcacacctgaattagtttccaattaatctcactgctcttaatcttgcctccctaaaaaccactctccacccaactattttcattttttaaattgacaaaaattgtgtatttactgtgtacaacatgatgttttgaaatatgtatacatcgcggaatggcaatctaattaacatatgcattaccccacatattttttatgaaaacacttaaactctactctttgcaattttcaatacaacatattgttaccaactataatcagcatattgtacaatagagctcttcagcttattcctcctaagtgaaatttcatatcctttaaccaatatcttcccaccactccccaactctagccactggtaaccaccactctgctacttatatgagttcaacttttttttaattccactt

SEQ ID NO: 1882268 - DNA, 4001 bp, Homo sapiens
atcttcccccctctcttttgtgctagggattttatttgaggagttagattaacagaagagtgagtacccaaagactcaaatgcacaatgagcttctgcaagtgcccagctggtgtgacaggaggactcgggagtgtggccctaatgcttggggtagtgggtggggtgaggtaagaaactcagctgtaaaaagcccattttaaagcttgtcagagacaaaagggtgttgcctccaggagtctggttttttcacctgccgtgtcatctcctgctccctaggtgttgtctcagccaagcttttctccaccctcccctctctcactttaagccacagcctggctccttgtgcctttcctcttgtgctctgaggatggagatgtgtgtggagttggaagagcatgcagggaattgtggaattggccctgcccactctacccactcccctatggctccagctctccctccagcaggttttgattggacattcattctacacggggagctctggtaacccaccctcggttcctgtcacatggctccactgcctcatctcatttcccctaccaacctcaacccagtctttgcccgtccacctgttcactgcccaccatcatcacgctccctcctgtgctttctgctaccccgcaccttgagggtttccatggcgtttcccaacaccacccctcatcctacaaacaactctgcctatggacactgttgctatggacctcctgctggacactgttcagtgtcaccagcgctgctccagcctcctctctccccaacctcacccctctccagttcccagggctgagccattctgctggttagttctcagcacccctgtgactacaagtgcagtttgtccaccctttcccggacaatgaacctgaggtaataggtgaggggctttggggtttgaggggctgtcctcaggagattcgaatactgttaccctggaaaatgaggaggtgacatgagaacagcactttctaggggtgtcctaggtggatgtggaagggtctcagagggagggtctatgcagaaaggtggaagtcagtggaaaactaagacacctactctgcagtccttcctctcagggtgttggtgtaaatttggaccagaaaagtaagaacatcctgagagaaaaacaatgggtcatagaagccataatattacaccagccacaaggagacagcaggagacagaggtttttcccttggttactgctttcttggctgtctgataacctacactcaatctctttcacgtactcacacatccttatctcattcttctgacaggtttcaacccatcctaatactctaaccaagttctggggaggctgggagaaataccttcaacaagagtgcctttaggggctcgaacctgtccccctccctcccatcttgccttcattgtccagggagcattggctcctgctccaccctggagaatgagaggcattctctgtgagcactgaatcctcagtgatacttgtagtctggacacaccagctaagggctctctgcctgagtcccctcaaggttggatgcagatgtgagcacacccaggagtctgcacttgccaacctctctctctgaaaccttgtctgtccaaggttatcctgaacctcttggccccatttccccatagacaagcaacttgacccctgagcacctccccttatttactgtgtccatgttcctggagagagaatagacctggtggatagcaacctatcctataggaggtgagtttgattctccagctgtgatagaaggacactaggccgtggcaggagccccacatgctgtctcagagtctggttccataaagagaaagtcccctaggaattgttccctgagccagaccctccaggaatagcagctctgctcttacctggagtggccctgctctggaccacagatatgagcagcaccatcagtaatgctgtcagagccactgtccaggggccccctgaaacctgcaggatcatcatggagttggaaaaggttggcagaatgaagagagctgcagtcaggaaaacaagaactcattaaagggagctcctgtctgaaatattagagaccatgaacccaagcagtcttctgtgaccctaggattggacagactctgagaaaagaaccaatgggcactgagctttgtatgagtcattgctcactgggcagaaagttagtattaaagatctgacaatatagagccagtgatgctgttacgaggacagatggagaacactgacactcattttaaccagtcagagtcatgagttttggggagatgatgtgttttctttgctctgaaggtgatctcagatattctgctggcccacctacagggattatcatttccccaattctgccacacctcacacacccacaggacatggcctggtgtggaagaaatgctatctcaatgtgtaaaaggtcattcagtggcatgatttagagagattagagtatccatcccagaactgaaaatgaggcctggagtctgttttgcctttgttcaaggccgtgcttcagattagtgcacattcatattttcttcctcccacatgtctgtgagtcctgagatgtgcgggggatactggctccttccataggactgtcatcagggtcagcagggctcagtctaggggccttacacctgggagcatggacacaccacctacactaccatggaagtatgcagcttgaaggacactgcctgtcttggacttcagttctttgtcttcagtatggggatgatatgacctgcctttacagcagggctcttaaggtcaaattagatcaacggatctgtaattgctttggaaaaatgagactaaaaattatacagtgaatgaggaagaaatgaaaaaatgtcataaaagaccctacattttccaaaacatctgattctgtggtgtttatactgaatagtttcataaactttcaaagaatattactccttaatttaaagacctataaatgtgatcctgtacgacctcctaatctaataaagaaaatgtaaaagtggcatcatttgtttatataaatgttaaaatgtaaatagaagactagcatgtaaaattcaagagaagaaaataattatgcagtagaaggggccagtataggattgcggggaaaaagctcacgttccctgccatagtcaccaagacagcatggtactggtataaaaataggcacatagacaaagggaacagaatagagaacccagggataaacccaaatacttacagccaactgatcttcgacaaagcgaacaaaaacatatggtggggaaagacacccttttcaacaaatggtgctgggataattggctatccacatgtaggagaatgaaaccgggtcctcatctctcaccttatacaaaaatcaactcaagatggattaaggacttaaacctgagacctgagactataaaagctctagaagatcacattggaaaaacccttctagacattggcttaggcagggatttcatggccaagaacccaaaagcaaattcaataaaaacaaagataaatagttgagacttaattaaactaaagagcttttgcacggcaaaaggaaccatcagcagaataaacagacaacccacagagtagtcacaatctatacatctgacaaaggactaatatccagaatctacaatgaacacaggcaaatcagtaagaaaaaacaaacaaccccatcaaaaagtgggctaaggacatgcatagacaattctcaaaagaagatatacaaatggccaagaaacataagaaaatgctcaacatcactaatgatcagggaaatgcaaatcaaaaccacaatgtgataccaccttactcctgcaagaatggccatgataaaaaaataaaaaaacagtagatattggtgtggatgtggtgatcagggaactcttctaccctgctggtgggaatgtaaactagtacagccactgtggaaaacagtgaggagattccttaaagaa

SEQ ID NO: 1882269 - DNA, 4001 bp, Homo sapiens
cccttctggctgttccagttctctgcgacaggccgccccagttccgtaactgcctggaactcctccacgttgctgtcgaagcgcaggttctcctcccgtttatggatgtatctgttcaggtactgcacccgcttcatcccattgaagatatgacactcacacttagcctgctccaagaaacgtgctgtggggacacgaacgatccagtcacagggatggcctctgaggaagacactgacagcgacgccgccatccagggctccctgggtggggtgcgggcgctgggaatcttgatcagccccacctgcaaccctgaccatgcacagcccaggggctgatcctccgtcttcctgaggcgtacaggggtttgggggaccagggaggaaaactaccaatgattacaaggcttttgggaccccctccctgcctccagcctgttctggagacctccaagcaggagctggaggaggatccaccgagcgccgcagcccgtgcagcctcctcctgggagcctccaccctaaagacactctctgctccttctctcatcccacacgctttaccggttccttcaacagcacccaccgcgttcatcctgtgaacacttccttagtgataaccttgtgccaggcctgcgctgcctctaggaatccaaacgagggaaaacagacctctccactctgctgggggagcttaaagagcagtgaaagctatggccaaacaccaaacacacaagagcttagacagaaatgagaaatgtcagaagtgtggagttctagaacagagaataataggatgatctcaattacattagggtgccagagaaggacccgttgaagaatgacagttcagatgtgacttgacaggttaagcaggtgtgagccagggggcggagtggagcctgtgtgtctgtttggacaaaacgggaggcacattttcaggtttaggaaataccatgtacaaaagcttgaattgatgaacttcttcaggaaaccagaagaaagttcactaaagcagagagactgaagggaaagagggtaaaatattagcctggagacatcataagaagccaggtgtttaaaagcctcatgggtggcattaggattctggatttatactaaagacaatgggaaagtatcaaagagatttaaggagaataaaaccacgatcccatgaatgtccacaaaccttcctttgcatttctaaatccacaaagctcagaaattcagttaaaaaaacttgtttctacaactcatttggcaaatgtcatctgataagggtaagtggtcaaaggtgtctcagagctcttattggtgacatgtgcttctgtagtctcaatacatataaacatacatacatatatatgtgtaaatatacacatatgtaaaacactatgtatatatttttgatgttttgtctttatgtttcattgaagtgtgaaagtgacaaaaataacgtaaaaataatcctgtggttaaaagtgaaatgaataagtagaagcattttacattgtgaatggtatcaaaagtagaatcactacagaaatctgaggcatgttagtgaaaaataattgcagcagcatcactatttgtgacttacaagagcaaactgttgaaagttaatagagatagtgatgaccaacaactcatgaaaatgttgagaaatattgcataaggcaaaaaataaatatgaagatactgaacttgcattgactaaattgccacagtccctgttggactgaacaaaggaggatgaatgggtgaataaagacaaaagacagaagagtatatttggaagaaggggtcagggcgcaccttgctcttcgggggtgtttcagtctgtggcttgatccagagcaggcttgcaagactgcattcctcaaacaataggctctagatgtcccagtgcataacctcaaggagcccggcaccagggagtgattgccctcagcaaaccttctggcggccggcacagaagcgagtttgcccacattctgtattcatgataaacagttcgctgtttgatcatatagcctctgtggaatgctgaattggtgacaattctccagcctctggctctctatatttccctctttctgtttatgtattaattgaaagaatgtaaggccaggttgggcagctctcattttcccattggcggtccatccagttttacagactatgaacagaagacagagacaaaacaacatcatttccagaactacaaatgagatgttaacgtagtgttttagataggtccaaggattgaggctctccaggccttgctggaattcagtccagtcttctaaagaaggctgaaattcttgagtttgcttatttaagtcaaaaattttgttttgtaattcaccaatatcaaaggtgatgttggatgtgaaagctccctgcaaatggactttcacaaggtcccatggatactcactttggttatattctaaccatttggttacacaaatatgagggtgattaagatgacaaagcaattgctgctgcaactgtaaactttgtacttgttcctctaaccatacaacagtggatttcaacattgctacttcagtttgtaactcagtgttaattttattctgaagtagccacgcttggtcagccataggcatccagttctccatgtaatgagctgtttgaatagaactatgaaaagctgcagaggacatcacaacagaagttattagtgtgaccaaggaaactatagcaaaaattatcatgcgtaaggctctatggccatgatgagtaagctgagttagaaaaagtttcacataatgcaaagcaggtgtggcagcccaaggcttggaaagattaacaggaatccatagtccagggatgcaacccaaaattatcaaagtagagatattatgtgtttgcaatgtgctatgattaatgcagtgatataactggcaagatttacaggcaaaaacacaagctgtaaattgagtggtgatattccttacaaatgtaacattaaaactgtgtcacttactattgctattattggatgatatcccaacccagatgctgccattcataaatgggagtgctgccttccataacatctcttggattggtcctttcctccctagataataccactgaggaagaggcaggctaaagcctgctccatgccaagcaatctgggcagcagaataggattggatcccggtgtggtataaagaagaagcattataagcttgccaccaatgccagtgaaatttgtgccatgatttctgattattatcttttccatctagttgatctttaggtctccaatccacaatatctccagttaatattgattattttttagccagtgagccaagacacggggtccacagagggggataggaactattgaagggaattcattccgtatagtcagcacgattagggcaattggcctgggaatggtcggttagcacaccagttacattaatagaactaagacttaagaagtacatgagttttctgtagtgactcaaccatgtttgagcttgaattgtaagacagctatggctgagtgacgtctttgaggtgatacacaaagggagtccttccagcggagcggtataattgatgacattgttctgagagtctaactgttctatgtcaccgggagttaggggtcctggagcccacgctccctgattatgatcaatctcaggaggagtgtcactccagagtataggccatactgctggggggattgggaatatatgcccaatatatttttgcctctgcacagggaaaacataccgcacaagacattatgggtatcttagccaagaacatggaatcaggggtttttgcctgtccctgatgctccagtagtttctcagcttcctgcatggttttcctgagttgtccgcagtttatgaggtttgatattgccatgactctgattgtccttctctccatcttttcactcaggctcagctggctcatggcccgtactggagggaccgggcccatggtt

SEQ ID NO: 1882270 - DNA, 4001 bp, Homo sapiens
aactggaacctttgtgtaatgcatttggaaatacaaaatagggcacctgttatggaaaacagtgtgttgattcctccaaaaattaaaaaatgaattaccagctaggtgtggtggctcacgcctgtaatcccagcacttcgggaggcttaggcaggcagatcacgaggtcaggagattgagaccatcccggtcaacatggtgaaacccagtctctattaaaatacaaaatattagccgggtgtggtggtgggcacttgtaatcccagctacttaggaggctaaggcaggggaatcacttgaatccgggaggcggagcttgcagtgagccgagaccgcgccactgcactccaactttggcgacagagggaggcgccgtctaaaaaaaaaaaaaaaaaaaaaaaaaaaaagaagcagttggacacacggcctgtgttgggtctgggtagaggaggacagatgtgcagggcaaggactggaggatggggtgagcatggtgtgggggtgaccctgggggaactttggttagggtgaggacaggaggggagggtgctctgagtgagggtggggcttgggaaagatgagaacttgctgagggcccaaggcagctgggcaagaggtaggagcagcacaaggtcccaaggcggagaggggcggagggaccagggagggatggtccagcacccgtgggctggagtggggggtcctcaagagggtggggctgaggatgaaggagtagggaaggggccaccgtgaggcagggcccagagcaggcacctgcactagaggggagggggcatctgccctgccctgtgccctgcctaaggcccaaccaacattagcactagggctccccttgggtggtctagaggggagtgggacggagggaagaccctgggacaaaaggcggcaccagagagttagggtcagggagagttgggagtgggaggcataggggcagccctgggttaaggctgcttctaggaaaggcccataagggaggcaggagggacctgcggtggcgggggcaggggatgaggcagaggacatcctagaaatgtatcagagaactgcagataggaaggggtaacagggagctgggagggcaacaggacccaaggtgccctgagggcaggggaggaggtgggagggaatctggtgtccttagatcactggagttaatagtagcagggaaggatgcaagacaagagaggatccccggcagcgggaggccaggggagaatgagctggggatgagagaagtcgcaggaagaatcctctgcccggagcctgcagactccaacccctcagcgtgagggtcaggagccccacagtccccacagcagcaggaagcactagctccgggtcccgagaaaggagggccccaactccaggagatgcggcccaggagctgagaacacgtcggctccgggagaggacagggcttcagggaccttagggccgcccccagcaccgggggaggtggctgcctcagcggccgcgctggaagggccctcgaatgccattcacaggagcagcccaggaacccaggggcctcagaaagactggtttgtccgaaaagtgagaggagacggaggagaggagaggagagaaagtgcaggacaagaccagaaaatgcagggggcgggtgatgagcgatcccgaggaggactgaaaagagacgtggaagcagggttgaggtgtggcgggaacgggccgcgtccactccccgcacccccgacagcgcacctgagccccgcctcggccgcacagcgctcgccgctacccacccggacccccagaaacgccccgccgctgccgctccgccgaggaccgccaggaaccccacttaccagcagcagctccctggggtgcaaaaagggcagtgcggatcaggaacagcaggactaggctcatctccatggcccagactttgctttcctcgcagtggctcaagcggctgccaacccagcggagccgcgaaggcccaccagaaatttcctgtcacctggccccaccccagcgaccgctcacccaatgaaaactggcgcccgcagcttagggccaatcacgagctgggagggcggggccacactcagaaggggaaggttccagcggtcaggagacctggagaactttggctggcgggacctggagcccagaaaagggggagcgcgcggaagcgccgccaaatgcggggactggctccgagcagctgagagtacagccccaaccgcatgagcacgacctgggccctgccgccctccctgtattgcgaccaccccatccccgcacccccacccctaggatagcgtgcctcaccaagaccgtttcgccagccaccccatcaagctgactgtcattcgcttgttctttccaggacacacttacagaagagacgaggcctggttattcttccaacacactcccctcagccgcgcacagcgttactggctatgtggccagtgaccagatttgcagacctgtttccagacctcagctacctctgtttctgtagcacctgccccagctgatccgctaagacgacaaatctcttagacgtttcagctttacaatctccttctcctcccttttactcaaagctaggtcccctttcttatggtcacttcctgtaagtgtgtgaggtctcccggggctgcctctctattcagcccctgggtgatcaaaaggccaaggaggcagcttgccagtgtccactccaacaccaagctctccccagactcccttttccagcctgctttaggacatctgtacctctgagaccatagtagcttccaatgtgacaggtctacaaggacactctacacgtctcgcatgacatcatcctctcttcctcccctgtttctctttccgtggtgccttctgatttcccccttttccttctcaagtactcaaagctcctccaaccctattttgatcccacagccactactttagtctcggctttcagcctagatcactgcacaagattcagcctagatcactgtacaggcttcctaaacactgtgactgtcccagctatagtcagagtgctctaagacccccacagcaccccatctgctgaatgtcacacgtgaggtctctaccatggaagccacagctgccacaacctcctgtctgtcaccacccccatttttctggtgacatccctctttccagtgttgcagtaaaagtgggctccccaatctccttgccctgtcccaccgggatgccactgcctaagcagtctcctgcttccagattactgtcgcttctgcctctgagcccattagaccgtgtcacatccttaaatcttcccaattaggctggtcagagtgtagtggtgtttacaactaattgatcacaaccaattacagatttcttttttccttctccgctcccactgctttacttgactagcctttaaaaaaagaaaatcttcccaattagataatagcaactgtggcacgatgttgtgattatgctaaaagccactgaccagtacatttttttttttttaaccaggaacacatgcactttattgaatgccattgtagaagagtgtgtgaggataaagcgctgatacagaactcagctctggggccaggacgaggaatggaagttggagtatgtggaatacaggtcatgggcagagctcctggcctggatgatgcctcctgatctatcgacagacttggaagatcaacactaggatgatgacggtgagcagaatggtcatgatgatgcacacaatcagggctcagatgttcaggtacttggcagtggaggcataggcctgggccccagtcaggtctccaaccatcttcctgtccctagacttcagggagtaggtgaatgctatgaatcccaggcagtgggggttcatgaagaggatgttggacagggaccagacaacatagtcagacacggaggtctcgctgcagatatggatcatggtggacattgggggagcagggttgtggggcgcccccagcacagccacc

SEQ ID NO: 1882271 - DNA, 4001 bp, Homo sapiens
gaaccaggccagcaacgatgcccacgatggggacgttgggctgggaagatggctctgggaaaaggggggaaggtgagggaccctgaccctgctaaagctctccagagaggctccggctttccctaagagacatgacacccccatctccctccttaccccatctcagggtgaggggctcgggcagaccctcatgctgcacatggcaggtgtatctctgctcctctccagaaggcaccaccacagccgcccacttctggaaggttccatcccctgcaggcctggtctccacgagctccgtgtcctgggtctggtcctccccatcccgctgccaggtcagtgtgatctccgcagggtagaagcccagggcccagcacctcagggtggcctcatggtcagagatggggtggtgggtcatatgtgtcttggggggggtctgacgggaagagtcagaaaattcaggcattttgcatctgtcatgggacactcctccagcacgcatgtggccatcttgagaatggacaggatgcctggggtggggaagggagcacagaacccagacaacagcctggacacaggcacctgggataatctcctattccgtggaaaattctagtccctgaagagggaacagcgacttctggtcctgacctgagtggaggctgagggactcagaagagctggactcagacccccacgcacattgagtgtgaagcagagaacaaggcctgagaggaaaagtcacggggcccaaggctgctgccagtgtcaaagggaaccactcatcagtattccagggattgtcttcccttcatttcctcacagatttcatcccttaattgtgtcagagagcagggcggaccctcagagtcactctctggaaacccaggaggattcttctccctcaagaccagagggagggcgatattatagtgttggtcccatttgtctccctttcttgtgggaggccagccccggagatctacaggcgatccgggaggcgccctgtggcccctggtacccgcgcgctgcagcgtctccttcccgttctccaggtatctgcggagccactccacgaactcgccctccaggtaggctctcagctgctccgcccgacgggccgcctcccacttgcgcttggtgatctgagctgccatgtccgccgcggtccaggagcgcaggtcctcgttcagggcgatgtaatccttgccgtcgtaggcgtgctgttcatacccgcggaggaagcgcccgtcgggccccacgtcgcagccatacatcacctgcatggtgtgagaacctggccccgcccccgcggtcagcccggtcccccgagccccgccctgccccgaccaacccgcgggggttttggcctaaactgaaaatgaaaccgggtaaaggcgcctgggcctctcccaggtcaagggtctcggggtcccgcggtttcggggtggatctcggacccagagactcgaggcgacccggccctccgtgggggatggggaggggtcgtgacctgcgccccgggccggggtcactcaccgccctcgctctggttgtagtagcggagcgcgatccgcaggttctctcgttcagtctgtgcctgggccttgcagatctgtgtgttccggtcccaatactctggcccctcccgctccatccacggcgcccgcggctcctctctcggactcgcgtcgtcgctgtcgaaccgcacgaactgcgtatcgtccacgtagccgacggagatgaagcggggctccccgcggccgggccgggacatggtggtgtagaaatacctcatggagtgggagcctgggagcgaggaggagctgagaccggcccgaccctcctccctgcgcggatccccgggtcctgcgcccccgccgggcgggcccctcgctcctcccgaccatttccctgcagaccctgcactcacgcgcccaggtctgggtcagggtcagggccagggcccctgagagcagcaggaggagggttcggggcgccatgagcaccatcctcggcgtctggggagaatctgagtcccggtgggtgcgtggggactttagaaccgggaccgcggcggcaccgattggcttctctagaaacccgacacctagtgggaatgagaactgtgtccgcttcgtgagtatcaaggaagaaggacccgtcgcaggttgtgagaagaagagaaactgcggaggtggcgaatccctaaggcggggcatccccaatccatacaccgccttcggggcctgagaccctgagagccacgcctggggccctgggacttcgccctgaccccgctcctcctgtgccaagcgctctgtctcagtgtttccctgagtcttggcccaggagctgtctgagaaaccaggaagaaaccctcggcatgggccctgtccctctcccttcacttttcatcccggaatctccgtccctgaactggactccctgtccacctggactcttctagaagaaaactcacccacggagtttggtgacagagagtgagcttgctctgggaatggaggtgtagaaactgttttttgttttcctttttgttttttttttttattgggaaaagttgtgcctgagtgcatgagacagaatagagaccagtttatttatttatttgtttattaaatacattggatagcagaaccttggtaacccctgaatgatcaggaatctaatcggtaaaaaatgtgactttggccccatgatgtataaatgtgcccaaaagcgttacaacaggactcacaaagcttctaagtttcacttttgcagtgtacctgtgactcccgcttgtcatattttaaatttgccatcattccatagctttgagtttctgtgtgagtccaggatatctcctcaatacaaagtagcacactgtgtactttgcaaccaggtacgttacaaccaggagtcagtacaggctttattcacctcaaagttgcaactgttcaatgtagtcgcaatgcccctcactagtgctcatgcactgtctgtttttaggaagtatccactgctaagtgttgtgtatattttataggaacacttagtaatttttaaacctgattaacattaaaaaattagtttttaggcagacccacataaagtattaaaggccaactgccaaggacatcctgcagggctctgtagatggatgtattaaaatccataaaacaatgtatttaaacctaagaattctgctgctttcgaattctttcctctgctccttttcttcacctcctgcttctccaacccttccctccattcttctcatccttcaggccgtcctgtccccttagtccccaccacactgtcacttgtgaattgtgacactagcactgtcccatgacctgttacgtgactgttcttttcacagtggtcctgctcctgggagtcagaatgtgtcatctctccacttaaaacactccagtgtctccacctcggtcttgtgaaacttctggagtgtcaggcacgtgagcatatgaggggatatctggtttatcgtagggactaaattaatttttgtcgactgaatgaatgaaatatgagtgtattaaattgcattacagataattataaagtgcaaaacacggaagaagttcagaaagattttattttatgtaactagtgtgcatatcaattcatcaattcattcgtgcactaccacgcctggcgaaacaacacccatttatctgcttatagttccttgatcagaaatctgggcaaaatgtggatggaatctctcttctgggcttccaaaagctgtgttttcattttgaatcctccttcaggcttatacagaggtggcagaatgcagtttctggcagttgtaagactgaggtccctgttccttgctggctgtcaatgtagagaacagggagggctgtgcttgattcctggtcctcaccagcattctttcctacacagccccttcatttttaattttatttatttatttttttgagatggagtctcgctctgtagcccaggcttgg

SEQ ID NO: 1882272 - DNA, 4001 bp, Homo sapiens
gtggaggccaagggactcagaggagctggagtcagactccgacacattgagtgtgaggcagagaacaaggcccgggaggaaaagtcctggtgcccaaggttgctgtggggtgaaaggggaccgcggatcagtcttccagggattgtcttcccctccactccctcagagacttcatcccttaattgtcccaggaagagcagggtgggccctcagagtcaatctctgatacaggatctggaaacccaggaggattcctctccgtcaggacaggagggagggcgatattctggtggtggttccattttcttcccctccttgtgcgaggccagcccgggagatctacaggagatcgagcaggctccccatggcccctggtacccgcgcgctgcagcgtctccttcccgttctccaggtgtctgcggagccactccatgcaggtgccctccaggtaggctctcctttgctcagccacattggccgcctcatacttgcgctgggtaatctgagccgcggtatccgcggcggtccaggagcgcaggtcctcgttcagggcgatgtaatccttgccgtcgtaggcatactgctcatacccgcggaggagacgcccgtcgggccccaggtcgcagccaaacattccctggaggatgtgataccctggcccagttcccgcggtcagccccgcccaccgagccctggcccggcccctagcaacctgcggagattttggcctcaactgaagatgaaaccaggtaaaggcgcctggggctctcccgggtcgaggatctctgcaggtcccgcagcctcggggtcgatcttggacccggagactcaggggaccagggccgtccgtgaggcatggagcggggagtaagtgatctgcgccccgggccggggtcactcacccgcctcgctctggttgtagtagcggagcagggtccgcaggttcactcggtcagtctgtgcctgggccttggcgcccagtgtctgtaggtcccaatactccggcccctcctgctccacccaccgcgcccgcgtcttcatcctcagactcacggcgtcactgtcgacccgcacgaactgcgtgtcgtccacgtagcccacggcaatgaagctgggctccccgcggcccggccaggaaacggcggtgctgaaatacctcatggagtgggagcctgggggcgaggaggggctgagacccgcccgaccctcctcccggcgcggctccccgggtcctgcgccccagccaggtggacctttcgctcctcacggcagaggccgtttccctcctgaccccgcactcacccgcccaggtctcggccagggccagggtccccgagagcagcaggaggagggttcggggcgccatgaccccatcgtcggcgtctggggagactccgagtcccggtgggtgcgtggggactttagaaccggggccgcgcgacgctgattggcttccctagaaacccgacactcagtgggagtgagaactgggtccgcgtcgtgagtgtccaggaagaaggacccgtcgcaggctgggagagggagaagagaaactctgcggagatggggaatccccaatgctgcacctccccagcccatgcaccgccttcggggcctgagaccctgagagccatgcctggggctctgggacttcgccctgaccccgctcctcctgtgacaaacgctctgtctcaatgttccctgagtcttggtccaggagctgtccgagaaaccaggaagaaaccctcagcttgggccccgtccctctcctttcacttttcatccgggaattcctgtccctgaaatggactccctgcttccccgctgcttacctgttcccctggactcttcaaaaagaaaactcaccccagggagcttggtgccagagagggagctctccctgggaatggaggtgtagagacagaggtttttttcttttatttcttttttctttttctttaaatctggaaaagttgtgcctgggtgcatgagatagtatagagaccagtttgctttttgtgtattaactacagtgggtagcagaatcttggtaacccctgaatgatcaggaatctaatcggtaaaaacatgtgactttggccccttgatatataaagtgtctaaaagcattacaacaggactcacaaagctcctaagtttcacttttgcaaacaaggtatctgtgactcccgcttgtggtgttttaaatttacctttattccatagccctgagtttctgtgagtccaggacatctcctcaatacaaagtagccactgtgttcctatgtgttgcaaccaggagtcagtacagacttcattcacctcaaagttgcaagcgctcgatgcagtcacaatgtccatcaccagtgctcatgcactgcctgtttttaggaagtatccacatctaagtggtgtgtatatttcttaggaacacttagtatttttaaaacctgattaacataaaaacaattagtttttaagcagacccacttaaggtattaaaggccaactgcaagtaacaccctgcgaggctctgtagatggatctattgaaataccattaaaaaaagtgttcaaacctaagagttgtgctgcttttgaattctatccctctactccttttcctcacctactgcttctccagcccttccctccgtccctcttatcactcagcccctcctctccccttagtccccatcacactgtcactcctgaattgtgacactggcactctcccgttacctgctacgtgactgttctctccacagtggtcctgctaatgtgagtcaaagtgtgtcatttctccacctaaaacactccagtggctccaccttggtcttgtgaagcttctagaatgtcaggcacgtgagcatatgaggggatacctggttcattgtagggactaaattaatttttgttgactgaatgaatgaaatatgagtatattaaattgcatcacagataattataaaatgcaaaacactgaaaaagttcagaaagattttattttatgtaactagtgtatatatcaattcatcagttcattccattagtctgttgagcctgtgtatgaattttataagactgtgtaaaaaattatcacaaacattggctttaaacaacacccatttattgtatttatttatttgtttttatttattgtattcatttatttgtttttagagacagagtctctaaaaactgtcatccagcgtgaagtgcagtcacatgatcatggctcactgcagcctcaaactcctgggctcaaggaatcctcctgcctcagtcttcagagtagacaggactgcagacaagtgccaccacacccagctaattaaaaaaaaaagtgtagagacgagtgtctcactgtattacctgggctggtctcacactcctggctgcaagtgatcctcctgtgtcagctcctcaaatgttaggattacaggagtgcaccaccacgcctggccaaaaaacacccatttatctgtttatagtaccttagtcagaaatctgggcatgatgtagatggaatctctgttccaggcttcccaaatctgagtcttcattttgaatcctcctttaggcttatacagaggtggcagaatgtgctttcttgcagttttaagactgaggtccctgttccttgctggctgtcaatgtagagaacagggagggctgtactcaattcctggtgcccaccagtgttgtttcctacacagccccttcattttcaaagcccacagtggaggaaacccctcatgctgaatccctctcacactgtgaatctctatgctcaggaagaacccagtcctttcaaggactctcctgattaggacagtccaagcagcataaacccagcctgaagtcaactaattgagcccctttattatgtctgctaaattccttcacagcagcacctacattagagttggttgaataactgggggaaggtgaatgaccaggaggtggttgttggggccatcatagaatcactctagcaag

SEQ ID NO: 1882273 - DNA, 4001 bp, Homo sapiens
ggttctgacccccaggcctcagccctgccctgctgaaggtctcctgctttccctgagaggagacaacttacacccctccttaccccatctcagggtgaggggctctggcagcccctcatgctgcacatggcacatgtatctctgctcctctccggaaggcaccactacagccacccacttctggaaggttccgtcccctgcaggcctggtctccacaagctccgtgtcctgggtctggtcctccccatcctgctgccaggtcagtgtgatctccgcagggtagaggcccagggcccagcacctcagggtggcctcatggtcagagatggggtgctgggtcacatgtgcctttgggggatctgaggggaagagtcagaaaattcaggcactttgcattcctcataggacactccagcagcatacatgtgaccatcctgagaatggacaggacacctgggatggggaagggagcacagaacccagacaccagcctggacacaggaatctgggataatctcctattccttggaaagttcgagtctctgatgggggagcagggacttctggtcctgacctgagtggaggccaaggcactcagaagagctggaatcggagccacggacacactgagtgtgagggagagaacaaggcctgagaggaaaattcctggtgccccaggctgctgcaggggtcaaaggggaccacggatcagtattccagggactgtcttctcctccatttcctcagggacttcatcccttaattgtcccagagagcagggtgggctctcagagttactctctggtacaggatctggaaacccaggattcttcccattcaggaccagtgggagggcgatattctagcattggtcccattttcctactctcctggtgggaggccagcccgggaaatctacaggaaatgagggaggcgcccccgtggcccctggtacccgcgtgctgcagcgtctccttcccgttctccaggtgtctgcggagccactccatgcacttgccctcaggtaggccctgacctgctctgagtatttgtccgcttcccacttgtgctgggagatctgagccgctgtgttcgcggcggtccaggagtgcaggtcctcgttcagggcgatgtaatccttgccatcgtaggcgaactgttcatacctgcggaggaggcgcctgtcgggcccacgtcgcagccatgcttcctctggatggtgtgagaaccatggcctcgcccccgccgtcagccccgaacaccgagccccgctcccgccccgaccaacccgcggggattttggcctaaactgaaattaaaccgggtaaaggcgcccgagtttcttccctggtcgagggtctgggcaggtcccgcagcctcggggtggatctcagaccggagactcagacccgggacctgggctgtccgtgggggatggggagggatcgtgacctgcgccccgggccagggtcactcaccggcctcgctctggttgtaatagcggagcagggtccgcaggttcactcggtaaatctgcgcgtggcccttggcgttccgtgtctcctggtcccaatactccagcccctcctgctccacccacggcgcccgccgctccatcctcggactcacggagtcgctgtcgaaccgcacgaactctgtgtcgtccacgtagcccacggcgatgaaccggggctccccgcggccgggctgggacactgcggtgctgaaatacctcaaggagtgggagcctggaggcgaggagaggctgagacccgcccgaccctcctcccggcgcggctccccgggccgggcgggccactcgcttctccccgcagaggccctttccctcccgaccccgcactcaccggcccaggtctcggtcagggccagggcccccaagagcagcaggaggagggttcggggagccatgacccccatccttggcgtttggggagaatctgagtgcgggtggttgcgccgggactgtagtgccgggatcgtagtgccgggatcgcggcgaagctgattggcttctctaaaaacccggcacccaatgggagtgagaagtgggattatgtcacaagtatccaggaagaaggttgggagaaccaaaactcaggggagtgggcaatccccaaccctgtgactccccagtgcagtcatcgctcttggggcctgagacccagagagccacgcctggggcctgggactttgtcctgacctctcttttcctacgccagcctctttgtcacactgactgcctgagtcctggtcaaggatctgtctgtggaaactagggagagaacccccaggctgggcccagccccttcccattcacgctcatcctggaatcctcgtccctgaactggacttccgactccttacctctccccttggactatcctagaagaaaactcaccccagggaactttgatgccagagagtgagctcgccttgggaatggcggtgtagagaaaggggttttctctttaaacctggtgaagttgtggctgaaggcacaagatagagattctcatagtgaccaggtttttttgtttgtttgtttattaatacagtggttagcacaatctaacccctgaatgatcaggattctaatctgtaaaagacctgattttgcctgcttcatatataagtgtatccaaacagcattgcaattcgagtcacaaagcttctaagtttactttcccagactgtggatccatgactctgggttgttgcatttaaaattatcttcattccatagcccgagtttccctgtgtgagtccaggacatctcaatacaaagaagcaggatttgttactgtatattgtaacaaggagcctcaaaattgcactgaagtcaaaatgcctatcatcaatgcttaagcactgcttgtttttatgaattatgcacatctaagcagtgtgcacattttatttgcatacttggtatttttttactcttatgtttttaatcatgaggaggccattagtttttggcagtcccacaaaatgtattaaataccgaatgcatgtcaagaaccccctgctaggctcctccactgctttagagtcctttcccttgctccttttcctcacttcctgtctctccagcccttctctctgcccctctcatccctcacaccctcccctccccttagtccctgccaccctctcacccctgaattgtggcactaacactgtccctcacttcctgcccatgtctgttctccccacagtgctcagcagttctgctaatgtgactcaggtcgtgtcatttcttcacttacaatggttgggttttggtctaccattttgctgtatgttttcaatttgtctcgtatctttttgtttctattcctcctttcctactttcttatgtgttaagtaaacattttttagtttatggttttaattctagtggcttttaggtatatttctttacactaattttttattgttgtaagaattgaaacccgattccttgacttttcatggtgaagttcaggtaatattaagctgcatccagcaaaataaaggacacttgtaagagtgtagtttcatgtaacctaccattgtgctattcttgttgtatatattacatcaatatactttataaactcaataatacagtaatactttttgttttaagcattcatattgtcattaagaaaatgagtgtgtatgtgatctgtgtatgtgcataatttctgttgttaattatccctttctatatatctaggtcaccatctagtatcatttcccttcagcctgaagaacttccttcaaaattatacgtagtacaagatccctaggaaatgaattttctgatttggattatgtaaaagtgtcttcatttttgccttcttcccccacctttttttttcctaattggggcgtttgtgtataataaaactcaccagttttagctacaatgttttatgaatattggtaattatttatagtcatgtaactaccacattgcccagatagaggacagt

SEQ ID NO: 1882274 - DNA, 4001 bp, Homo sapiens
ccacggatacctgtaaccgggagcgcgcctctcaccttaaaccttcgctattttgactcctatgttagcatctccccaaggggtgataaaattcagtgttgggatgacctttctgtggtcacacaaaaaaccggctttgtgcctccgagccaggcctggccgtgtagccatcacagctgcaatgaagaggacttggacaatatccagcagttgagactctgtggccctgtggacagtagagtactaggaaaggcgcaagcgccttcagatctggaaatgcttatgggcatgccaccagcggaatttaagcagaattttccctggaagtattcaccaagctgtccctatagggtaaagaggaaataagctaaaggttgtggtacaggaggagataaaatagataattaatttatatttttgcactaaaattgtaattgagaaataaaagtgaaatgccaaaatcacatagattaactatcacagtattaaactgagacaagatctcaggttattttgctgttgttgttatttatatgctatgttgtccaggctggtctcaaacttgaggcctcaagtgatcctccggccccagcctctcaaagtactgagattacaggcatgagccacatgtgcccgacctcagaaactttttgtatagaattacagcactgcatatattctgacatcataatacaaaacaaaacaaaacacagatctcaggagacatgagagaaaaataaagataaataaaagagactggaagccgggcacagcggatcggatcatacttgtaatcccagcactttggggggctgaggcaggcggatcacctgaggtcaggagttcgagaccagcctgaccagcatggagaaaccctgtctctactaaaaatacaaaaaattagccgggcatggcagcccatgcctgtaatcccagctacttgggaggctgagacaggagaatcgcttgaacccagaaggcagaggttgcggtgagcctagattgcaccactgcccttcagcctgggcaacaagaaggaaattccatctcaaaaaataaaataaaataaaataaaaaataaaacaaaaacagaaacaaaaacaaaaaagagactggggtataaaacctgaaagttaccatgataaaaaaggaaatgtcatgagctgtggaatcagaattgagttgaaatcctaactctataatcttaagttatttaatttttgtaagactcactttcttcatctgcaatatgaggttaatgatacctaccttctacttaggttgtgaaaattaaatgagagatgaatataaataaaatgtttagtatagtagaagatcaattataattagatttttttataaagaaacgatggtcatattcaaagatgatacactgatcattttaggtgcacgttgagagtatgaaattgctaagacctaaaaatatgaaaggcttacaagtttaaaataaatgagataaagtaatataactacagtcttaaaggaaaatgaattaatgtaacatgaaatagtactgcttagagttccattgtacaagaccacccttaaagcaaatagctgaagatttttaacacataagtaaccctttttttttgtatgactgacataccaggagtcagctatctattatctagccaataatctccaaaagtacttggtaccagagctctagccaaggagtattctgtaatagatggcgacataacccaccagagcccttcctttgaggcgcctgaatgagagacatttagaaatgtcacagtgacacagaagttaagcacacaaagaattgctgtaagcagagaccaagaggcacagaatctgtgaataaacaagactcacgggtagtggaggaggcagaggcggtcactaaccacaggagcagtggaagtggctgaggagtgagggctgaagcaaaacgctggggaaggaagcagctgacactggctgccacagggacgtctcctggggttgcatctggctccagagaggctggcagacctctagagctctgttgtgtgctccatgatgacttctttctctgggaaacctggctgtgcagctgctcataggcctcccatctccctcgcttctcaatgcatccttacagcagactctgtgaactgagcctgaatatgcctctgcctctggcaaattggaagtgtataattaacgcactatcctaagagcaccactggcttgaataatgcagagaagctccctcctatcaccctacaaacaggctgaactgcctcacctaaacagcaactcaagaaaaccatacctaccctcacattttctctactgcccttaccagcatctctttatttgtataacactttatggtttcaaacactttcatgctattgttatctcatttgattcccatgatgatttttttttttgaggcagctgagtaaggaacagattcctcttctatggttgacatagatttgatgatgtatacaaagtcaaggggccagtttgagatttctaagctcaggaagttgtgtattacagcaaatcctcaaagccagaggaaagcagttagaagaacagtgggccaaattgaacggaaggagaaaccaaaccaatggaggatgtgatgcccatatggcactttatagtggatgtaatcagaggagccccaagggaatcctatcatgcccactgatctgaggactcttgcagttcatccatttgtcccacctcctttcactctcaaaattgtcccaatttgaacaataggtgtgttaggattctccaagagggacagaaccaataggatgtaaatatatagttatagacgtagactgatgatatagatagatgtatggccagatacagtggctcacacctgtagtcccagcacgttgggaggcccagacgggtggatcacttcaggtcaggagtttgagaccagcctggccaacatggtgaaccccttatctactaaaaatacaaaaattagccaggcggggtggtgcacacctgtaatcccagtttcttgggaggctgagacaggagaatcgctccaacccaggaggcagaagttgcagtgagccaagatggtgccactgccctccagcctgggctacaaagtgagaccctatctcaaaaataaaaataaaataaaaataaaaatatagatctatcacaggggatttattggggagattggtgcatgcaattatggagtgtaagtccaactgcaggccatctgcaatctggagactctgggatgctcagagtctccagactctgataatatggctcagtccaagttcaaaggcctcaaaaataagaagctgatagtgtaactttctgtccaaggccaaaggcctgagaacctgagggttgtgggggtcactggtataagtcctgaaatccaaaggccagagaacctggagctgttatccaaggacaggagaaaagaagagtgtatcccaactccagcagcagatggaatggatggacatactcacctttccctgttttgttctttctgggcccccagcagattggatggtgccggcccgcatggaaggtgggtcttccccacctagtgcactcagactcacttgctaatctactctggaaactccctcacagacacacccataaataatactttagcaagtttctaggcattccttaatccagtcaagttaacacctaaaattaaccatcacaataggttatatggtcaactctattataacctgaggtattgctagttaacaaattgagggaagagaaaagtatacttttctttataacaaggacataaaactatatttaggaaaagtatcttttggaaaattattaatgatataagtttaaaaagtgaaaggtttggctcacatttaagcagactgttgaaccaattagaacaactacattccttgagcatttcagttcatgtttctgcagactgagtaaatgagtccattgcatttgtggcatgggtgttgtcttag

SEQ ID NO: 1882275 - DNA, 4001 bp, Homo sapiens; identical to SEQ ID NO: 585316

SEQ ID NO: 1882276 - DNA, 4001 bp, Homo sapiens
tacattgattgattctcagatattaaaaaagcagctttgcattcccaagataagccccacaggtcatgatgtattgtccctttaaatgttgttgagtttcatttactaaaattttgttcacgacttttgtgtctatgtttatgagtgatattggtctgtaactctcttttgaagtctttcactggttttggtatcagagtaaatctggtctcataaaatgaattcagaaatatttttgcaatgctcattttatgccttgcagaactttgagaaatattacgcataaagtgtaacatgacgggtgtcattcaaatatatgtctcaaatataaaataatcagtttttgccttgttctttcttttcctaatttccgtaacaaacatgtcctattcgtcttcacatctagtttgaagttagctgaattagtgagtgatttataatcacagatttcagaaaattagagctaagtgattttagggactgttgtcactatatatctagggggggaaactgaggcctttagaagttgccacgctcttccagtacagagtaccttcccacgctttacagattcccaccatgtaacattcattaaaagcctttatgggtaggaaatgaataaggtacctgctgtgtatatatttacattataaagtttacgtattcattcttactctttttccttcctatgaagacacacactgttcttattcttacaatctcaaagagagagcagcgaaacaatgaaacttcaggattgtgtggcctggaggctactagttgaactgggcatgctcagtcgccaggcagatttttttcggtgaagtggaaactacaacagcgcgtaccgcgcgcggaggtgggcgtgccctcgtggaatttagaacgttgcctcagccaatggggcctcgcggccggctggcggggctcctcattggagcagcagggaggcgagcagagggcccccagagggagccgcggaggtgcaggtcgaagaggccgggctacgtcgtgccctgcgcgtgagcagctgcagaggcagaggcagcatccagcggcggcgccagcagttccagtccgttgctttactttttgcttcaccgacatagtcattatgccgaagagaaaggtaagtcttaccaaaaaaagatttcaaaagccttcaaattctgcttacagtaaatgctggcattgcaatggctcgcgcagaacgcgcgcggtagtaacccggggattgggaatctttgctcctccacgcttgtttttagatgcctgttgcagacgttcctctctctgtcccccctacccactccgtcctcatcgatctcttaatgttactttctctccagtgacgcggtttcccttctttttgaactcattctcgctggaatgttttccacccccaacaacaagaagcaaaagcggctttccattccgaaagggagtttcctctttgcaaactgccaggttgcgaattagtgtgaagggaaaacagcgagaggagaaaaacaagtacaagcgtaaggagagggaagaaaataaatcaggcaaatgttgggattattcccatgcggctgtactcgcgggctgggtgcgctgcggtggctcctaggctaagggaaagagaaagccatgtttaaaatagcgctcaccctcctgctcgcctccgctgcagacccgtatgtaccaactccagtgtcaatcagggctggggccggcgaggcggggcctggcggcctggacctacccgcagttcggggcgggagcggtggagttggcagcgtggaagacgggacggcgccggggcgtccaatatggctcgtccaaggtcagggggccaccaggtcctccccagcgactggaacccacactcggttggggaaggcggggtccgcgcgctatccgcccctctgcgcgtctagcgaactggagtcatttttgtcttgtcttccgccccttgcggactgtcctcttctgcgcaggccccggacaccaactactacattcagggacacaaatctccctcggggtggggcttcgacttgtcccggggagggaagggaaaggtttcctcctccctgagaaatcagtgaggatttctcagctggttcctaagcaagtgctttgcaccctcccaccgccagcctcagtgtttccaacagtgtcaacgagtgtgggtattaaatttgaagcaaaattacacctaatgtcttgctttatcaaagaccatggactaatttgtgtgtgagagtgactgcattattttaaaatactgaagttttaaaaattcaaaagctttccccttcttatatgttattactaaaaattgggtagaaacttgtctcctaccccactttttaaaaataattgaaagtgtttaaaagtcttagagtttgttgtgcacatactgtgtccctcacgctgtgcagaatttgacttgcattatctcatttaatcctgaaaacagcttgagcggtgttacccccattcagctgggacttaaagacataaattgtcctgcatctcaccaaccaataactactagtaaagatttaatcagatgctatagatgccaaagtcttattctcacccatttcgtactcacttacgaaagggtgggtcaagaggaattaaggaaatccaaaggtactcccagtttaagaagacagatggcatattaagagcactaatacttgagatttattatttaaacttaattttatgaaggtattttctagccctgttttactagaattaggatattaagtgatgtcaccattttcagcattttgactgagggttaatgatggattggaaattctagtagagacaaaggaactaatcatcaagatacgggttacagagtaagtgagctggaggccatctttttttcctgggaattataaccattgtttacataaacagtaggttaggtgtgcacactttatgtataatggaccctgacgatggaacccttccttgctgtttattcaagggccagagctgctgaaaccattattcttacttcccctgtctgcctctctcaaggagacggaaggaaaaaaaaaaaaaactaaaataacagtaaaattacagctacagttttatttccctggaaggcagggaacccccatgcataagctagccaatggtcctgagactaggggcaaaactgtgtacaggcacctgtgtgtcattcctgaggacatcagagtgttctccggtgatggaaaacctctccttgattaataggaaggctttccatttatacctgaagcctaacgacctcagttggtacctgggcaggaacaacctcagattaaacacggcgatcatggccatccatctatcagtcaagtcttagagcagcctcatggaatcctgaagttcactggaacttatgtgaggaaccactgtcattaggtaaagcctgcttagatacaaaaaagaactggagacaatccatgcatagctcttcaagatcttcaaagctggggtaactgccaaagcatttacatactacacaatatttttcttgactaaagaattgtctgctctacaatataataagcttttaaaatgtccccctagtacttttttgccttcttagccccctgtatcaacctttcctagaaatcaagaaatgttatttaatgaacatctgagtaagttgttctgcagagcaagaagtggtacagataaagtcaatgaaaacatctggaatcctagccctgttgtaatgctgtagggacatacagtttttgccctcttggaacttgtgtttaattcaatgaggtgataagactagcagcacaaaacagttgaataacattaaaactgtgtatgtgttccagaatgtgtagttatagatcccacaagcagtaggacagataaggaaagttaactttaggctggtcttaaaagtgtgggtaggactcaaatatacaaagaagtcagagtcattttttgttaccaggtattcaagtgtgtctcctgattgt

SEQ ID NO: 1882277 - DNA, 4001 bp, Homo sapiens
taaaacttttaaaaaatttagtctgatggcattgtaccactgtgccgtgttcacgtaaccctactaataatcaccctgacacacagccacatgcagatggaggaacttccctaaaagcaagtttgagggattaaatatcatctttgtcatcatatcctcctcttttcccttttcctcctcctccttgtcatcactactgaggacagcactgctggctgtgcccaggggcccttcttcctcaacgcccccagcaccacccaaagtccccctctgtggaatcggagcactgagtgtgttggcctcagggacactgaaggaagccgcccgcccgtcctctcagccttggagtctgttcaaccattatcattcaaaccaccttccatcaaaggtttgaatacaatgagcagctgctcctgcattcctccaggacacaggttcaccagctgggtgtctgtcaaagacaatgagcctccgagttggtccaaacttgactctccttgaaggtcttctctggccatcctcaaaatccacaggatgaaatgtgttcgatgaggacaactcactcgtgtcgcggcgtttggatgggctgcggcgtggccgcttctgccgtagagacggagccttcctgtggttcgcgcacttccttcctgaagcctcatatttcccattccgttgatacttggccacctcaacctgcaacgtgcagtttccagtgtcatcttcatccaaatgcatgaatgcaagatccacagcttccctcttccaatgatcgcacagcctgtctcctttaagatgtccttggttatctctgtaaaacttgaccttaagttcttctgtctggggatcgctcataataatgccaaatggacaggcgtgtgaatgcctccacggtaacgaccagaggcaaaccggcacatacacgtttgtatttctccttcttcagcatgaagccttcctttttctcccctctttgtgggatcagtgggtttggggtttttcttggtggcagagcagcgccgtcaccgagcagccgtcgctggcctgatatgcagcggtgaagtcttcactggtttctcttctgctcctgtgtgcttgcagaaaccgggctggctcttgattgggattgtaggctgcagaggctggggaagggcagacagcctcgggagacacgccggaaagggcggctccctcgtgctcctcagtgactcagggttttggccacatagctcccctcctccaccctcgctcagcaggctgcatccggggcggggctggcaggcaaagaggctgtgtcacagcccttcagagcctcaagctggggtccctagggtttctggacctcagatcactgtgaggcaggaggtcctccaccctccctccggcaactctgaagtatgggaaggtgcgttctcgaactgccgaggggcctgttcctgtgtgggttgagaggatgggaagttgctgaaatccaacctctctgagagccggtgctgtcaccttggcctgagtatgctgaagacattaattccggttcccaagcaaaactgttagcaattcgagggctgggctcttgcctatgtctcatctcctgttagtaccgggcaccctgatacattttctgccggtttttaagaatttttttttgagacggagtttcactcttgttgcccaggctggagtgcaatggcgcgatctcggctcacctcgacttccacctccctggttcaagcgattctcctgcctcagcctcccgagtagctggaattacaggcatgcgccaccatgcccggctaattttgtatttttagtagagacagggtttctccatgttggtcaggctgaactcacccgacctcaggtgatctgcctgccttggcttcccaaagtgctgggattacaggcatgagccaccgcgcccggccggtttttaagatcttattgctgaaaaacttaaaataaaaaataaattcagtatcagcagggcagcaggaattgccattaaaaaaaaaaaaagaaaattggaaatgactgcagccaggtgtgtgtgattgggccccgcgacctttttcttaggcaaacagggctttgtggatgcagaaagacttctttggttgtgtagtttgtctcagagcctctcgtgggtggagcctggtaaaaagaggaaagagactcatgttgctcaatgtgaggaagcaccaggaattttggagaagttcccagcagctcaggagagtggctggtgccttgtcccaggggagagggaaataagcacaggcctatttctttctcaagacggaaaaaccgagccccagaaaatggcgataagatggggatgcaggaaaaagctagctaatgaacagttcagcagtgggcaccgtgtgggaacctctcctaagccgccctccctctgatggatgcatgctcaagtgatttcgttggcccttaaaggaaagtgttattccatcctgtaatcctagcactttaaaaggaggccgaggtgggaggatcacctgaggtcaggagttcacgaccagcctggccaacatggtgaaaccccgtctctactaaaaaatacaaaaattggccgggtgtggtggcatatgcctatagtcccagctacttgggaggctgaggcaggagaatcacttgaacccgggaggtggaggttgcagtgaggtgagatcgtgccattgcactccagcctggccacagagcgagactccatctcaaaaaaaaaaaaaaaaaaagacatctgcccaagggtcatagctgtagaggggcagatgtggtttgaacccagggcgtctggttcctctctggaagcaaccaaagtgcctgtgattggggtagtgacaaagcactctgagccgctgcatggcagatgctgtgaagagtcatctttgcctgtcccatatctattcccattttttctgattgtaacaccttgtttttttgtgtgtggtgggggaaccatgccctttcaaccaagctatgtggtgttcataagggtagcccctcctccgaccccaggagtggcagttcacagccctgactgatcacagtgttccgtggcctagctgtaaccaccccagggagtgagactgaactcaggggttcattggacctatcaggaaagagagacctttcttgtttctggacttggagctgtgatgaagtaagtgggtcaggggccaacacatagacagcgttggcctacaaatgcagcccaggcagaggacggtgcagccaagccacacagagagacaacttcctagtgacacgctgtgaactcctgcatccacccctgcctgaactggagcttttcctcttcagctcttcagttatgtgaggcaagatgttgccttttttgcttaatgctgtgagttgagtgtacagcagttacaatcaaagaatcctaaataatgctgcaagcatggtgactatctacatgggaatatgcagtactccagtgaagacaaaacataaattaattttggaatctgatgaccataatctaaaaacattcatagaggtatataaaaattataacaaaatttaaagtagcatatctcctcatgaagcaggttaagtgtatacacaaagaaggaggaggaaaaggtgagaaagaatctgcccttgtggggaagtgacagaggcagaagaggctgatgcagtcctgcatccaggcccagctctgccagcagctgagtacccctgaacaagctcccccacctcttcgggcctcactttccccatctatgaaagaaagggagtctagcttccatagctgccccagctgatacgcaaggtgccagtgtgtcctcagtcctgtcaggagaaaccttccccactagaatcccaggaggagcttgaaatcctgtctgggatcctgacggcccaggtgctgaccctgcctcgggttgtgtctgctaagaagtctgatttctgctcatctctccccatttctttcttcccataaagtgggctgatgcgctggaacg

SEQ ID NO: 1882278 - DNA, 4001 bp, Homo sapiens
ccaagctcttggaaacagtacactggattctaaaatagaaaaacaacagtacagaattatgatcattgctctagacttactggatttaattattggttcaaataacaatgataataataaaaccaactttaaattcagcacttttttctatgcattgtcaaccccttttgaatttcatctttgaccctgaagtacagatttgattctttcttcagaatgtttacatttatttcaccttccaaattacctcctttttccttggtctctgagtttcagaggtacctgatgcataatttatgccctagagacaaaaatattggctgccaagatgcataaaactagtggcccagttgtgaggatgaattaagaatggacatcattttatttcattttaatttagttttgtttaattctagtttcagttttgatgatattttgccatgcttcccaatttttttctttgataacaacataattcagggagaaagtacaaatttgccacaggttgaacacttaatttgtgttccttaaaaaataatgctgtgcttagtttattgccaggaaacttcttgcttgatgctttggtctgttttgtttttaatgttttaaacaaagaatattccggcctttacttcagagtttcttccaaagatacatatgcatttctaggaagaggaaagaaagagttgtaagacatctatcatcataaaaaattaatcacttgactcatcccctgtcctgcttgtttcagttagcattttcagcttcccaagaccatattgttctacatctgtatgtaagagctctgatgtatctagaatttgtaagctgtccagcaaaaatgaaaaagggtctctccattcacttttcaatgattaaaaaaaagagagaaaagcatcaattttatataactctctcttttactcaaatcttattctctgccttgtgttaaattccagcaaggccctaaacaattgaaaaatgaacaagttggttgatctttagcaagtgaatacattgttccctaaatggtttcaattacacaggttagctctgtgggaggttgcactcactgtgatgttctaaggagactacatggtttctgagaagataaaatattctgtagcactgaaacaggtcgaatataatcctaggtaatattctggtgctgtgttgtggatttgcaataggtcaattcagacaaactggaactacatttcccagaattcctttatccgcagagttctgggttgggggtggagcataagtgaatttgcacaagatttgaaaggtaaaagtgaagtagcagccatactctttgcattctataaaggtccacaggggcgtcaggctgtgcttcagacagcatacatggttgtcccagtgccagttcaactggttggctggggtagcagcctagtgcagctcctcagctccttcccactcccctccttcagcttatcacacccatggcagcagcagatttagctccatgaggaaaagctccagcttctccagcaaatcgattccataatcaaagatggaggctaacaggtggtaagaggggctaatgggtcccagttggtccttgtgggaaccagctcagcctcaagagttccagattgttcgaacccctctctatttcacgccctcttttctcccaacttcctgccccgtggacttaaagcttcagcaccagatagtgaaggaacagccccacactgactgcttcatgtgtctcagtccaccttcacgtgtctcagtccgcttaggctgctataaaaaataacaaagactgggtggcttaaacaacacttactggatcacagttctggaggttgaaatgtccacgatcagagttcctgcatggtctggttctcgtgacgactcttcctggcttgcagattggggccttgctgtatcctcacgtggcataaagagagctcttgtctcttcattcccttgtaaaggctccaattccatcatgagttccacccccatgacctcatccaagcccagttacctcccaaaggccccacctccaaataccatcacactggagattagggtttcaacatattgattttgtggactgcaaacattcagtgtatagcaaccagctcccacttgtagtggacctgcttttctgacccaagctctaaatgctgcacactgaaattgccttcttcatgactgttcttatgtgctgtttacttcactctttcccatacctctatctctcagaatctgatctaaacttacatgaaaaactcaaagcctatcttttgcatgaagtcttccctgatatttatggtaaaaattaaccactttctcctgcatgtccctaagcactttagttatatctctctttgtgcacttaatgcatcctgccttgtatggcagttctgtgtatctctctctccccttgtaaatttcttgagggcagaatgatgtctcactcatctttgtatccccaaaagcaactatcacagtgccccatgcagaactggagttcaataaatgtctgttgacttgaagtctggtgcagcttgctttatcctctggcactgcttgggttgtcaccatgactgtatctaaaggacaactttacccttctgggctctctggtcttgttttatctatttttatgatgtgtttatacatagtccctgctttatgccagaagccaagcactttggtgatacattttcagtcaggttaaatgtttggcattttttttcaagtggaaaggccctcaccggatgtattaagagttttcttttgaaatcttatcatgaaaataaatggggcaaataactgcatacaataaggcactgcatagttaatgtagcaaagtatcctgcacacagcaagctcataggaaacataggttgaatgatggaggaaataaattgatgaatttactaatgaatgaagagcctaaccaagggacaaagccatcaggtatatgtatagtactgccatttttaatgacatgatttgagactcttccaaagaaacatagataactacctaccttgatgtagtcctaccaacaggcagaggatttctctcctccaaattgcagtagttcatcattcttgcttaaagtttgctataagctatagtttataatgaactataatttatggtgtatacaagataggtcttacctacatttcaaaaaatagggaaccacagaacaattcatggagcatagtgtcgaaggaaaggaactattgtcagaatacatctagatctattttttttgtctaacatctatgaaagaaaggatgaatggtaatgcattaaatatttttctaatattgctaaatgagaattttataaaattctttcaactcccatcttgtatatgagattctagaagttgctataaattgtgctagaaaatgggtacagctttgtcttggaagttttatgtttcaaaacattttcccctcaaagaaagctttatttccaagtcctgaggtgccaggtaaaaatctataaagtaaaagtaattatctaatatctcacttagtaaatcatcaggataaaacttctttaggaaaaagctagctccttttgtttgtgaggaaaaaagaaataaaagagactctgggaaatttttcaagtgattttaaaaagcaaaacttttactctaatcattttcttgtaaataaatctaagaaaataatagtttagcttaaagtaaaagtgtcctggttcaatttgtgtccacttctatgcacaacctatcatgttacctttcacagtgtctttggttgcactttacgtatcttaagcttatcctgctcagtatagttatcttcacaaaattgctttggtaactcaggaactgcaacatttctgttgcctcattatctaacaatgtatccaaccaatcaaaactcaagagggtcagagaagatcctgcaagtcattcatccaacaaatcttcattgagcagtaatgaaacataggctctggttttcaattta

SEQ ID NO: 1882279 - DNA, 4001 bp, Homo sapiens
cagtcaaccttcttgtacacgtctgcttgtggacatgtattaaaatttatctagggcagtggctttcaaacttttttgtccatgactcatactaaggaatgacgttttacatcatgacacacatttgtgtatgtatgaaactgaggagggggagagagattcataaagcgaacacccctatgacctgagagacactgatgttctattctccgtctgtgttttacaaattctgatcatccatttaaatgactttacgacccactaaaatggacttcaaattctgaaaaacattgttcttaaggatgaatacccaggcgtgcaactgctggatcaggaaacacggacatcggacgtcgtcaacttttccagatccttaactgttaaatgttcttatctaagcgcatataaatttaccactatttaacttcagagcgaaaagcgtgaaacatcagagaacattttatcttttccctcggtcattaaacagtattaatcacttaccatgtgctaagtaagcaatctctgagcccagcgagaccggtgggttaatacgcggaggggctgcgggggaggacttaggggaccaggacctcagtgaggccccagaaagcacccgggaggggcctccgatcctgcctgggagggaggggttagaggaggattcctggaagaaggaggacctaagctgggtgtttctatttttgatttttattggtttcctaaaacatgaaagtaacacatttgatgagaaaaaatattcaaaattacaggagtatattcagtaaaaggtagaaatccccattccgccctgaaagttggatgcggagactaacagaagtcgcattatcagctgtcccgatctaggaaatttttaggaccccacgtttttaaatacttttaagagtatgtctgatacagtctgtaatactaaagcatcaaaataatcatattttccataagagacgaaagtgcaaacagttactgtctagtcccattattacttggaacagactttttcttcttttccttgttctgtttttttcctggcccgttggcgaggttagagcgccaggttgtaagaatcgggtctgtggacctcataccagataggcgcgaacgcctctggcagcggcgtccagggggtccggcggcactcgcggtggggctgcctgggttgcgggtgacgatctgcggggtcccgcacccggccccgcggagcccggacccgcacgtaggcggcgcggcaaaggcacaccctcctcgcggccgcgaacccagcgccgtcctcgcagcgcggcaatgcacggccaccgctgcccccagcccgcccgccgcagccgcgagcacccaaacacctaccctgcggggcgacgacccccggagctcaggcgaggccgctcgggcgtgccacctccgcggccatgacggcgacccggggaagcgccccgcgcgccaaggccccgcgctgctgagctgtgagcacggctgccccgtccgtccgtccgtccagcacccgcccggagagtgaggccagagcacgccccagccgtgtctaaatcaaggctcggggcggtaccgacgggctgaatgacaaatggcagatgccgtgggctttgccgcccgcggcagccaagaggatggctgcgccgaggaggccgcgcgcaggcggggctcgggagccggaacggcgcggccgcgaggagggcgctggggcccctggcgggggcgtcacgtggcaggaggaggccccgccggggagctgggggtcggcggccgaggcggggggagctgagcggcacccacacgtcctgcgggccgggtcaccggtgggggcaaagccaaggtcgcccaggtacagcgctggcgcaggtagacccgagccggcctggggtctgcagcggggcctgctagccgaagtctccgccaggatgggccgccagagcccaatcacacatgagaaacgcgacagatgctgggacgctgcaataggccaaactaacttacctcctgtgccagcagcgcccaagtgcagctgcccaaacgtgagcactgaccgtgagccaggcactgtcctaagcactttgcaggtaaatacgtgtaatcctcacagcaacactgggagaaatacccgtctcacagctgaagaaacgaagacgcagaaagggtagacagaagtaattttctaattacggtatcacactacgtctgcttcatataatttcaaatttttcatgttactggaatttaagaaaaataaactgaagggaatctctattgctttcttccctaaaagacgtgctttttaaaaggcctataagcattacgtaaaaagattaagagaggtgtaaggagctcactacatgttcgggtttagaaagtctcatagctctgaaagatgaggttaattagcatcatacacctccacctacctttagggggtaaccctgcctctcaatttccattagttctgttactttcggcttcctagcaatgagaacatttgcaattgctctgcaactttatttttccagatgttgtcttaattctatctttaaatgaatttgatattcactgtaacttatctatccctgaatttttatttttatttagttcttgatggacttccttcattttcaagtcatattcctaaggagggtttatagagtgctgccatgtttgagaagatctggtgtttttctctatacataaataaaaagtgagttgggtaaatattttcaattcacaccttccttcaaaacctaacagaacaagatggcaattgctttatttatttttttattatactttaagttttgggatacatgtgcagaacgggcaggtttgttacataggtatacacatgccatggtggtttgctgcactcatcaacccgtcatctacattaggcatttctcctaatgctatccctaccccactagccccccactccccaacaggccccagtgtgtgatgttcccctccctgagtccatgtgttctcattgttcaactcccacttatgaatgagaacatgcggtgtttagttttctgttcctgtgttagtttgctgagaatgatggtttccagcttcatccatgtccctacaaaggacatgaactcatccttttttatggctgcatagtattccatggtgtatatgtgccacattttcttaatccagtctatcaccaatggccatttgggttgattccaagtctttgctattgtgaatagtgcttcaataaacatacgtgtgcatgtgtctttacagtagaatgatttataattctttgggtatatacccagtaatgagattgctgggtcaaatggtatttctggttctagatccttgaggaattgccacactgtcttccacgatggttgaaccaatttacactcccaccaacagcgtaaaagcgttcctatttctccacatcctctccagcatctgttgtttcctgactttttaatgattatcattctaactggcatgagatgttacctgataagcaacttcagcaaagtctcaggatacaaaatcaatgtgcaaaaatcacaagcattcctataccccaatagtagacaaataagagagccaacacatgagtgaactctgattcacaatggcgacaaagagaataaaatacctaggaatacaacttacaagagatgtgaaggacctcttcaaggagaactacaaaccactgcttaaggaaatcagagaggacacaaacaaatggaaaaacattccatgctcatggattggaagaatcaattatcatgaaaattgccatactgcccaaagtaatttatagattcaatgctatccccatcaagctaccattgactttcttcacagaattagaagaaactactttaaatttcatatggaaccaaaaaagagcccgtatagccaagacaatcctaagcaaaaagaacaaagctggaggcattacactacctgacttcaaactacactacaaggctacagtaaccaaaact

SEQ ID NO: 1882280 - DNA, 4001 bp, Homo sapiens
gggaaggttccagcggtcaggagacctggagaactttggctggcgggacctggagcccagaaaagggggagcgcgcggaagcgccgccaaatgcggggactggctccgagcagctgagagtacagccccaaccgcatgagcacgacctgggccctgccgccctccctgtattgcgaccaccccatccccgcacccccacccctaggatagcgtgcctcaccaagaccgtttcgccagccaccccatcaagctgactgtcattcgcttgttctttccaggacacacttacagaagagacgaggcctggttattcttccaacacactcccctcagccgcgcacagcgttactggctatgtggccagtgaccagatttgcagacctgtttccagacctcagctacctctgtttctgtagcacctgccccagctgatccgctaagacgacaaatctcttagacgtttcagctttacaatctccttctcctcccttttactcaaagctaggtcccctttcttatggtcacttcctgtaagtgtgtgaggtctcccggggctgcctctctattcagcccctgggtgatcaaaaggccaaggaggcagcttgccagtgtccactccaacaccaagctctccccagactcccttttccagcctgctttaggacatctgtacctctgagaccatagtagcttccaatgtgacaggtctacaaggacactctacacgtctcgcatgacatcatcctctcttcctcccctgtttctctttccgtggtgccttctgatttcccccttttccttctcaagtactcaaagctcctccaaccctattttgatcccacagccactactttagtctcggctttcagcctagatcactgcacaagattcagcctagatcactgtacaggcttcctaaacactgtgactgtcccagctatagtcagagtgctctaagacccccacagcaccccatctgctgaatgtcacacgtgaggtctctaccatggaagccacagctgccacaacctcctgtctgtcaccacccccatttttctggtgacatccctctttccagtgttgcagtaaaagtgggctccccaatctccttgccctgtcccaccgggatgccactgcctaagcagtctcctgcttccagattactgtcgcttctgcctctgagcccattagaccgtgtcacatccttaaatcttcccaattaggctggtcagagtgtagtggtgtttacaactaattgatcacaaccaattacagatttcttttttccttctccgctcccactgctttacttgactagcctttaaaaaaagaaaatcttcccaattagataatagcaactgtggcacgatgttgtgattatgctaaaagccactgaccagtacatttttttttttttaaccaggaacacatgcactttattgaatgccattgtagaagagtgtgtgaggataaagcgctgatacagaactcagctctggggccaggacgaggaatggaagttggagtatgtggaatacaggtcatgggcagagctcctggcctggatgatgcctcctgatctatcgacagacttggaagatcaacactaggatgatgacggtgagcagaatggtcatgatgatgcacacaatcagggctcagatgttcaggtacttggcagtggaggcataggcctgggccccagtcaggtctccaaccatcttcctgtccctagacttcagggagtaggtgaatgctatgaatcccaggcagtgggggttcatgaagaggatgttggacagggaccagacaacatagtcagacacggaggtctcgctgcagatatggatcatggtggacattgggggagcagggttgtggggcgcccccagcacagccacctcatgctcctccttgagcatctcatagctggggttggggggcgggggagggcagccactgttggcaggaatgaagaaggtttgggcagtgtggttcatggtgtccagcaaagaccagctgtggtcaggttgctgggatggttctgagtgggccctggactgtacatttttaaatggtaaattacgtggcacataaattatatctcgataataaaacaccatgcaaaagcctctttctactgaaagaatcatctcgtccccaacacacacgtctcttactctttggaacatctagccagtggtcctcaaacctagccacttcacagaaccacctggagagtttttaatatccacggtcccaggtcacagccaaaaccaattgaatcagtaaggctaggttggacctaagcttcaatatcttttaaagctctctacgtgcttccaatgtgtaggcaagttttagaaccactgttctagcccatggtttgaacctccctgatgggtaccaactttgcctgcattcttgaactccatctactatttatttatttatttatttttaagagggggagatctcactctgccgccagttggagggcatcagtgtgatcacagctcactgcagcttcagatgcctgggcccaagcaatccagccacttcagcctcctgagtacctgggactgtaggtgagtgccaccatgcccagctgtcatctaccatcttgtaccatccctcactacacgatgaacagtccatgatctggaactgtgttcattctatctttgtcactcttacaaacattttttaaaactgaactatacctataattactaaccattcctcttaaaactcctagcctacacatttctgtgagtgaaaatttaagcatcacagggttttaacaattacttagatttcccatccacattcactgattatttattttgatcatcataatctattgcgcacagcagggactggggtcctgtccccaccttagggggattatttacactcctaaagattacaagagtagtgaggggcagagaggtggtctcagctctcctgacacaggtctcccttccctccacagtgtctaccctccctccaggacgaccttcctccctgtgccagctctagcaaagggtctcattcagctcacctcaaaaaatacttttaatacttaaataacgacaataataataatatacaaggttagttccaaggcatgtagaggtgatggccagcagaggtgaagccaatccaccctttctgggctaggggaagcccagatggtcttccgctcgctcggggtgaggcactccccagggtcccggcctggctgcccatcccccaccaagtctcccaggccttctgtccaatgccctctccctccaccccacctccagccccttctgctctgccccatcaactacgttttcttcctcaggactcgccttagacctctgaactccggggcacagaggcgactttctcctcacagactttaggcgccactgctgggtccggaaaagaaagagaaaggacccagtgcggtcgcttacagaacccagggcggggttgggctgggcgcccgcgcgcgttttcaagcctgcggcccggagttcactgcgaggactgagatcacccgttaccccgccctggtctacaagtgtttgctgatatagaaacggaataacggcgctgtgggctggggaggacggagttgccttcaggcttctggtctccagccgcggggcactcacagctgccgctatgaaaatgcagacctgtggggcaggaattccgagtccggggtggagcgcgatgtggaatctgactcgcttgaaacagcaccgcggtggattcggatccgggtgagtagggaaatgcgcctcagcccctcccacgggccgcccacggattccaggatccgaaaacgcttccagctgctccgccaccccaggaaggcagcgcctgcctctgggcggttctgacggaaactggctcctccgcctgcaggaaaactcacaactaaggggccaggagaaagcctctcagggtcccgccccttcagtgaggatcctaaatttacatcc

SEQ ID NO: 1882281 - DNA, 4001 bp, Homo sapiens; identical to SEQ ID NO: 585346

SEQ ID NO: 1882282 - DNA, 4001 bp, Homo sapiens
ggctgtttcttttttttctgaaagagggcttttcaagcaaagtggtgtctgcctagtttggttgaaaaaacagactggtgtagagatacctcaagtgaataaattgacctcgaatgacacaaccataatctacttttagatgaaaggcaagggattttggtggagcttgaggtggggggtggctgcggtaatgtaactaaactgcattctcaagcggatttggccccgtattgcactttgcatgcaaatgagcctgtgttattattattaatgttatttggaaaaatcgtgtaacgcatgtgtgttggaagccctttaagttgcgatcgagggtccgattatggcgatcttctctttgcactggcacatcaaatttaatgtctgtggtcgttttggcttatctggtttgcaacataaaccagttgggaatcatgttacagcgaatgcatttgttgggattgactttaataatgaggctggttttgtttaaaaaattcatggtttccagttgtaggggaaaaggacacacactatggctaatgtttttaagtgtgtacgtgaatgcatatgtaagtaactacaaataatttctccctgttaactgggcttctgaaattgggtgattattcctagatttaaatggcttggaatagttaaatttgttttgtgcatagtacagctacgttttgattggcatggggagtgtttttgttttgtgtgtggtggcttttttttttttttaagtttgaggggagggaggaaagggggaccgagggattaaccaaatatgcactcgagtgatctgtgattagctgcatgctttaaattaaataactctttttttttttcaaaaaaggccaaatgaacataccttaggaataatgcaacgtaagaggaaagtttatttaagttgggtagacaaattggtgttaatattttccctttttgatcattgtggtgtgtgtaatgagagatgaccttcggggcactggttttgtaaaaaaatatatttaatggaaaagctgaatgcctcttcaagagagctgatccttatctagacacgtcaacttcaactatgaaagaaatgcaaggttaaataatcaagcccaacttagaaagctgttccataaagaatttaagaattaaaatacatccgcattgcagagggctgggtagaatgcaaaggactagtttaaactcgggctgtagaaactgcactgaggcaaccttgtcttggagcgtggacgccttcccggggcacgtccgtttcggatgcagccacaaagcaaatggggtagaacttggacgagaaccgcaccccgcctcccattccggacctcgttgaggtggagagcagcgtggggtgggttttctttcttattgcgggcgttcagcggatcgtgtctccgagtccgggcgtccggctgcaagcccgtggctggcggcggctgcgggaggcacggcacgagttaatgcaccgggagcagagccggtgttcccgacgtcctcgagccggctgcgaaagggacggcccgcgggggtcgcggcaggctgggccggggctgggcgggcgggcgcgcgcgcgcggcctatagggggcatactccgggctctaggcgggcgcgcgaggcgggcaccggtctacccgggccggcttgcaggcgggcaggagggcgggtggggcgcgggggtggcgcggcctgcggggcgcggggaggggagagcgcgcggggagggggtgggagcgggggcgggggcgtgggcgtgccggggagggggcgcgcggcgcacagctgcagcgggcgccccccaccgcgcacacggccgagcatggcggcggcggcccggccggcttcccgcggccctgcctgcgggctccgacgcagtctcgagagcaacaggttaagccggcgagacgtcagcgcgccccctctccgccccccggttcttcccccgccgcgcgccggcgccccagcccttcttccctccctccgccccccgcggcgctcggttccccgacgctcccggccgcactctgttgtcattgtgacgtcacaaagggacgggctcgggtggaaccttcccctcctcctccgtgacgtcaaaagtcgggcgggaggctccaggcgcggcggggcggcggggggaggagggagctgggcgggggcgggggctgccgcagagccgggctgcggcgtgggaggaggaagaggaggaagatgcgctcggcctctgccttccgctccggagcgtcgcgcttcccaccaggtgagggccggggagccgtaggtccccaaaggagtgccactggaccctgttctgatgccacttgggaagcggggagcggggaggaggcgcctcctttctgcaggaatgttttcacttcctctgttccaggtctcctgatggtgttgcattactagcgtggtgcatgtgtcccctctccagtgcttatgtaaagaaatgaaagtattcagggaaagctgtgctttgttggaggaccgcgttgtggatttggccaccttgtcacttgaagtcgtgttaggggtgcttcagcaggatgtggccggatgcctttcatgatgatgctgcacagcagcaactgttgctctttctggaagctttgtggtactacggtgggggggctttcctttgctgtgccggctctgtacctactgactgttattttggggggctggaccaaaggaagacttgtcattgataaatgtactgagaagagcacaggactcctttaagtctcaaggtgctctgggcttagttcttctgagcagggaaaccagaggctggcgttctgttttctcttttgtaaaatggaaaaatacctgccattgccacttaactaagtcactgaaaagatcatgtgcatggaagatgtaaaacagtatgcctctttataagtaaggtggcattattacttgagctggtggaaggcagcacgtttcccacaattggtctcaaaagcccgggatgcctgctgagttgccatttagtttattaccttagcaaagcagagttgggggtgcgattgtcgatagtaggctttgggagaaatgattgttatatttcgtaataaatgatgtccttgagaaactcataagttgcagtgtaatcctgtcttaattgtgttgagcacgactcccactgcaataccttaaataactgaaaacatttgcctttgaaagccccaatcgacttggacaataaaaacagttgcatgttttgctctagagatattttctgccgtttccatcattccactgcctggttattcctagggagaataacagataggatactggggcttcaccactatttgatcaggtatcagtttgaaatagagaatctctgccttatgaagatagtaattcctgtagttagcatgaaaacaaattgccagtttgattttctaggacagctcaagcagaatttgtaccactaggctgtaagttttaagtatctaattttctgatttgaaagtgtatgatttaaaaattggaaaaagtttttgttataagcttcaaaaggatttactataattacaactacgtaaaattacaaagaaaaaagtaggaagaacacaaaatatacagtggttggatttatgaggttttttgttttaaaacttattcatcacaaattgttcagtcacgttattttacagttggtggggtggtggggaaatttgcacgttattttattgctgtattttttctttcctgggatgtttacgtggcttttcagttacttgtttctagtagtggaaaatcttgctctgtgttacttaggtgcagggcagtggcagtttagctcctatcactgtacagggacagtatggaaggaagacacaatgaagtccaaagtgtcactaaaatttgaaagaaaaattatgtcgacaagtaatccaacttggtttattatccaggttatattattttacagtaggctaatacctaacttgtgtgtccctgtagccactggcc

SEQ ID NO: 1882283 - DNA, 4001 bp, Homo sapiens
aaggaaaacagatacagatcctctgctgcaaacagatgaattgaatcagcagcaggcaatgcaaaaggcggaagaaattcatcagtttcgacagcataggaccagagtccttagcattcgaaacattgaccaagaagagcggttgaagttaaaggatgaagtcctggatatgtataaggaaatgcaggtgagtctaaaagcacatacatagattatagttggcaaattctttcgtaacattaaaaagaaattatataattaaataatattttgtatagaaataagtcttgaaaacataggtttctattattcacaacttctaggaaaacatcacaaatttgattctacacatctcatctcactccctccctaaaatccccctaaaatgcagtattgggaatctatcctcaaagatgggaagaataggagagaaaacaacaacaaaattatttgttcaagttggaaaataactggatgaagatcatattaatcagcttgagacatacaaatcctaaactgtcagtgggaaaagtctttttttttaagtgttttttaaataaaacacaatcttaaagttaatgatgattggtcttggtggttcctagtggtaagtcctgtcttattttttcacatagtataaattatatttttatgcaggattgcattaaaatccagtagttcttaatgttaccaaataaccatataattcccaaatgcagcaaaggtgaacaatctacatagtgcactttcacctcaatgaaattgaagctgctcctttcggatatttttccacttcaatgtgaagcagattgttgggatttcattagtggtttcattatgtggctttttaaaagaaaaaatagttttgatttcttccacagttcacagttctcagacgagactttttttgtaaattacacagttcagggatgttttgaaaaaccaaatcctctttagtagatgaaatctctcaatgtaactgtaataaataagcatctacatccttagctatattaccagtatatcctggaaccaaagtaagatggttttcctgttcccataatccacttaattgttgttttaaaatttgaatatttccatcatttaaaatttgttttggatgatagttctgaccaccaccttttaatgactgcttgaagccagtttaaaccaactataacatattcttcaaatttgcttttaagtagtgactttactagaagcaacaagtctacacagcagccaagtgagatatattgtttttcttcctgtaaacaattggtgagcacaggaaggcaatctaccacaacgccaagatcttctatcctcaacaaataagctacaagttcacttatacttctccttctccagaaacttaaagctacattcaatctcatattcctgctgaacaaaacttggaccattgtttcatggtcctgagaaacctcagaaaaaaacccactatattttgatgatgggctttctgtctgtgaagaaccagaatcactggagttaaccaaatatgttcgactgtcatggtgtaatttttcagtctggtggcctgcacaagccagttcattttctttatttgccatgtcacagcccccaccttccagggggctgtttttttctgtaacaaagatttggaaagggatgatgaactttctttctgcgatagatcactttacgaagtttatctgggcttttcacagtttgtccaactgttctatttatgtaagcagccaactgttttggagacttcttaacctccttcatgttcttatcagtgaaattagagatctttttttctaggaagatcaatgaaatgatcctcaatcttattacaaaagttccgttttttaacattgtgagtttccgatgccataatctcttaagtaccggcgcctcatggtaccgcggcgcctcagcccagcctccgcgctgacaatcagcgcccggcagcctagagcgtccctcggcttctgggccgagtcccactcagggccattcaaacgcggccgcgcgcgcggcctgccgggatagctgggaaaagtcttaacaagccaattagctcctcagaatgcctacagaatccccaaaaaggcttagcaattggtggcagcagatatgttaggaagtaaaagtgaagtaggaggaagatgaaaatagttgggtttgttcagcttaaggctatttaggaattgcagatcaccacttcaactttttgcatccagattattgtcatccgttcaccccagtagaagaataggtgtcctttaattagagatgacaacaaatgaaaaaaggatttctaaattgtggaagactatactttattgaaaatgggagtatcatactagaaaaggggaaattcaataaatatatatggataacttcccactacggataatgagaatctttttttctccctgcaacacacacgcacacactcctacacatccccaaagacactaaagcctataggaaattctaaatattttggctacagtgagactgtcatttccagtaatggctcatgtgatgaatgtgcctatttgacatctcttcttgtttgtccaataggcacctcaaacagaacctctctaaatccaaattcaagaatgcttgccctccttcccatctcagcgcaaatatgtcaccccaccaagattctccatctcggtcaataccaattgcattctttcagttgcccaagcagagactatggagatatctttgacttctgtcactccccacgtgcgatcaattgtcagaacctctcgactctaccttgaaaatatatccaacatatatatcaccaccctagcctaacctgtcattctttcttattcagaggattgctatagcccagttactgatctaactgcttccatctttgcccctccacaatgtggtctctgctttgccacaaaacaattgtaccaatcacgacaaactaggcttatcctgtggtaacaaaacccccaatatcacagtggcctaacatagtgtttggcagacttattttctgtaaaggcccaaataggaaatatttatgttgcatctactcaacattaccattttttacacaagatcacagataatacctaaataaataggataatggcaaaatgaataaaactttacttagaaaaataagcaataagccagattaactttacaggccttagttcaccaactctggctaaaaacagtaaaacggtatttctcattctagctatgtgtccagtgcggttcaatagagcaaccttcttatcaagatcccctggctgaaggagcttccatagagacacctctaccatgattattacaacaggggaagagaacatggggaattgcacattggctgtgactatttctacccagaaatggcacattcatttgcactcacatttcactgaccagagcaagtcacatggtcacatacaacttcaaagaaggaacccaccttggtgacaccttgatgccaaacttgtagcatcaagcactgtgaggcaatgcatttctgttgtctaaacccaatttgtggttcttacagcagccccagcaagctaataaagagggagggcaatgctacgaggtacctggaagataaccagcaatattttgtgaattacactaatggttatcataatgcatatttaaaatgaaggtagaattatttcacttccctaatggctttacatttcattaagaaataaaccaaaatcttgattatgacctccagagctttcctctctgatctttttatccaccttttgcctaggtgactttgcctttccactaacagcaaggcatgttcccacctctgggcctttgacctcactcctctctcttcctggaatattctttccccaaagtgtagaatgtgaaactttccttttatgagatctcttatctagggtcacttattagagagatcttcaccagctgctctttcacaattactaccctcaaaatttgtgtaaccgtgcctagtc

SEQ ID NO: 1882284 - DNA, 4001 bp, Homo sapiens
gtcagatttctctaggttctgtcccatggtttgttgttactctacagtgataaggaaaattatattctgtttctgttggtggataaaatagcttcctgcttgagctctgaatggatttcatctcctcccttccagcagaaactgagctgccaaatgaccttcgagtgctgccttaaccataccttttggcttctgtagatccaggtttcattgagaaacccagggttataaactggagccctatattttgtttcatcagcaaagtgtgtgtgcatgtccacattgatactttaaaatgaatctgaatgctgtattagttatctattgttacatagcaaattaccctcaatttagtggtttgaaataacacatacttataatctcacagtttctatggtcaggtatccagaagcagtttagctgaatggttatggctcaaaatctcatatgaggttgcagtcaagctcttggctggagatgctgggagaggacccattaccaagctcaactgagcatttgctagcaggccttttatttccttgccacattattcacaccctaggttgcctgaatgtccatatgacatgcagctggcttcccccagagagagctgagagagtacgcagagagaagctgcagtcttttatgacataagctcagaagtgttatgccatcgcttctttcatgtgtaagtggtcacaaagaccaaccctgtacagtgtaggcagggactatacaggggggtaataccaggagatgagggccactggggaccatgttagagtcaggctaccacaaatgccttcagatagattatgtcttttaaattgcagatttcaaccagtccctattgtctttccaggaacccaaaccaccaattccccattcctttcgacctctccgttacctacctgcctttaacgacatgggtttataacttctggtctaaccattttatgtccagtatcctttgtattatatctcaaaaaaaaaaaaaaatcctggcctcaacctatagctacgcaattatattccactcttagtgcagactctcaaaaggaatattaacaaaatattgagtatgtgattactgcagcaacaagttaaataaaatgaggaggccaggtgcgatggttcatgcctgtaatcccagcactttgggaggctgagggggatggatcacctgaggtcaggagttcgagaccagcctggtcaacatggtgaaaccctgtctctactaaaaatacaaaaattagccaggcgtggtggcgggcacctgtaatcccagctactcaggaggctgaggcaggagaatcacttgaatccaggaagaggaggttgcagtgagctgagattgcacccttgcactccagcctgggcgacaagagcaagactccatctcgaaaataaataaataaataaattgagggagcaggacatgaactagtcagttgcaaaaccaaagtgtcataacttctaacgcagctctctttcttgtacaatgtatggcccctcttcagcttttcaagaggttgaagatatgttcttggttgcttcaaagggcagaagcagaactaaaaggtgtgtgataccaatatttagttcaatataatggcagcttagcacttagagactccacagcaattgagtggattccataattggaagcattcaaatcaaagttggatgatcaacagtcaggaatttctggaagcttaaggagatcaaaccagaaaacctctaagaaattttcttccaaatctgagtttttataatctgctcttctggaccaatgcaaagtatcttccttagccattaactcgtatcctcactagcaattctatactaagaaatagaagaggaaagcaaggattggctgaggaatgccaggagtgagttttctgtccttaccctagtttcacgtctctttgataccgagaaaagtgctacccgctgcttcttgcctctcattcctcccactgtttcttttccactttcactgtcagccatagtcctttctgtcctaagaagtgtatcaggtgtgtcccacccaccattgtgaggtttatgtgtgtgctccatagcggctcattcttagaacttgaataagccctccactggatttcaattcatatcagaaggtatttgagggctgctactcagagctagcatgtttctgggcatttagaaggcagggaggaggcgtgacaactgtcaccccaaagaacttactgtttgtctgtaagttttaccaccccagcccacctcagttacagtattgattggcactgaggggaacaaaaggcaccttcctcattcttcagacttcatagttttcagaaataacctgtgggtgacgtccaaaattcgcacaaaataagcacaaaattaaccattacacaaatcacagaatttagcccatatttaagagaagcacttttcagctgcatggtgatttttccttcatatatctcaaattatttccttcaaagtcacacttagttgtctgctgcataaacagaaaccaatatgacacaattttaaaattatatttaatcgctttcatggtgtgctctacttggtaaagaaggggggaaacaaggttaagtaaaggccaggatcctttttctgcaatggatgactgacatgggaaagagatgagttacccaggctttgctttttgctacctgcagtataaaactccctgacattgtcccaaattgcttttacaggtattttattttcaacatctaatttgttcggcttttcttcccttgccatctttttcttcttttgccatgtataatgcataacaacaatttctgaactccaaaagcatagaaacctcagaataacattacctgggaaaaattaatctctctacctccagctaccaagagaatcatttgcacatgaaaccctgagatttgcgtctttcattaatctaatgcagtagcaattgttataccacatcgttctattggaattgatgactaatcattcccaaaactcttttgaaactattgttcccataattttgtgttttgattgaaaaatgtcatgaccctatatctcttcatgttatctgttgcatagctaaccctctccctcagatttagtggcttaaaacagcaaccatttgtttagcccacaattctgttaggcagttcttctggtcttaagtgaactgactcatgctctgtgttcagctgctgtgttggctggtgctgactggactaaggtggtctcagttagaattactgctctttgctcatgtggtctctcatcctccagcaggctgggctggttcacatggtggtggtgggttcccaagagcagtacattgatatctgaaggcctcttgaagttcaggctcaacctatcacagtataatgtccactatgtcctgttggtcaaagcaaatggcaaggacagcccacatgcaagagacagagaaagagattccacctcttcatgtgagaagctgcaagtgtcgtggccagtattgcaatctaccatcccagccatttaaagcttatttgcttttagtattttcaacatcctgttggttctatgaagacagtgtcagtgtctaattgacttttttatttctccctgtagtatccttcactcaaagagcctaagaaagaaaaggaaaatagcattgttagcacctcatgtatcgaggcattggctagacattttctatgaattggctcatttaatacacacatagccattttgcagataaggaaattgagactcagaaaatgtaaataacttgcccacataattcagtctaaatgccaaaactggggtttgaagttgcacttaggtctaagttcaaagctttttatgttctaccatgcatgctgcttagcatgttttctttcatataattcatgctgctaatgaaacagtataaaccagctgtatgttaactgctagtgaaatgatttattgtcttctttttcagtaaatatggcaagtctgctcaattt

SEQ ID NO: 1882285 - DNA, 4001 bp, Homo sapiens
aagtacccccgtctctaaaataaaagttgattttttaaaaaaagaaaaaaaaactggccaggcgcggtggctcacgcctgtaatcccagcactttgggaggctgaggcgggcggatcacgaggtcaggagatggagaccatcctggctaacacggtgaaaccccgtctctactaaaaatacaaaaacaaaattagccaggggtggtcgcgggcgcctgtagtccctgctacttgggaggctgaggcgggagaatggtgtgaacccaggaggcggagcttgcagtgagcggggatcgcgccaccgaactccagcctgggcaatagagtgagactccgtctcaaaaaaaaaaaaaaaaagaaagaaagaaagaaaaaatctaaaactctaacaggcaaagtaaaggaaataaaatatagtggctaagcatgtgtggctctcagccaacctgccttggttcaaagccctgttctgccattaactcagaagctgactttggacaggttactaaacctccccctactttggtattctggtttgctgaaaggaagatgataacactaatattacttattagggttattcggaggaataaaagaattaatgtgcataaagaatttagaacaatgtccagcacataatcattaaaatgactattatttgtgataaaaaaacttcttctctataactttattctctcttgattttccttttagccttgtatttccttgtagctagtgtccaatctcccttttattcttgccaaactaagtgaacatatggcctaaatatgctgtttcctctcctcacttctgattcatttctcagctaacagcaatctgcctctgccctcactgcttcactgaaggttaacactgatgagtttataacatcactgaagaattccacattgccagatccaatggtaatttctgatggatctttatcttactaaaccactctctacatttcagaattggttacttttatttttttttgaaactctctcaataccctttgtttccacaaccctgaccatctttttgtctagtgtttccttatagcctcctgtctactccatttcattccttgtttcctttgcttatcaattaaatgttggtattctccagatttccatccttgacctcctaccctttatctttatttgccttcctcgtgattataactcctgtctgtattttatgtcttttaaatcatcatccaagagctgctgtacatttatagttggaattcccacaggcaccaaaagctcagcatttccaaagctaaactcattttatcacccctgcaattcgccaacctgttgttccacctctattgatttcagttaatagcaccactatttacccaagcacccaatccaataatctggaaataacaaatctgtatctcttaatcttccacattcaatcattcactaatacatttcaactctattgtcacacctttcccccatccttcctaccactgccccagtctaagtcctaattatctcttgcttaagttggaacaacagttttaaaatttatcctctacctccagttttgtctccctcaagccatcactgatagagctagtagaatcaccaatctaaaatggaaatccaatgacattattatttgcctaaatcctatcttcctcaaagattgcccatcacatataggataaaatcctagacctttatcatataaatacagccttccagcacattgtctctatttttccctctagtttcagcgagagccaccatgctaactgttaatatgtatatattaaacattatgtacacatatactatacatataacaccttgaagtaatattttatttctattttatagattaagaaactggtactgatattttatagattaagaaactggtacctgtataggaaaagtaaagttgatcattaaatctaaatctgtcatattctccaatggatttctttgaggtcaggtccacatcgttcctttctttgaaccaccagcatctagcacattacctggcatacataatggctgttaagcaaatgttaaactaaattgactgttcaaaaagagaaatgatggattataacattataattagattatccagccactgactgaagaaggaatagggattctagaattacctcacaggtacaataaatgagaacaatgaccactatgactgagtttgtaaaaggtgtatatctcttcatcatgtaaaaatttaattatctttcaaattaagagataagctctatattatcaagagtaaatttaatgttctttttatttctaaattgcattttattcaagtgttttttacttttagaggatcaaaacaaagggaaatagaaatatttacactaacacaaattctctgctaaaagataacagtatgtatgtgcttatgttgcatgtgtatttgtatgagtatgaaatatatatgcacaatacacaaatgtatatgatgaaaaacttcaagctatttttaagtttagaaattgatgactttaataacatttgggaagctcactcttcagacacactgattgcaaaggattaaaagatcacctgaaactctgagaccatcaaagaatttctttaattatgaaaaaaagtgcagatgtgtggccaatctttctcccaggttgcaaccaaataaaacttcaaataacgcactcataaatggctgaagaaaaaggaaattaaaatgaaaacacatacatattaaagataactatgagctgtgactgttcaacaattgggcttcaagtagtttcacaccattgggctaggataaaacatgctctgctggcattttcatctgccaaaatagccatttgcaattaaaaattaaaactggcgctacttctttgcaagcaattttcagaaggctgctggctatctttcttgtttatagtgtttttttgtatcagtccttcgtttcattttgaaatacccttttcatttctttccttttaggctatcatattcccagtactaatattgtaacacttttcaacatttctaattgtaatatggtcttcaagtacaatagcattgtttagatttctaaagactgattagaagagtatgaaacattttatatatcagcacagtataaagcagtataacttctacaaggcctctgtagacttaagagaaatcagtgattttttaaaggaatgcaggagcaaaaagaatatgtaaacatcagtctctacagacataaacttaattcagaatagaatatatatgtaggtagtaaagtaattcattaggtctaattgagtctgacacatagaatggccaacagagtaaaattccatctgccacaagggaactaatagtgtattttggagatctggggtgtcagtaaatgaatcagtatgtatgcatggagcatcttttatgtgacaggcagtgttctgggtgctggtgatataataataagacagaaacccctgcctttaaagaattggggttgaggggagagacaagcaataaacagatcctcctccaagcagaggaggagtgatgtgttctgttaagtctttaggaagatcactttgggccaggtgtggtggctcatgcctgtaatcccagcactttgggaggctgaggtgggcagaccacttgaggtcaggagaatgagaccagcctggccaacatagcgaaaccccatctctactaaaaatacaaaaacaattagccaggtatggtggcgcacgtctgtaatcccagctactcaggaggctgaggcagcaaaatcgcttgaacttgggaagctgaggttggagtgagctgagatcacaccactgcactccagcctgggcaacggagtgaggctccatctcaaactaacaaaaagaaagaaagaaagataactttggctactatgtagcacagagaccttggggatttaggaattaagttaaagcaactagttaagaggcaaccctcaagctcagagaagaggaaaggaaatga

SEQ ID NO: 1882286 - DNA, 4001 bp, Homo sapiens; identical to SEQ ID NO: 585358

SEQ ID NO: 1882287 - DNA, 4001 bp, Homo sapiens
gccctgctgcaatttttgtatttttagtagagatggggtttcactatgttgaccaggctggtcttgagctcctgacctcgggtgatccacctgcctcagcctcccaaagtgttgggattacaggagtgaaccaccgcgtccggcttttttttttttctttttggacagggtctcactccgattgcccaggctggagtgcagtgtcacgattttggctcactgcagcctcgacctccccgggctcaggtgatcctcccgagtagctggaacttcagatgggtgccacatagcccagctaatttttcatatttttttgtagagacggggtttcaccatattgcccaggctgtgacttctgggctcaagcgatcctcccacctcggcctcccaaagtactgggattgcaggtgtcagccaccgcacccggtagagttttttgctgttgttttttgttggtttgttttttgtttttttgttttttcttgagacggagtctcgctctgttgcccagcctggagagcagtggcgccatctcggctcactccaacctccttctcccaggatcaagcgattctcctgcctccgcctccctagtacctgggattacaggcacgcgcgccaggctaatttttgtatttttagtagagatgggtttcaccatgttggccaggcgggtctgaaactcctgacctcaagtgatgggccttggcctcccaaagtgcagggattacaggcgtgagccaacgcgcctggcagtttgcatttttaaggagttctcaggtgatgctgattctgctgatcgcgggactccgctttgagatcagctctcctagggtatctaagtgacggggcagacccgcaaaagagatttagtggaagatggccccctagaggagctggcctgggattcctgggacttctaaacctacagtgcacaaatgtcctagattttccacctttggttgcttctagccacaatcttccttcccaaccacatcttgccctttctactcacaaaccaggaggcacacccagggttttttttaacatggtgatttgcagaactgtcctaggccttcagactaaggagctggagtgatcctgaaagatcccggaagcgaaactcgcctttccgggcacctgggtgaaggaagcttttcctaccagggcccctaaagccactcacctcgatttctgcggatccaaaggtggaaagacactgtcccgatcaggagcatcgcaagggtctggagaaagggccatccataaatgaagatcaggactccgtattctgagactgtttcaatcacaaataagactcggaacagcctctggaaggccgacagcatttcgcgtttctggcctgggaaagtaagggtgcgctaaggcacgagtagtacagctcctcccgccaccgcagagcccgccggcgggaagagaccagacaccgacggagaagcgaagttcaggacgcgaaggaaagggccacttcgggtcggggtcaacccagactggaccaatgcacagtctaggtggattaacgcgccaccgcgagaagtgggcacgggaccacatgcggctggcaagacgtcccagggctcaagctccaggctcggtcaccaaacaacggtgataacatccacaacgccacgtaaaccatctttgggccttgatcgttttccaataaccgactgaactgagggcgtgaccaaacgacaagaaccggaggagaggacccggagaacggagcagcatcccgccgcccgcctccaggaaagcccgaggcactgtagcaggagggtctgggctccgcgccttaattacaccgccctggacccgcctcttccgccgctcgctcctctgaccggcacccgaaggtgctgtcccgcccacggactcgctcacactccgtttcttcgatcctttagacgactttttaccgttcagggatgctctccgttaccgcctctgccatttggttgccctccctgcggtccaagggcctggaacactccccagggctgccaggccagcgctttccaggggctccagcctacagcgccgccacctggggctggagccagaaacgcaggggccgggggctcaccggctgccaagtagagggcgtcgaaaatggggctgggtgtgtaagaatgcttgtgatttttgcacactgattttgtatcccgagactttgctgaagttgcttatcagcctaaggagatttcgggctgagaagatgaggttttctaaatatacaatcatgtcatctgcaaacggacaatttgacttcctcttttcctaattgaatattctttatttctttctcctgcctgattgccctggccagaacttccaacactatgttgaatagcagtggtgagagaggacatccctgtcttgtgccagttttctaagggaatgcttccagtttttgcctattcagtacgatattggctgtgggtttgtcataaacagctgttattatttttagatacgtcccatcaatacctaatttattgagtgtttttagcatgaagcgctgttgaattttgtcaaaggccttttctgcatctattgagataatcatgtggttttttttctttggttctgtttatatgatggattatgtttattgatttgcatatgttgaaccagccttgcatcccagggatgaagcccacttgatcatggtggataagctttttgatgtgctgctggatttggtttgccagtattttattgaggatttttgcatcgatgttcatcagggatattggtctaaaattctctttttttgttgtgtctctgccaggctttggtatcaggatgatgctggcctcataaaatgagttagggaggattccctctttttctattgattggaatagtttcagaaggactagtaccagctcttccttgtacctctggtagaattcggctgtgaatccttctggtcctggacttttttggttggtaggctattaattattggctcaatttcagagcctgttattggtctattcagggattcagttttttcctggtttagtcttgggagggtgtatgtgtccaggaatttatccatttcttctcgattttctagtttatttgcatagaggtgtttataatattctctgatggtagtttgtatttctgtgggatcagtggtgatatcccctttatcattttttattgcgtctatttgattcttctctcttttcttctttattagtcttgctagctatcaattttgttgatcttttcaaaaaagcagctcctggattcattgattttttgaagggtttttgtgtctctatctccttcagttctgctctgatcttagttatttattgccttctgctagcttttgaatgtgtttgctcttgcttctctagtttttttaattgtgatgttagggtgtcaattttagatctttcctgctttctcttgtgggtatttagtgctataaatttccctctacacactgctttaaatgtgtcccagagattctggtatgttgtgtctttgttctcattggtttcaaataacatctttatttctgccttcatttcattatgtacccagtagtcattcaggggcaggttgttcagtttccatgtagttgagcagttatgagtgagtttcttaatcctgagttccagtttgattgcactgtggtctgagagacagtttgttataatttctgttcttttacatttgctgaggagtgctttacttccaactatgtggtcaattttggaataagtgcggtgtggtgctgagaagaatgtatattatgttgatttggggtggagagttctgtagacgtctgttaggtctgcttggtgcagagctgagttcaattcctggatatcttttttaactttctgtctcattgatctgtctaatgttgacagtggggtgttaaattctcccattattattgtgtgggagtctaagtctctttgtaggtctctaaggacttgctttatgaatct

SEQ ID NO: 1882288 - DNA, 4001 bp, Homo sapiens
ataggcgcctgccaccacgcctggctaattttgtatttttagtagagatggggttttaccatgttggccaggctggtctcgaactcctgacctcgggtgatctgcccgcctcagcctcccaaagtgctgggattacaggcacgagccaccacagccggcaacgcctgtgttcttataagccatgtgctccagggaaagggacaatcatgttattttgtgaaaagcagtgtacttaagctttgaaaaggtgaaactcaaagggagaagcagggagccgccaaggctctcccgcagagggaatgctgacgtgtgaggaggcagggcctgctgaggccctgcctgtgggagccacggtgcagtcctgccacacagaggggtccccaggcggcttatttgtgcccaggcgttaggctcaggggctcggggcctccttacctggcttccctgggggcgcgacttctcccctcgagttccatgctcctcaaagatgagcctcagccacctcaggtgcccaggcagctcctttcagccgtgctgacaagagggatagtggggacaggctggtggctggggccggacacactcaaggctcagatgaccaagtgactgggagggtctctctcttgctgtgggggacccttcccgctttcttacgcccacattcagtctggacccggtaacgggtgtttctttcagaaagggagcgtgcgcagttctgcaagtccagcttggtttcaggcctcatgagagctgcatctgcgctgaggggtccttgtccctgcaggtcctcgggcctggggtagaaagccccaggctgggctgcatcctttggctaagtgacatgtggaggggtccctggctatcatgacgcgtacagccgcgaggcgtcctctgcagcacgacaccgagctccatgtcacactcacgctgcctccacggcaatggccagtctggggattggggtgtccacgctcgtccaaggcccccacgcgatgcccactcatcgccacatcacctggcaccatcctggtaggacagaggcgggagtagaggcccaggccactgtaacaatccacagcagcagagctgggccccagcatctccttccctgccccactcccccctcaccaagggctcccaggtgctttaggagcagagacctccttggctgccatgcagacgatggagcagcattcacgggctgatggcatttgaggctgatgacggacggggtgactgtggggccaggtcccccaggcgagctctgtgagtccttggtcgtggtggagacagcgcagcctgggtccaaagcagtgaggagcacaggccacagcacgcagccggccctggaggactccattatttttaaaaatgtctcccatacttagagaaaggaatttgacctgctgggccccatggatgtcctctccggtaaaatgcctccgtccctttgtcctttcagcatgccagtcaaaggtggcgcacctggagcgggccttgcaggacgtcagtgcgcgtcaccagctggagaggcagagaaggaaggtcccgcacaacagcctggtggtgggtgtgggcgtcaggggagacctggggcggccccggggagaggcccacgcagaacgtgcagaagcctcctcgccggagggacagcgggagggacagcggggggacaacaggggggacagcgggggggggacagcgggggtgtgacagcgggggggacagcggggggggacagcaggggtggacagagaggtggacagcaagggggacagcggggcggcctggccggagggcagaggggcagagctgcgggggctgcgacctgcgtcctcttcacccaggaggcgatggcagctggaggacgggtgagggcgccgcaggctgatttaggctttcggggtcactctggctgctcggtcgggaggccacgacggggagcaaaggggatggctgcagtgtcacgggggctggtggcctgggccacattggtggcgatgcaggaagtgggaccggctgctgtgaggcacaaggaaagagctgtagcgggcagttgggggcgggggaatctgcagagatgggggcgggggaatctgcagagatgggggcgggggaatctgcagagatggggggcgggggaatctgcagagatggggggtcgggggaatctgcagagatggggggcgggggaatctgcagagatggggggtcgggggaatctgcagaggtgggggcgggggaatctgcagagatgggggcgggggaatctgcagagatgggggcgggggaatctgcagagatggggggcgggggaatctgcagagatggggggcgggggaatctgcagagatggggggcgggggaatctgcagagatggggggtcgggggaatctgcagagatggggggcgggggaatctgcagagatggggggcgggggaatctgcagagatggggacttgcgcgggaaaagcaaggattttgctgtaactggagatgccggtggagactgcccctgcccctgcccctgccccttcctcaccagcaccttccacccacgtctctcactgcccattaacaagacccagaggctctcgtgctttcttggtcgaaggtatgagacctgagatcccatgaaatttaatgtaaagtctcagggtttgattttgcaacacgaggatgccaaggtggatgattgagtgggtgaccctcgcttctgtgaggtttgattttgatggttgcactttggccagtttctccgaattccacctgcccgaggcccacgaagccagtgttcctgcgaagcttctcttccctggccatgccgagaggttctccagctgttagatgtgtcaaagaataattctcattttaagcatctacttatgtagttcagtgctccaaacattgatataagagaacatttattgagtgcttcctgtgtaccaagtacttttgaaaccatttggtgtattttcttatttaatcttcacaatagcaccacctctctgggttgctataaagacaaagggagatatcagtgaagcacctggcacttcagaaagtctcactacgctgcagctttttttttttttaatctggagcatgaaaaagataatatgaaccttcctaagatggagtcaagtcccacaaggaagaattggttgtggaagtttctgagtgttccacctcaagcctggtctcctggtctagctgaggagcgtgcagtgcgcggcccatggagaatatgcaggcagaggctgatcccagcttctgtgggttcatagagaccagacggaggctgtaaatcattggcctatgacacccacttggttttcaaaatgtagaaggagctgctcagcatgacagggtggataaacttgctgtggatccaagacaagatttcagaatggatttggcaagttctgagcacatacggagaagatgtgttgctcactggaaaccagtggagtttatgagaataaaaagcttctaatttccttccagtcattaaatcaaggaaatatgacagatactgaatttccaaaatcccctctaaaatgcctaaaatgtcgagcccaggatgccattcaaagggattttccttggtacttattaccaagggatacccctttgccaagtgaacacatttgtgaagtatgaatccagaagtttaaaataactgttcatggccgggcacggtggctcatgcctataatcccagaactttgggaggccgaggcgggcgcattacctgaggtcaggagttcgagaccagcttggccaacatggtaaaaacccttctgtactaaaaatacaaaaattagctgggcgtggtggtgggcacctgtcatcccagctactctgggggctgaggcaggagaatcacttgaacctgggaggcggaggtcgcagtgagctgagattgcatcactgcactccagcctgggcgacagagcaagactctggctcaaaaaataaataaataaaataactgtt

SEQ ID NO: 1882289 - DNA, 4001 bp, Homo sapiens; identical to SEQ ID NO: 585380

SEQ ID NO: 1882290 - DNA, 4001 bp, Homo sapiens; identical to SEQ ID NO: 585382

SEQ ID NO: 1882291 - DNA, 4001 bp, Homo sapiens
aagctacttttctcagcccttttctttctcctctcattttctgttggttccttctggaaggaaggagaagcattttctcactgaagcaacatctaagttacaatgcctcatgctcaccattgctccaggccccagggtgctttgcagttatgcagtcctgtctaaatgagtgctccagtggatgacagaaaatgctgcttcaaagatgttaacctggatgcatagaaaattttcttgtttttttgttttttttttttttttttttttttgagacggagtctcgctctgtcccccaggcttgagtgcagtggcatgatctcggctcactgaataagtgttgactatagaaaaaaagagaaaattagaaatggtaccttgactctacacttctaacaatcgcagtctgctgtattctggtagtttcctgatgcgaaggacgttaagcaacgtgtgtgtgtgtgtgtgtgtgtgtgtgtgtgtgttttaaatctaggattgaatacagaccatctattttgggtctgaatgacccagtctggcagtgggtgatctcattccattggacaatttggtccaaaaagcatttcattaattacactcagcgcaacaacttgcccaggaatctgcttctgtgcttggagaataatcccactttataaacaatccactttatttagcacaggccttcaagaaaacaccagacactgacatgatgaattgctctcttgggagcacgggtgggtgagactggggaggaggatgggaagtgagaacttggtccgtttaccggaagacagcagcacacagatctgcttgcaccctgtacctcattgtctaggataacaggattccacagccttgccctgatagaagcaactcggcaattaatgggttgatggcccacagtccttccaaggaaaacccatgtttgcttgctgcagccacgtggacaacaggcaggctcaccacaatgcctgcaggcccttcctggtctctcaatttcactccttcaacaagcgtttagcagatgcctcctccttattaccttctgtattaggtgctggggatacactgggagaaggttcttgttcttaaggaacttctgatcctacagcaagccagtgatgaggggagaagtggtagaatgggggggattcacagcatgagcacacagaggagggatactcactatggggcagggagtggaggctggtgcttagtcgtcagcattcattctctggaactctgtggacccgtgcttctatatttgcacatagtaagttctaatttaaccatgaattttggaaaaaccgtgatcatagagtttctttctctgtcttcctttctcatctcttcctcctttctctctccttatgaacagcggtcttttcaaagttagcccataggattgggaccaagcctgagattccaaacagtgttggagagggtggagtgtagagaagcacctgagtctcatggtgaagttagagacagggaccccgaggcctggcatgattggaagcagggcacaaagatgagtgtagagcagaggccagcgggagggtaaggagcctggaggtcaggaggcctgcagaggggagaagagcagaaacagggtcgggaagtgccccaacccagcagtccctgcctccgcaaacaagacttgctggacaccaaggcagcctcctgacctgacttgcacaccagtcacacacttgcctcccaacaggaatgactagactccggagctcacctgaggcctgcaggtaggagctggagaaggatgaggtcggggcgaggagttcgcggaagcattggcaggcctggactctcctttgcgctgtttcgtggtttatttcccagctctaaacaaggacgtcctgcaaacttctgatgggtttggttttgtggtaacttcttagagagctcagagcatcaaggaagaacatttcctcaggatgctgaggcgtggactggctttcatctcaattttcttcagctgatttccttcaatgttgtttttctcttttgaacaaaagaatatgctgtttgttcggtcacatggacttgtggttactcacccgtggaaggaggccacccctcgagactctggcaagagcaggggaaattcctttcaacaccagccccgaggaattctcatgatcctggtttccattttggtcaaattaaagatgaaaggactcgatccagcactgaggaggacgatagttttgattctgagggagacacagctagatgaaaaaccaggctaaccttttatctggtatgagagtggagaggcacatcctgtgacaaattgagcatccattgtgtgaggaattcctgcttcaggccccatctcagaaatcaaagccttgtaggtgaggagaaacaaccgtgaggcggcaggtttatttatttattttcccaccaaagtcttagataactttactgggtgcctgccttctttttggttttgtgtttgcataattttagaaatgccattaggaatagctgctttcctagagaaagtttccagttggtaaaaacaggacaagctgttttcgataatcatgaaccttttcatttgaagggttcttttccatactcctgactcccaccacctctgatataggtaattccatgaactttagcacttcttgatttggtattctttaaaaaattttaaattgtggcaatatacacataacataaaatttaacatcatatccaattcttttatttttaaaaagatttatttatttatttgagatagggtgtcgctctgttacccagactggagtggagtggtgtgattacagctcactgtggcctcaacctcctgggttcaaacaatcctctcacctcagcctcctgagtagctggggctacaggctcacgtccccacactgtttaattttttaaattttttgtagagatgggatctcactatgttgcccagtctggtttcaaactcctggcctcaagcagttctccttccttggtctctgaaagtgtggagattataggcatgagcccctgtgcctaacctccggaagtctttccatcctcccgaactggaactctgtacacgttaaatcctaactccccacttccctagccccactctgcagtccctggcatcccctttctactctcagtctctacgagtttgactaatctaggaccttatataggtggaatcagcaatacttgtcattttgtgactggcttatttcacttagcataatgtcctcatagatttggcattcttttactttgtctttaaaatactatttcctcttaacatccaagggctaactcatttaaactttggaaaggtcatcaataaaatttaaaaatatttcctaagcctggaaattgtaaagacaagtatggatctgtgaaacaccctattgcttgcagcagagcggaacatctcagaggtgaaaaaccaagtgaagaagaggctcgtgttaagtggcgccagctgggaacgtcctgtacagtagggcgctgagccctcaggcccgcagccaggggtaggggattctctgcagatgtgccctcctcatggctggtgccggtggtcacgctgctctcctggggccgtggcgacagctgtccatggagtagggctggcagcggctctggagggaggcatctgcccgggctgtcaccggagtgaaagaacaggaggcagctgcgcagaggcaatggcaaggacaggagcagaggacacagaaaaaacaccctcgatctccttgtgtgctttcccccaaagcacaggccccagcctggtcatcgtgcctccccaaagtcagggaataccccagaggctgttcctcctctccgtgttcaggcctggcagtctgttcttggacagagaaggctcatgccaaggcagctgcccggcagtgtcacacgaatgctggaacaaggggggctgggtgaggacaccagaccattcatctcacagacacggcctttaaaagctcctt

SEQ ID NO: 1882292 - DNA, 4001 bp, Homo sapiens
acatagtattgtgcactcaaactgtcattcaatagacaatgcaattaaaggcataagtaattattaaattcaagcaagatcacagaattttcaaaggtaagacagactcaaaagtctgccaaaacttttggagttatcttcagaagaagctgtttaatttccagcaataggtaattcaattaagaagaagaaaaaaaaactaagtaagcaaaaatgaaaggcaagcaaaaccccagtattcttcaatataccttaaaattatacacacaatcataaagacaatataggttaagataattaactagcattatgaaaagcagcctgttatcatgatgttgcattaactaaccgaagtaattcagaaggatcctagattctgaatgtgaataaggctgagactcaaactttattgtgacagacgaaaatggtatacaattgaatgaataaatgtatgctattattaataaaagctttatgtttactttcttcctgctaaaaaattgctactaaatagatggcttatcttagatttagtggtatttcagaattgataaagtatgatagttcaaccttattcctttaaataccgatattgaatttcatcatgtagatgtactattttttatttatttatttattatttctttatttctttatttatttttgagacagagtctcactgtcgcaggctggagtgccgtggtgccatctcagctcactgcaacctccgtctctcgggttcaagtgattctcctgcctcagccttacaagtagctgggactacagacccgcgctaccacaccgagctaatttttgtatttttagtagagatggggtttcaccatgttggccaggctggtctcgaactccagacctcaggtaatccgccctccttggcctcccaaagtgctggttacaggcgtgagccactgcgcccggctagatgtactattacttataaatccctgactgatggacatttaggttgttcctcatttttttgctaatgtaaaataatactgcaaactggtaacttcaattatactggtaatattcttgttctgagttcaggtggtaagttcatggatgttcattttattatgcctcatagtttaataaaatgaacatatgtataatatacatatagcatattccttgcacataacgaaattagttaataaaaaaattgctgcaataaaaattcttgtgcacacattgctgagcatttttcttaaaataaattcccagaagtggaattgctggatcaaagagaatacatatttaaaattctgatacttattgtcagaatgccttctagaaagttatactaattttataatccccacaacaaggtatggttaatactggcattactaaatctcaacaatctttgctgctatgacatgtgaaaattcaaattattactaggcaaaaagaatttttaaaataattcttcaaagcaaaactgcttacctttttaacccacactacgatggggccagattcgtcttaataaacaattctgatcatgtcacctacctaccccataactttcaatgactttaatctcatggttaaagtaagagctctggaatcaaactgcctgggtatgacagatcgccatttttttttttttaaagttcagaccctcatcaaaaatacaaacatcaacaaacaagtatcattgattagtttgtccaacttaggaaaaaaaaaatgataccattacataagatttcaaagtgttaatttgggttgaattaagtttatcagaaaggtaccctggctgggtgcagtagtgcacctgtagtcccagctacttgagaggctgtggtgggaggattgctcgagtccaggagttggaatccagcgcaggcaacatagcgagttcccatctttaaaggaaactgcatactgacattttcttcagttcactttctaataattgtcagatcaaaagtgaaagcaacgctgtatcttcatgctgaaaaatgattgctgttcctacttagcgaaaatgttattcaatgactaaataacttttgtgatgtataacaatctcccattgatgtaaataaaacatctaaaataaccaaataaccagggttagaacagttccaacactatttatatagaacaaggacttgcaataaaaacaaaacaaaaataaaaacgacctacacaatgaaagccagatattatacattaaaaatgtagtagaagtattttttggtgagcagcaaggcatattccatcaatatttaggcatagaatgtgccattccaagcatggaccatgatctagtttcttgcagtagcagccaattggactaacacaatgctacttcttttactgttcaatcaaattcctccactgccttaaggaatcaactaccccattttaccgtcagagataataagctttgttttcgtagcacagaacattcactccaattataatgtcctaccttttcttcctcatggaggaaatttgataaaaaattaagtttatcagaaacttctgataaactgataaactgataaatttattaaccttcaataaataattcataaagttcaaacaagtttcatgatcgctaacattcaaatccatttccaaaactggagttatacaatattacttctgtgcatgagattatacttattgttcactagatttatgaataacttctggaggatgatacatgttttaaaagccgtattaacatatgagttgacaaacattaaattttgttcccttagaaattgacagagaagtcagaatggggataaatcaagtcatctgaggcattcattgagctacaagctatttcaggttataaaaaacactgttcccttaattgtcgttccttcatttgctgtatttatatacacactcctactccataaagacctctccatctctcccacctcttccaactatgaacagtaacctaaaatcacactgaactagacgtaagagactcccaggatttctctaaggtatacccaggatcaaggccctctgggatccaaagaactgtagctcttttactgcaattttccttcagaaccacctttcccgttccttccctcctggacaccgccgactcgcgtgttgggggtggggtgggagacacgccgccagaaagacaggctctacccagccaaacctgcacctccgaggccgaaaagcctggggctcttcctgcagcaccgggcgcggccaaccctcgcttccccagggcagggctcagctcgggtcaatgcaaccagccaagtcaggcccggagcgggccggctctgcccgccagtccaaacctctggaccctcgccagcggggatgggcgtgggccccggcggccaccgccccgccaactcgagcactggaggagcgcacccgctacgccagccccggacctacctggaggggagagcagagctcctggacagcggccacgggcctgagggcggacgctgaggcggccagagtccgtcccagcaaccccaagtatccctggtggggcagagcggggagacgaacgggggggctgccgcgggccagcgcggcccgtcccaggggtcgtgaggacctggctctccccttaacaccaggccaccgccgccgccgccgccattttgccttccactcagtgtcgccgccgccgcactccgctgcaggtttcccggatgtgggcatttcccggcgtcgcttgcgcgggggccgaggactgggggcttttgcccgcccggctgctgcgagggagcgcgcagcctgcggcctccgggcttcgttgcgtcgcccgcagctctgatcgttcgtgagcgtcgccccacgtcgctcccgcctgcccctgcccatacgactcgcccgcgcccgtgggttaaggctgtctcccgcccagcctacttggttgattcaatccttttccccattgatctatttctctggaccgagtagggatgtgcatttcacggagctacgttctcagaagggaacaa

SEQ ID NO: 1882293 - DNA, 4001 bp, Homo sapiens
ccagccttgtaaaacaaagatgtggaatttaacaagatccaacaaaaactgtggaagggcacaatatataaaaataccatagccaagaatcaaaacactaacttctgtcacaggagggggaaaagctcttgcagatgcatggggggatggggctgaagaaaaggggacatttgttccagggctttcttcagatttgggagcgaaaaaggctagcaagacaacagcattctacagagaagccaagtggggaggtataagggtggctggtttttccttaagtctacacgtttccaactgctatttcatgcttccagccgttaccatatgttctcagattttaaagtcacaataaacgtcagggtgagcagctgtggaataattcacacttttgttcattttccagcaccccccatcagatcccattgcttaaataatgccccaccctcccaccacctgtacatcaaggtcatggtcctcctctattaacagcagtgagaacagccagttttactcttgcgggaagttggcagaattgcaaacttgactgctgagcttcggatgggtcatgaaatttttagtctctaaatcttgcttttccaggggttagatatttaaaacatttcttcttcctaatggtatctttcaatcacgcaaattaccacaagtacacaagagcaaagacgatcgcattctgtgtcagtgttttgtttgcattgtgagaggctgataatgtgggaggaagtttgtgtagtgactgtctgggttcagatcctggctctgtcacttatttgctgtgtgaattgacaaatgtaaactgattagtatggtgccaggaacagatgctattattattcagcaactagcctgaatgtaatcatgtacttgtttacctttgtagcttcttaagggctaatccttaagggttaaatgctgcagggatctgttatgtgtttgcccagttaagttctgggcaaggaaaaggcctgggtgttctgcatggctcccttccctcttccacctatacatcccataaccagcatcttctacagtgcaggggacaggcctactggcccatggttagttgctggcccacctgtgagaacgcaggaaagtctgaaagacggcagaattgagaggcctcagtttggagcttttctttttacttctctgcagggctggtaggattgcaaccttacagaactgcagtctatcagaggcatccaattgtttgtacatctgctcaaaaagcagcttgctcttggggaaagagatgaacaggcctggcctggccctttgtgacaccaaagaggctagcactgctcttgggagccctgcccagtggtctggccttgggagctgccagctacacggagagagttggatcctctccacgtaatgaaattgactcaaaaagaacaaagttgctctcaacacctgctcaccctcgcacagctctgaaggccaagaggggaatgggtaattgcagaccacaggcaatgacagaaaaagaagggggaaaaatcagcagccactagtttagcatattctccttcatttcatggggggagatcaatgcagacctcaccatgcctgtctccagagagctggaaacagtggaatggctcaaagggcagcaggagagaaaggactgagggatctggaaaagcagccccagaatggtctcctttttatgtaagctagcttggaatgggtttctatgacttgtacccactcttatttgcaatacattttgtgagaaaggcaacatggacaccttggcacaagaagaacagcagtccactcaccatttcagaagagctgcaaggtggcttcagggttcttggggcaccagaggcagcctagccccagtcacccacggagccctccagcctacttttgctcactttgtttggctgcattgcccagcagtggccaacctccatggagtccacatgatcaaactcacagaaggcagcaaagatggggacactaggaaaggaggtcctcaaaattgaatcttcctctttcgctgactattgtaatcacaccactagatgttgccaaatgtttgtagaaggcacttctcctggtacctgcccagctcacacccacaggatggacaaagaatggtcaagtttattctgtgtgacccctatccatattcatgactcactggacaacacgtgtccacacccagcccagttgaaccaactgaattaggacctggcgtagacgtctgggctcatggcttgaatgaaggctatgtagtcacaggagccatggggtatccctgcttggccctgcaagccagaacaatggaagccactctggagagagagagacagagatgaaaacagatggaaaagcagcgagaagccacgggagtgagctgcctgcattccccgctctccagacccgggttctggatccagcctcacctcctgccatagtttccgagaggtatcccagtctcctttcaactcagtgtcttcctttttgcttacttgattgggtttctattacgtgcatccagaatagtttccactaaggcagtgattcacagtttactgaacgctttcacatgttatcctgtttggattttgcttcgcacgctactccagggagaaggcaagggaggcatcatcatcatctgcattttatggtcaaagacgtccaggcaatgactgctcaaggtctcctaggcagggaggcaggtctttgacccagacacagcatcatctccactgcaccacaccctcttgacattggaggtgtacttccaggaaaagggactctggcgccaaggtataattggaagagagatgctgcattcctaagcacaagcgcatatttcaaggggaaaataggagcttcagcttgataattcatgccacagctttcatgagactgactctgtaaacaaagtgtattgagaacgggaaaccaggcgtggaatttgtggtggagaatactcccccttataaaaatatgtgaagcttataatatcatattattttagcatttgtcatacttctttctctctttctcgagggcaccagtgaacaatggacaggtaggttacatttctcttctccacctttgcctagtcatcactgacagtttccacccaaagtagattagctaggaaactgacactcttgccacacacacatgtgcatgtgaatgtactccaacacacgtgcacacacacatgcttgcttgtggataccaccttctaaaaacagctctattgagatataaattcagataccatataattccttcatttaaaatgcacactgtgatttttggcatattacatcatttaaaatggttacataacatacaacttgccattttaactatttttagtggtattaattacattcacaatgtcgtgcatgacattgcaatacaatcattaaaaccatctatttcaaatggatgctattttttttggtccctctctttttccctttctctcttcctccttcctttctcttatgtttatttttcagttttttaggagacagggaaagtccatctcgcctccagccctggccttccccatgcatgcaaatccccactgctcttcttgacactcctctacttatccaacctaggctcaaactggaaggcaagacctgatcatatgacctgatcatatgtgagtttctgtctgcacccaagtctctaggacacagagggaacatcttgcttctgggacattcctcaggtgctgagctcccctgcctgaagggagctgcttgaggactgagctgtgcatcttcattctggaccctggtctttgctacaggggctcagtgatgtctgcagagtggccttgggggcccctacattgtctggcccagatgcaagcgcctgctgatgttccacaaggaatctctccccagaccaatgttaggtttggatgttttcttctttctcgtcatctcctttgcttcctgttactttttaccctcctaaaaagtgtgaagaaa

SEQ ID NO: 1882294 - DNA, 4001 bp, Homo sapiens
tataaaataagctcctttattttcttttgtaaagcatttctttaatatgaagtaatgcaatatgtatttatgttctaagtgttttaatttccttggatataaaataatatcttgttcctttgattctcttacatataagtgtatttactctgatattactccaaatacaccagatatatttaaagttgaaaaaatatatactttggaatgtattatcaccttatttcacattaagaaatcaaaatctctggcatccaagtgcattccagcctgaaaaaaattatgcaattgtgaatttaacagaaagcaaattgctcacatgtggagtcaacgtgaagctatatcaatatttattaaaagttcatatattacttttgatcccctggagaggaatacaaaattcaaataattattctatttttatatcccaatttgtaattatgaaactctagcattttaatttttctctttcaagtttacctgaagcttcacaaaattctgtgaggaatctattataacaggtattttgcttatttccacacaaacagaaggaaatgtgtattttctatgccctgaagaatttactcttttctgtaaatgacatatggtagttaattctttttggtaataaaatattcctgtttttatgccgaacagccttttcatttaaattcagggcaacatatcaaagctttgccgtaataatacagagtaatcaactaaagtaatatagaagttaaataacaaagagtttaaacaatttaatatgtcttctattaatttcaaactgaaattttacagaaatttggaatatgctgccagagtacacacacacatacacacacacacacacacacaatcacacgctcacatcacacactcacacccagctaaaggaaattaccacagctataatgatttcattaaatatctgaaattaaagtttcttttggacttttcagctgaagctcatagtaaataaaagtaatatgatcactgttgcatactgtgaatcaacagcacacagaaaccttagactttctatatttacacagcttaattatccgaactgaaacctgaggccatctgtgtcaacatgatttcacaattcattccagaaaattatttttcaggaaagtaaggctgcaaaccaataaataacttattgtttgcttcaggaaatttctgcaaatcaatttatgtcagtaagcaactctcctctgggccaacagattgctcacctgggcaggtagcagcttgtgtcaataacagtttacttatgaagacttctgtcatggcccttaactcacagtgtcccccaatcctaaactctatgtcctgaacattacctcttcttatcagtcattggtcttgaaaggccccgggcaaccatgtgagcccagacgtcaataccctatcgataccaccttatcatctactcttctaacataacccctcaaggtggtgaccccacttacagtcgtattttattgaatttagctttccctaatcaacatgctagtctattggatgcagtgtcagaggcaacaatcacagaggttctgaaagcatcagcccacggttttctaaacatcatggttcaagacccttaacacgaaacagaaagtttccccgaggcgccgtaaacaacccgtttgggcgcttccctgataattatagtgaaatctggcatctaattttttttggtggactctcaaattttatatttacgttttgcttcctagaaataaaaaatgtttttataaggaattctttgatcgtttatgttttattcttgatagaaacctactttataacttcgaacattattgatgttcttcctgtatttctgagaggtgacagcttgctggcatcccctcgctggctctcggcgcctcctcggcctcagcccactctggccgcgcttcaggagcccttcagcccgcagctgcaccgtgggagcccctctctgtgctggctgaggcctgagcgggctccctctgccggcggggaggtgtggagggagaggcgcgggccggaacctgggctgcctgcggtgctcgcaggtccagcgcgacttccgggtgggcgcgggctcggcgcgccccgcactctgagcggtcggctggcgccgccggccctgggcagtgagagaggcttagcacccgggccagcagctgcggagggtgcactgggtcccccaacagtgatggcccgccggcgccgcgctcgaattttcgctgggcctcagccacctccccgcggggcaagggggcagggctcgggacctgcagcctgccatgctggagccctcaccctgctccccgcccccgtcccctgccccccgccccccagccgcgggctcccgcgcgccaccccgaggggacgggcgccacctcctgctacgcggcacccggtcccgtcaaccgcccaacggctgaggagtgcgggagcgcgccagagactggcgggcagctccgcccgcggccgggatgcactaggcaaagccagctgggctcctgagtccggtgggtacttggagaacttattacgtctagctggaggattgtaaatgcaccaatcagcatgctgtgtctagctcaaggtatgtgaacgcacccatcagtgctctgtgtctagctaatctagtggggactttggagaacttttgtgtctagctaaaggattgtaaacagaccaatcagctctctgtaaaatgaacccatcagctctctatgaaatggaccaatcatcaggatgtgggtggggtgagataagggaataaaagcggctgccagagccagcaacagcaacgtgctggggtccctttccacagtgtggaggctttgttcttttgctctttgcagtcttgctgctgctcactgtttggctctgcgcagagctgtaacactcaccaagaaggtctgcagcttcacccaaagatattccaaagatacagaaaactatacagagacattttgtgtagttctaatagcatataatccacaggtccctgatctataataggggttttttataaaattggttttttgtatgctatgaggaattttacttgttaaaaagaagaggtggaaaggcagaatatgaaaactatgagaatgacataagagactatgaattaggtgagaaaccagagagatttagaaacctgtagacattgtgcatcccccaatgcctttccccttaaaaaaatattatattctaatccagtccatcaaataaagtctacattcattagaaacatattctcttggtttttataatttcaatttttttcagacacagatagtgcatatgcagatttgttacttttgtacagtgcaccctggtagtgagcatagtacccagtaggtagttattcagcccatgctcccctctctcccccacccccatagcctgcagcatgtcttgttcccatgttaatgttcctgtgtgctcaatgtttaggttccacttataagtgagaatgtgtggtatctggttttcttttccagcactaatttgcttaggattatgtccttagctccatccatgttgctgcaaaggacataatttcattcttttttatggaggcatagtattccatagtgtatatgtaccacattttctttatccaatccaccgttgatgggcacctaggttcattccatgtctgtgctgttgtgaataacatgctgatgaacatacgagtgcatatatatttttctggtagaataatttattttcctttgaatatatacccagtaatgggaatgctgggtcgaagggtatctctgttttaagttcttagagaaatctccaaaatactttccacagtgcctgaaccagtttacatttccaccaacagtagttgtataagcattccctttactctgcagcctggccaacatctaattttttgactttttaattatagctattgtgactgatgtgagttggcatcttactgtggtttttgcttgcatttatttatttgatga

SEQ ID NO: 1882295 - DNA, 4001 bp, Homo sapiens
tcaaagttttttgcctattgatctattgagtttttttaatctttttcttattgattttttggagcttttaatatattaaggatgtaagttgtgataagaggtgaaaatacattcttttcctcagtgtctgtcttgatttcttaatttgctgatggtagtttttcatgcagaaattcctattttgaggtagtttaacttataaattattttactgcatttggatttttcagttttaatttaaaaaatcatggaatttgtccatgatttctgttagtatttttatggctttactgataacatttaaatattttatctatttgaaatttatttttatatacatggtgggacatgggtgcaactttcatcttttattatttattttgctgaatgctactcagttgtcctaatgccatttatcacatagtttttttcactaacaactttagatgtcacttttatgacttactaatttccctcctatttttgtgtctatctgtatttcctgtgcttttctgttgttctgtgtgtttattcatgacccagtacaacaatgttttagttattaaaactattatatgatctaagaactggtaaggctaattttctctttactctttttttttctggattttcctatttttgtttgcttctttttctatttgaatgttagaatcagattgtctagttctcacctcacagtaaaataaattaacaaataaataaaatacaaagatccagaaaaacctcagtctatttttatttaggtgcattcatttacataataagtcagggaaagttggcattttatgatgttgagtcttcctagtcgagaacatcataagtctttctatttgtccaagttttcttttataaactttcgagggtggataaaaatgtatctcatatagatgttaactttcttgttaagtttattcctgggaactttttcttgctaattaaatgggagtaatttcttttgttatatcttctaaagctattggtttctgtatatcaattttatccctacatcttactaattttcttattatttgttgaagaaattaacttgatattgtcttttggtttgagataggtgtatcttaccatgttatgaaaatacttatcaaatcctattttattaagttttttaacgctaaatttcatcagatacgaaatgcagcttttatacagattatcttattttttttaaatcttggatctgttcagaggaattacccataatcagcttttgcaaatattttctaaagtttttgaatttgattttcacatacaaatgtgtttggttgttgtttacagcatgtgtcattcaaaacccaatttttcataaggatgccatgttttcctaagcatttggagttccacagcatcttgaattcgtttaacaaaatgttatagaagaaaaaacttagaattagtacagttgtgtcattatttaaaagctaacatttttctctgagcttgaaaaataatagataccttttctagtgaagaaagcaccttaaattctttcttgaacaaagtatgtgtgtgtggatggaggagtaggttcgtaggcagatagattagataaacattgtcagtaaatttaaatggacatgatgcacactttaaactctctctgaaataaaataatgagaagtaagaaatccgagcccacagatactggcctgttcaggtggtcctgctgaagcactgtctccatggaaagaggagtgccagaaggaaggactgaggagacacagcagtgagtccacgttcttccccgaaacaacatcatttcctaagcttatttatcaccttttaattctacagaatcacattgtgattttatagtgactaaggaccaagagtagaaatgtcttatctccaaggcatggagcaggcacttaccatttaaaggaagcaatcttcaggcttttacaggatattgatctcttgggaatgtcagcaggggcacaaggagagcagtcgatgcgtctggactcataaattgctcacgttacatccaatatgcagtgtatgatatgacgtgtcatggaggtgtctgcaaaggcaccacaaacaccaacatctgggttacttatttgtctcctctgcagtgaagctggcaataaacacatctcccagaggctggggaaggtgggaaagaatgatcaaatgaaagctgccaaaatgagggcattttttctgtcttcatgaatcatcagccataaaacaacagcaggacaggggttgcatccttctctctgccgctacaaccagcaggtgatggattggacgtggtggctacaaaacgcagatgaaggtcagcactgtgttctggctgagacttctcaaattctcacttcacagttaatttttgtttcagacaatgaatgttgttgttattttaatgatagcataagtttaaaactttgatgcttccatttttcaaaaagggcaaaccaccactgacaataacaaaatcctttaacacaacagcactggggaacagagcccagggcttctccatttgctgattctcggcacctccgtctctgttactctctgatgtttcttaaaggctgtcatatatgcatgggataaatgcggcacagcagaaaaccagaaataaagacaatgagaatgaagacgaggcggttctggacaaggtgctgctcaaccaggaggtggcaacagcaggagagtggacctccttccactgaagctgcggataaacaggaccttggaggccagtgagctccctgccccagtagggacgtggcctgctctaggcagagggcagttgagcaaaggagagaggcatcaaagtagaatgacttcaacttttttaaaggttgaaaaacgctgaataaaggattactgtaaagagtatgggattgtttatatttgctgagtaatcaataccacatattgctttcacgttgtttgctcagctctgttccagggcacatccaagaagcatgggcatgtttctgtgctcttacaaagcctcctttctattaggaagcctgcagcacacacaaaacagccatcagcaagagtgtctgtggccccagtgctgccctaggcagcacacgagagtgatggactttgagtccctttattttctgctctctggaaggaggggttttaatagaatttatctttttatatattctgcctagcattagagaagcagacaattttagtcaatcattcaagaccatcctgcgacctcagcttttgtgctttacaaccttgtaaagaaacacagcaacataattaattacaattacagcactgtgatgtgaaatttcagccaaaaatctaagtcagccaaaaatctaagtcattgcctttggcctgaattcctttagcataatcttaagacagaacacgcatgcctgatccaagggcctgtgcacatcaggtgcacctcccagcaggaaaggctcggaggcgtgggccaggggatcatgcagagttgggctttcattcagcatccccgggaatcaggacattgcactcacacacacgcttgccacacagcctggcaggagccaagacaaggttgcaacactttcatctttaagaaaggagtttgaaaatattcgctgcaaattaacacaacttttctggctggtatgtacccacaaatggatgcagctgcaccccggaccgacctgggctccctgaaagatcagagggaaatgtgagggacaaacccattcagtgcagagctctctttcttcaagcaagggaaaaaagatttccaaatttgaaaatgaccttcgcacctcccctcctttctgttcccctcttcagtggaatgtttgaacaagcactgatgactcgctcccaaatagcccagataaggttttacaagaacaggtgggcctgcttgaaagataaactttttctgaagcaacaagaagacaaatgatccgaaacttgcaatttggttaatgtttctctctctctctctgccttgtgtgtac

SEQ ID NO: 1882296 - DNA, 4001 bp, Homo sapiens
aaaaacggggcctggaatggccgacgtgaggaatgagctgggcctaaagaggccactggcaggcaggagctggacctgccgaagtggccgaaaggcaggagctttggactggggaggcctcagtgaggcgagagctagctgggcgtggagagtccgctgtgaggccaaggccgaggccaggcccgtgcaggccttcgagaggcaggaggccgggcctgcaaaggccgactggagatcaagttctgcgcctgaagaggctgccaaaagtcaaaagcggggcctgggaaggccgccgagagccatgagctgggctgggccgaaagaggccactgggaggcaggaggagctgggcccggagaggctgccaaaaggcaggagcttcgcctgaggatgccacagtgagacaccatctgggtctggagggtccactgtgaggcagaggctggcctgtagagtccgacagtagacagaagttgggcaaaaggctgatttgaggaagttttgggcttcaacagtcagccacgaggcagacactaggcctggaaatagcccgacagtcatgagttgggcctaaatgggccactatgagggaggagctgtgcctgttgaggctcctccaaaaggtcatctgtacacacacagtaaaaatctgggagtaactgaagacagagttggtaagtaaaataagaaacagttataagaaattaaactatggtatccataggcacccggtaaaaggtcagttgatgttagctgctacttttttgttgtttagagacagggtctcactctgtcacccaggctggagtgcagaggcctgatcatgactcactgcagtctcagcctccctgggctcaagtgatcctcccacctcagcctcccaagtagctgggactacaggaacatgccaccacactaggctaattcatgtatttttctatagggatggtgactccctttgtttccaaggcctatcgcaaactcttggcctcaagccatcctcctgcctcagcctcccaaagtgttgcgattaccagtgtgagccaccacacctggccagctgctacttttatcaatattattattattccactcaattaaaaattattattttcaaggctatgcaacagtatgtatcctacagcgtaattgtaaaaacatatacagtcgtcatccctcagtatacagaattagttccagccccccatctctgcatataccaaaatccatgcttactcacgtttcgctgtcacccctctagaatccacgtatacgaaaattccaaatgttagttgggcatagtggcaagcacctgtagtctcagccacgtaggagattgagatgggaggatcgcttcagcctggaaggttgaggctgcagtcagctgtgatagcactaccacactccagccttggacaaaagagggagaccctgtctcagaaaaaaaacaaaataaaacaggttagaaattgtaatctaaccctaagcctaaccctaaccctaaccactaagcctaacccctaacccctacactaaccctaacggtaacccctaaccctaacccctaactccaaaccctaaccctaaccccaaaacctaaccctaaccctaaccccaaacccaaccccaacccgaaccccgaacctgaaccctaaccctaacccctaaccctaactcctaaccctaacccctaaccctaaccctaaccaataaccctaaccctaaccctaaccctaaccctaaccctaaaccctaaccctaaccctaaccctaacccctaatcctaaccctaaccctaccctaacccctaaccctaaccctaaccctgattattcagggctgcaaacagaaaggattttgttcaccgtcgatgctgccctgagttgtcccaaagcgaggccgtgcccccaaggtgtgtgctgagaaagctgctccgcgtttttggtgtcccccgggtctgtgttaagcagaacgcagctctgcccccgcaaaggcaccccgcgccggcgcgggcacgcacagactgacgcgacgtgcgcgcgggaggcgcggtggatgcgcagagagcacgccgccgggcgggggttggggtggcgtggtgcaggagcacagtcgcacgcccctgtgctgggggtggggcgcggtgcaggcgcggagacgggtggaacctcagtaattcgaaaagccgggctcgaccgccccctgcttgcagctgggcactacaggacccgcttggtcacggtgctgtgccagtgcgccccctgctggcgactagggcagctgcagggctctgttgcttatagtggtggccagcgccccctgctggcgccggggcaatgcagggccctcttgctcacagtatagcggctgcacgccgcctggtggcagctagggacattgcagggtcctcttgctcacagtgtggtggcagcacacccccctgctggcagctggggacactgccgggccctcttgcttgcagtgcagtgggggcacgccctcttctggcccctgggggcactacaggaacctctcgctcacagtgtagtggcagcacgccccctgttggcaaccagggcactgcggggtcctcttgctcatggtgtggtgcccgtatgacacctgctggcagctaaggacactgcagggccctgttgctcacagtgtagtcgtcgtacgccacctgctggcagctggagacactgcctggccctcttggtggcagtgtcgaggcagcacgccacctgcaggcagatggggactaggcagggctctcttgctcccagtgtgacggttggcgtcccctactggctgcctcctgcaccacttaaagtcagagcatcagtttttaagccccatcagttctgtaaattcaactgaaacggagctagtactagggagagctgatgtcccagttcttgtctaacttggaagaaagattttcaccaagaggcagtacaaaaatgggagacaacttcattgaaaagaaatacagtgtaaagagctcattgtagaaaaatagggaggagtgggctgatcgtgcatgaaaacatcctaggagtcctgtgcagggaattttattttggacttcttcacattcctgcctctgtctcaagtctccacctgttctctttgtctggttttcctgctactgccttaggtccccgacttgccacacttaggcttgtgggacctcctcactgttggttgaggtacatgtgtggtgatcaatccgaatccactctggcaccagcctccttcccgccatcccaggcaggctgacagcggtcacgtttgtacccagtgtgcctgcctatctcttttgaatgtccttctttgccctaatctgcacttagggtgccaggtttctcttaagaatgtcccctttgtccttcttatcagcatgtagctaccaatattctgacatttttattgcagagtgaatgatggttggggcatcttaaagagagttctagggtttttctttctgcataggtacctcttcgcactcctacccacaactgacaagtgcccatccactccagcactagagatgctactaatatgtgcatttttggtggtccctccaggtgagccttctcagactttcccttttccaggagctccccctcctgttcatgtctagctatctatctcctctaacagagcccactatcctgtgtgtttcccaaaaatagtgatggaaggattaattggaaaccataggaaatgatatgcatgtagatgaaaactttacaacttacacaaataatcactcaaaatcatccttacactaaaaatgcaaaactataccatttctagaagaatctatagaagaaaagctatgtgcctttgggtttggtaatgaattttaacaaatgacacaaaaggttgatatacacagaagaaatgacaatgtggatttcttaatatttaaagtttatactctggagaagaccttgttaagataacaaaaagacaagccacatattgaagaaaat

SEQ ID NO: 1882297 - DNA, 4001 bp, Homo sapiens
cagttcttgtattataccaaactttcttgtagtgaacactatacgccaccttcttctacctggaaacccttcctaacctggacaactctacacattattttggtctttacttaaatgtcacttctgctatgaaatattccctgacctcccccaccccactgcacctctgcatgctactgtaaatggagaagcaagagatgataacagggttacacatccgctagtctggggattgtattctgaaactaacaccctactaagaatgagcagtcagagttataacttccctttggaaaagcaggtacttaaatgcagttgtgaggacagatgaaaagtacataaaacacctacaatgcatacctcctagaaggagctcaatatatgttatccattattcattcaacaaatgttcatgaaatgccaactatttcatagacactgtggtagatgctggggatagagaaaatacaaagtaaactatgaaactatagaatgagcatccaaagtctaatatatagaatgagtatccgaagtctaatagggagtaggagtgtttgaaggagtcagtcaacctgcttaagattcaaaggatggacaacatttggctgtgatgcaggagtgtaaaaggaggaattttcaggaagagaggacaatatgagtaaggacggggcgtgaaaggctatggattgtttttcatggtacacataattcaatgttgcataaaactgcatggtacacatgattcaatattgcataaaattggaacaagaagctaacgagagatgaaactagtcagggagatggagaatcttgtatcctaggcaaagtaatcattttctcttacagattgcctttcaaaaattttcagcaggagagtgccattatccgatttacatttttagtcaggtcattctgatagcagtgtggagaatttaagagtcaaactggagtcagagaactggtaaagggcccatctgaggaagttaaaaagagagaatggatatgctttggcataagatgcatttaggatactctactgttcttactaaaacactgggaggattgtggtggcttacagcaagatagaaatctaggagagtatgtttagaacggaaagttgaacagctcagttcggtacgcattggattagtaatctttctcgttgcttcctcacaggatttagggaagcacaagacatatagtttgtaaggtgtggcaatgtcagtaagaatggaaaagctggcctccataaactcttactgtacaaatgaagcaacagcttacagcgggtggctgtaggtacaggaaatggcctgtattcacgagtgtattcacgagtccacgagtagcgcatctagtatttttccagccctggtgactcagagctgaagatggcgcctgtggcagaaatcagaaaagtgggagggagcattaggtgtagaaaaggatggcgttttaacttttgttttgtttttcacacacagggagatagctctaaaggaacagtggataattttttcttaaaattttgtctgtagtacaacttcattttccacgccttaaaaccatgttttcttttgtgggcgcgatcgcgtggggagtgacaaatctgtttctttgcctcattcattcattttcttattctgggcggcttccatgacagcctccccagttttcctttgcccagtcagtttttccctgcgctagctacaattctaaggcgaaaagagcattttcggaggtgagggcggggaaaactcaagactctgtaggggcacccgcgcatttccgggtcccttaccgctccgagtggaggagactgttcccgctcgcgtggccggggaggcgggagccccctaagttccctgaagctcgcgcccgcctgcggcctgagggcccccgggcaggcgccgcacggcccctcctcctggaagaaggcggtggaggcgcggggacggggccgcggtcttcgcctagagcgcgggacgcatcggtcgccatgggaacggcggcgtaggcaggcgctgacgtcagcaggcggcgcgctgtccgcactgcggcacagagccgcggcttgctttcaggacacgggtcgctggcgggttaggtggctgcgtggccgcctcacttcgcgcacgcgccgctaggctgggggagttgatttgcactgctccgggtgtcggctccggcgggacgggcggttctgcgtacccctctccgtgagtacatcatgggtgcgctggtggcgggagcgcgggccggggtgctcggcctgcccggccctctcctgggcggcgtgtcggggctgctggagtccgagagcgcggaggctgatagcgtagtgaccgacgagcgtgggccgggtgtcccgggggaatgcgatttctgagagtcctcaccgtacttttgcgcttctttcactggtctccgtgtccccggagagttgagcatggtgctctgatagagaattcaatctttgcctttcctactcccgattcttatttaaatgcttttaaatcagatgtgtactgagtgtgtttatttccttttagagtgtcaacctggggctgaatcttcaacctgtcaaagccttcttaattatgtctgagaaaaggtgatcaatttgttatatttataagagccaaattatattaatagggttgtttcgagatgcataaaaatagaacaaaaatgtagaccatttaagaatccttatcaaaggttgtgctgcgtttagcattcctgtaaaaacatctattgtgaaaataaagctttcccctttcttttgagaaagagatgccaacgattttttcacctgttgcattaacagttgctgttactgcttgggcgttaggaggaagattgcttcttatgagtactctgggaaattttttaaagaatgcttgaaagaaattcaaataccaaaagtgtttttaaaccatacctagaatcttgtttatgaggaataatatttatgaagttagaatcttgtttacttatgaagaatcttgttgatttattcattgaattttgtatacaggatttttgtttgtctttttttcccttgcgataacatttggttaaggagcgaattatcaagcctctcagttttttctcccaatgatattgagccacatattggctgataatcaggttgtctgtaaaataaaatgagatgaaatgtaatccatttaattttcctgtgtaatatctcttagacgctcctgtgaaagggtttgtgagggagaagttgtaaaataatggaatatataagaatcagaggtgtcttttaaagtcctatctgattttttgcagaggttactaatcaaatattagccgttaattctatcatgtttgctgtagtacatattaagatttagagatggctgagcgcagtgggtcacgcctgtaatcctagcactttgggaggctaaagtgggtggatcacttgaggtcaggagttcagtatcagcctggccaatgttggtgaaaccccatctctactaaaaatacaaaaattagctgggtgtgatggcccacacctgtagtcccagctaccagggaggctgaggcaggtgaattgcttgaacccaggaggcggaggcagcagtgagctgagattgtgccactgcactccaacctgggcaacagagcgagactctgtctccaaaaaaaaaaaattagagatgatttctgtactgtatttgctgtgttatcattacataatattagtatttattagtttagttgtgtattaagctgttaatagtaaataagtatatgatttatatattttatttgtaattatttacttatttttaatacaataataatggacataaagtaattttattgcaatgtactgattactttgctttttggtattttctcttctccttacagtactaaaataggtgccattttaaattcccagacaaggaaaaaccaaggattagaaattaagtagcttgcccaaggccacacatcagtaagtggtgaca

SEQ ID NO: 1882298 - DNA, 4001 bp, Homo sapiens
tagtaacttacatttagtaaaagcttccaggtacatgagtgatatttgcctcctgggatgcatctcagctttttaatattaagggtgaaaatagcctttttgtgtaagttcaaataaatatcttggatagtgtcttcaaatataactccaaatcctatgaggtttaccatcagctacctgtcacagactcaaagatagtgaagcagaaagcaaacaagagtgccaaatattttgcaaattatgactttacgttatcaaaaaagatttcttgtaagtgtaacatagggaatattcttgttaaaaattcatggagtaccatcattttaataattttattaatttattaatgtggtttctaaattagttttcgtatatcaataaaattattttaaaatatatataatagttaaaggacagcttcccactctaagtcctcattcagaaaacgacattttctgtttccctctactgctaatttgccataatacatctgtttttatcattgactttggatgtttttgtagcttgtgaaaatactgaattttcaattcccccttaaacatttccccatgattcttttaggccatctattggccactttcctttagctcagtaaagactcaagaacagtgcctgcctaatcccctatcaccatataaataggcaataaagaatttacagcaaggtcaactcttagggggaaaatatttaaaagatcattaaagtaattattccctggaacctaaggtaattgttttaaaatcagatttctagagttgtatggcaatcaaatgagcaaaaagttaagagagttaggcacaaagtgtgtcactggtaccacattcagcagcctttcaaatgatggtttagatttcatggtgaaatcacacagattaaatggcattcatcgtgtcattgggttttactgtggggctgaagatacaggtgtaaagttctcttctggttctgcttgatgtgatttgagtcgttggtcaaggcaagcttcttgatggctcggttttctgatttatactacgcttgtcactcacttaaggaagttttaggtgaagaggatggaactcaacctgattcattcattggtgatgcacaataactgtatacttcccacccaggtttatttattcaaaccttccagacagctccttctggtgtttgtcggccaagacttctgtgttattatggatggccccatagcagctctcgccattgtaaataaatctccatattacaaacgggaggagtctggcacagaaagaacaccaaacagcagcactttcaagtattatatatattttaaccagggtcaacacttaatgaataaggaatgtttaataaaacacttaggaaatacaggcacatatgtaagtgccaaattatcagaaatatcacttactgacataatgtaacatgttaatacacaaacccccaggatatgataatttgtgtatttatttctgaaaagaaacatgactgaagacttacctaatgtcaactgattaaactacatcagaaggtgtattcattttctattgctcctgtaacaaattcccacgcaattagtggcttaatacaacataaatttacggtctcacagttctgtagatcagaagtctgagtgatcttggctagtttctctgctctaggtctcacaaggtcaaaatcaaggtgtcgccagcctggcctcttatctggaggctctggagaagcctttttccgacttattcaggttgttggctgagtttagttgcatgcagttgtggaattaaagtcttcatttccttagcggttgtgggtaggtgtcagcaggttctcagcctctagaggctgcccccattccctggttcataacctccttcatcttccaagtcagccactgcagaagttcttctcactcttcaaacctccctaacctccccttctgcctcatctgtcctgtccccagcaggaggaagttctcagcttttaaggtcttgtgtgattaggattgtctctcttcttaattacatcacaaagtccattttgttgtgtaacataacatagtcataggttccatgaattaggatgtgggcatcattggaggacatcctacctaccttccacagaaggtaaattacaaaggaaaaagtcactccactggatttggtctatgtgcatccacctttgacaggcctagtgataggcaacatacttggggagaaaatccattatgtgatgtttccaatggaagccttatctgtgaaccacctcccagttgaaagcagagttcagtagccacagagtctacttaaaagaccaaacagaaaattagtggatttttcagtttttagcttctgtaatacatcagtgtcattattcaaaaagcaatattccagtcaatgggccatacttatgtaaaattatctcctaaaataaattttcaattgataacttttaaagtaaaacaaaaggcagccatccagggagaattattagcttgctatatgacattggtggaaccagtgcttcttggactagatgtcttgtaccttgtgcctcttggactcagaattactgaaaagctaatgaaaatttctattatttaaactagcttggggaataaaaatgaagaattcattagaaggtaaattccccaagaacaatgatggaggattttattcactgatgtattttaagctcctagcatagtccctgacacagcatgaacatttaagtaacatttgttgaatgaataaatgaatgaatgatgaataaatgaaagacattctattatcaagtacagattaacctaatctgggcaatctgtcattattttgatttgtgtccttgttcataaacaagctgatgatgtgttgtaaaaatacatataaggagatatttttaatggacatctcttatagttttcttaatgttatagatctattattaccatatgacaacctctgtgactatactgtgaacagacttgcctcctggattaataaaaaagtattaaatgacactcaaactctaaattatatgtgttaattctgttcattgtttcaaactttcatatttataagaccatttcccataattgttgcatgtagcaaaatttctgttttaaaaatgaatagaacatgagaatagcaagtgatatgttaaaatattaatgttggtaaaagccatgaatgattgtttttgtttgtaatcataaataaatattatgagcattttacttttatagccagaatgcaatatcctccagaaactagcaaaggactggtcttggcacctcccctgatacaatgacggccatttcctaatggccattaaggtgcaacaggaggcaaaaggaagatttcaagaagtcgcaaaactgggatgccacctataaaaataaataaataaggatttgagatgccaataaaattattttaataacttacatagtctttcacatagattttttgatattaatgttttacatattcacaatagttgtgaattgaatgaaaataaatactagctggaatcagttaataatcttaaggaattgtatgtcttaaggtctatggatttgacagactcacaaaacaggctgggaaaatatccacagatcaggtatcaaggcaatcttccattcactatactttcctctcttgcatctggtaaggcagaaaaaatttaccttacatttttctggagaagtacttgcttccctagggatattctgctactgaagcctgcatggatataaaatgatgatcagaaagtcaaaggttttaaagcttacaaaataaatcttatacttctcaccaacacaaattagaatttgaattcttcaatagtaaacagagtttgggaatttggactacgaatcagctacattctgtaagctagaggatgtgaccaggctctatgcagaataaattggttaaggctgaaggggaagtcaagagagcatgccttgcttccagggactcatacagctgttgtatcag

SEQ ID NO: 1882299 - DNA, 4001 bp, Homo sapiens
tgtgtccctgtgtgtgtgtttctgtctctgccctgtctccccatgtctcccagtgtctctgtctctctcactgtatctcaggtgggatgaaggcaaaagcaaagaggcacccaggtccattctgagagagtttagggactcagtggtggctgaaaggaaggcagtgggttgggtcatttaggagctgggggtcagggtgggtggtcccaggaaaatgtgggcagggccaaaggtgggcctatccacctcaggagactgtatgatccccctcctgtggccccctggccaagacctcccagggagatggtgcctcaggccctgtctggggtcactgggggtcagcctggcctacactagggtgaagggagggcaaaaccggagattttgctccccttctcaactgggagatgagctggaaagcagagaggcagaggggagagactcagctgggttgaaacctggctcccactgcagcaagctcatatgacggcagacaagtctcatatctctctgaatctcagtctccacgtctgtgcaatgggtgaatgaagagctgcttggctcgtagaagattctcaaagaatccgtggggccgggcacagtggctcacgcctgcaatcccagcactttgggggccatggctggtggatcacctgaggtcaggagttcgagacccgcctggtcaaaatgatgaaaccctatctctactaaaaatacaaataaattaactgggcatggtggtgggcacctgtaatcccagctactcgggaggctgaggcaggagaatcacttgaacctgggaggtggaggttgcagtgagccgagatcacgccattgcactccaacgtgggcgacaagagtgaaactccgtctaaaaaataagaatccatggaaccatttttatgaagcatcgactacatcctagtcctgttctaggcactggggaatagagcaatgagcaagacatacacaacctccactttggggggcttacattattgctagtgagataaacaacagatacgccagggtgagaggtgctatgaagaaagctgagactggatagttggggggatatcacagagggatgaggaggccttgctgaggaggtcgtgtgccggaagccagggagggagccatctgggggaagggcagccatgggcacagcaagtgcgtcgccctgaggcaggagcaggactggtgggtttgaggaaagggatccgtggagctggaaaggcatacgtgggagggggtgggacaggaggtgaggtcagaaaggaaatgtggagatgcgctttgctgatcatgggtttgggggtttgtttctttctctttttatctctgtcgctcgggctggagtgcagtgacgcgatgacagctcactgcaacctccactcctgggctcaggcgatcctcccgcctcagcgaggactgcaggcgcgcgccaccgcaccaggcttgggtttctcggatccagtgtggagtgatgcgatgtggtttgcatatttaaagctccctgggctgccgaggaggaaaggctgtagggggcggggcctgaaacagggaggcaggttccgaggctgccgcaggcgtggggcggggtcgtctggctgtgacttactgcagagagtatgagggggaaccaagagggtacttaccactaaggggagcgccttggccagcacctctgctcagtggggagccaggccccgccccaggtggtaccttcccccttgccccatatgaggggcttgtgggggactttgtctccatcatccgcagggtggagcggggcggcctgggacctggagtccgggaagagtcgaaggcctgtgggcggccgaggtcacgcgtgggcgcctgcggggggagggcggaaccaagaggttggcaccgcagtgcctgtgcgcaccgaagtgcagcaaacacgtctcggccacgactgccaggccaccccaggctccagcggagcgtgcgtacctgcgcaggcgctcgcatctgagaactgccgaaccgtgccacatttccgttccctctggcctcgccctcaggggtcgaccggcggcggagcgcggggcctcctgtgctgaaggcagctccctggcctccagaaactcacagtcagtggtgggagggccgtaacagacccgcgcagttaagaaccagatgatgatgttgctgtagtatagtttggagagtgcagagaaggaagcaagcaatgccagcagggaggaatccagaaggcttccaggagaaggcaccatttatgatttgggcttgtatcaggaggaggaagttgacaggtgaaataaggggagggcatgcctgccaggcgaacagtctgtgattgggaagtgtccagtctgcaccatgaccccactgtccaccttcctgaccaagtaggaaccatttggactcctctattgtcctgggcctccttgtttagtccacccttttattttattttattttattttatattatcttattttattttatttatttcatttcatttcatttcattttatgagatggagtcccgctctgtcgcccaggctggagtgcagtggcgcgatctctgctcactgcaacctctgcctctgggttcaagcgattcgcctgcctcagcctcctgagtagctgggattacaggcacctgccaccgcgcctgtctactttatttattattattattattttttgagacagagtctcactctgttgccaggctggagcaggctggaatgcagtggagctttttcggctcactgcaacctctgcctctcgggttcaagcaattctcctgcctcagactcctgagtagctgggactacaggcacgcatcgtgacacccggctaattttttctattttttttagtagagaaggggtttcaccatgttggccaggatggtctcgatctcttgacctcgtgatctgcccatcttgtcctcccaaagtgctgggattacaggtggaagccaccgcaccctgccttttttttttttttttttttttgacggagtcttgctctgtcgcccaggctggagtgcagtggcgcgatctcggctcactgcaagctccgcctcccaggttcacgccattctcctgcctcagcctcccaagtagctgggactacaggtgcccgccaccatgcccggctaattttttgtattttcagtagagacagggtttcaccgtgttagtgtgcctggctaatttttgtatttttagtagagatggagtttcaccatgttggccaggctggtctcgaactcctgacctcaggtgatctgccctccttggcctcccacagtgttgggattaagggcatgagccaccacacccagcccacccatttatgtttagcttattttctctctaccatctatcccgctcaacacccccactctcactgcctttgctggagccctaaatcaccgccctagccttccatcctctcactgcatctgcctcaccactgccagggtgccgttggctctcttcctctctccccctctataacccctacccatcctgtacagctcagccatggcacctactccagccctggtttcctcacagctccctggttttagggctaacaggattcactgcatgtgtttacttgctctccccaggggagacaaacacagcatgaaggcaggccctgggggtgcgggcgggggttttgggggagctttgtttccattgtctgcagtgtccagcatggtgtcagattcaatatatggcactagactgaatgagcagagggtggcttgcagaaggacgcttgtgaataggggtgggtgagagcgggggaagcaggcaggggctggattacatagggccttaaaagccaacttaagcagcttggcgttcatcctcagggcaatgggagcgagggccggagacctgggagagtggcctggtaagatgtacagcgagggggcaggggctaatgtggaggccttcacaatggtcacagtgagagaggagtgg

SEQ ID NO: 1882300 - DNA, 4001 bp, Homo sapiens
acctgaaatctagaattcactctcatgaaatggtgagaaaactgaaagactttgtcatttacagaacaaaataatttctcctgtatacactactgacaaagtacacatgcattatttaagagaattttggttatgaaaaatgtgtgattttactgtttagagaaaaaaatgcaggttatcatgataaccaaaagtttacacaccattgtcttgcaatacaatctgtgacgacaatatttcaataccattgccggactaaacctttaacattaattatttatcaaaattatacatgccactaacacatctcaacaaagaagattatgtaagtgagctgccttggcgtcagtaatactgaacacagtagctattttcaatccttcattaaaattagatcaagatgtacttgcattatgtgttgctgttcctgtaaggaagacttacattagttttaagatttactttgggtataagtgacattttcctctcttttttgacatttctttttcttctttgtcccctcctccactgcccgcacccccccaaccaaaaaaagttttcagtataatacagaaaacaaaaacacaaacacctgccctgttcactctctcttatgcataataaatgctttgttctccccctcaactggatccggcagggatcgcccgggggcacctgccacttcaccctcagacttggctctctgtccccaccctggcccctaggattccaaatggtgcagcaaaatacgacaatcctaaggttcgtaaaataagcaatggatagtgaaggaaagcctttaaatgttagtgttttaaaacatcagacttaaaagttacttctgagtaggctgaaaggtgaatccaggcgcatgtaaacatatcctggcctatcgcttgataactcgcgcaccgtgttgaggccctaggaaaatctcaaaaacggagatgtagtctaaaaactggacgacagcatagaccacgttgctgtggccccacatattacccacgagaaaaatctaagtggtaaagtcactggtccaaggtcaagctgagccagtcgcaggcagggctagtccgcgaccttctaacctttccatctcccacccagccgcgcacaggcccttggtcgcgccggcacccgaagagttcccacggatacggttcccaagtcagtggcatgtcagtgcccttcaagctaccgcaattttatttgttctccccgccagctccataaagtattaaaggctctctccacgacttcttcccaagcccaggtgccctaaaccacttgagcccacggcgcctaaagccgactcacccgcagcccgaggtgcgggagccctcggacggactccggcccgccccgcagtccccaccggccgcgctgcggccccggctgacgacgagtcgagaaagtcacccgcgatgaccgcggacgcgaggggcgggccgcgtcgcgccgccccgcggaggcgccgcaaacttttcccggttcgcaagttgccgggatctgcggccgcggaccgacttccttcgccggccaccggagggagggggcgcccctaccccgggagggggctgggcgagccgggagacggtcaagttggggtcgggggagcgcgggcgctccgcactctggggcacgcggggacgagcccggccgcattgtctgcgcggcctcggaacaagcacggccggcggtggcaccggcgggcgcggggaggagttgccgtcccctttcgccgccgccgcccaccgcgttctttgtgtgtctctcgccgccctccagccgcttcgccgctcgcctgacagctgatgggctcaccgcgccgggtcccgcgtcctctcggccgcagccggcggagcccggcccggcaggaggaggaggggagaagaggagcgttgacagatgctgtcttggagcgggcaccgccgggggaaaagtctggactgcctcggcgagaagcggccggtaggcaaccggccccagcctcgcattcgcctcaaagaccccaattggctaggagcccttccctccgcagcggctcgcgcagctccgctcttgcgccccgcgcccggctcagcggacggactagcgcgcccggtcaagaatcctggggaacccgctccgccccctggctccagcgccctccaatgatgtcggcgtacagagggctgttccgcccaatcaggtgtcggaaagcccagccagtccccgggagtgtagccaatagaaggcgactccggcaacacacccgccctgatccactaggaacaaaccgctccgagcccgggtggtgggaccgatcctggagcccagatcaagccaagtccggccaaagctgtgtcgcaaagtaagaatctgaagacaggtccggtgcttaaatgactattattctaaagagttgaagatgggaacggtggacgcacaaaatctttaccctcggcttaaaacgccttttctggcaaaagtttgtgtatgaaagaaagctgaacaaacacgttgtagcactgtttaagtgaaggcctttccttttagaacactgctttacaatgcctaatcagccggcgctcaggttggtgcattcagagacccgagcgtttgtgttcctaataagtttgctagaatgtcaggtaactgaagcaggttagtttctatcctgccccaaaacacagactgtcactggcaccaccatgttgtggttttttccatgaatgaaaatataagagttctgtatgtaaatcatctttattgtgaactttatttctataataaagtcacacaaactatctttagtggaagttggatgaaataccggaaaagaagaatgtagagatagatgatagatatgtaggatatctctatccatctgccacccatctatctatcaagaaaggacttgagtaaagcactggctataaacgactgtaccttttgatcacaggaccttacaaataataggcacactagttatttgtttatttgatttgaataggatgactcatttgttactgttcatatgaagtttataaacttcattgagttgtttactgaaagtggactacaccatgacgaaaacagtatttggcaacacatatttgcatcttttaaaataaaattacacttatttgtacttcaaatagttacgtcagtttatttcttcgggtaataaactgtgcatttaaaaatttttgtacacatgtggcatgttccttctttataaattattttgatgaccaaatacattttttaaagggtgatctgtacaatgaacggaaagaagagagagatctcaaacaagaaaaatatggctatattacctccttgctttcgtgattgaaactcaccatgacttaccacattaagttcgggggataacatgacccctgaaataaagttttatcaacagatccaggttctggattgaccttgagccaatctcttaatgactaactctgttacaagagaacaatacgcctggctctacctgcctccttggggtgctgtaagatccctccaagatagtgtttgtcaagcactttgctttctgtaaaatactgtgccaagtgcagaacagtcttaaatgtgttattattctctgtttattatcagaacattaatatttcctcgactgcacattttttcaactgaagtatatttttgagcccatcagttttctctcaaaatagatctgaatgaaactcctgcctgttcattctagatcaaagcagtactttcagggtttctttctcttttttaatgaagaggatgttagaagagaagaatactgaggaaagaattctggatggaaaacgttcgagaaattttattcactcttagtgtattcctcttagtatattcctcaaaaacaagatgtatcataatgtccagtttaatactctgttcataatgtttaaaaacttaagcaagtttcaatgtatatgcttaaaataagttaacgtatcccatgtctgctaatatagttttagatggaagtt

SEQ ID NO: 1882301 - DNA, 4001 bp, Homo sapiens
ctcaactcccaaacgtcttcctgcatgtgctcctgttcctttttctcctccccctccccgccccctaccttgctcctcgctgctgtccccaaaccaggcagtgggttcctcctctgggagctggggttctccgccacctcctccaccctcgagggctttgcgtttcttcgacatctctgcccagggctggggatttgggggttttctttccccaccccctggccctcccccctcggagaggagagtgaaggtggggttggatggaggggagggggttaggtgcagaggaaaggggtggggagaagagaccagagagggagatggaagagattgctgcttcaggaggggaagggacttggggtggcaggaaaggcagaggggcagggactcagtgcagaaatcctacaatccggtccatcaatgtagccctacgtctaggagactgtttgctggtgttgcgcctctctctctctgtctctctctctctctctctctctctctctctgcctctccctctccctctctcagtctctctctccttcctccttcctccttttccttcaagtagaagggtgagccgagaggggaggagagatcaaaccagaaaggagaggctccttgggtgcctcagcggatttcttccccatttgggggggcgatggggtggggtgctatgaggactcctggccctgtctagctatgaaggagtggtgtcttatggttgggcttggcttggcttggggggaggggggacgggacagtgtttgcagtgtttggtgaggatgcgatttcaatgggttgcaaggaaaattgggtggcatgaagaaaataaaatgctgcagaatgcaatctagtgatgctttcaggtgctggggactccggaccccctcctcccctatgacatcacaggatcttttgcagaagagactggggaggtggggggagagaagagagtggcggcagaggcgaggatcaaaagagcagggggtcctgtccccactgagaactggagaagggcggctggctcgggaggaaggaagttgcggtgcacacaccatcccttctccaggccgcctcgggaggcacctgcgggtctggcgcggcagccgctgcggtttgcagctggcgcgcagccctcgctgggaacttggagctctcaaactcctcggatcaagcgttagccccgaggctgtcagttggcgctggggcgggctgcagtctctctcccctcctctgcaaacccttgagtcttcggctttatatactcccttttcttctttctcgagtccactcatcaccctttcccccaaacagtcacctccacaagcacaacacaccacacacgcgcacacgttttcttattgccaaaaagggtggagggaaaggacaggaagtttttttaagtacacgcacacacacacaaagattgggactaagtttttctggactctcaagggttaaataataggtaaaagaactgtcaacttacccgccaaagtatgctgacgcgcatatctgctttccgcttcatttcgagttcataaatttaaaaagagacagtgagagaaagaaaaagaaaaaaaaaggcaaggcgccgggagcacagtgggtccagggttccatggagaactgcgcaaagcaagttgccaagaaagcccgctggccaagttcgggacctgtccaccacgctcgcgcgctccgctcagcaggcagattccaaaggcttggggcactctggggtgcgcgccgatcttctcgcaaaaggcgagtgtgtggggttcctccttccctcctttccatctgggggtctcggggaaagctgcacccagcgccttgggcgcccatgaagaccagtccatctcagctcaagctcccagcagcagcaacttcggactcagacctctctctttagaacatgagtgcttgtgtgtgcgtgcgtgtgtgtgtgtgtgtgtgtccgagtgcacttcacatttgggggtgcttgtgctctcaggaacgactctcccggctgcccggaacttagagagtttccctttaagccggagatgctgctcggacacccccccgcgtccaacaggaggcgatgacgtctgtagcctcgttgccagaacagtccccaggctaccgctgccgttcattgacaggagcgggcgctcggacgtcagcagccggacctttggcaaggctgctcccgcggagacggctcccacccccgcacctgccagcccgcccccccggggggtggtcacgaaatcaaagccaccagaggaggggcccggggaggtgctggggctgggggagggggatgactcggatctgccctctttgtcctggagcaccggagtatataaatagtgcagtctccagccagactctctcccagtcttgcacgcccccgcagtccccccaacccgacccccgccccttgtcactacgtgtcgggctcgctctgcctggagggaggctggggtgcggggaagcagggagtgcaaacagacattggttctctttcctcttcccattcatacatttctgttggagtcctagggccgccgcgccgggagtcgcaatgaatggatggatgcccgcgcgctgggaccaccaggtccgcagagatgtcgccggcgctaggggcgctcctcccgcgtggggacaggcgccctcgcctaggcgcagtgtggggggaccccaaaagacccttaagaggccaaaggcctgctctccccgttctccccaacacacaccaggggtcttttctgccccggagaagttgggacgcaaaacgtagggaactgcgctcagtctccgcaccacgaagagtcgagatggggaccgagaccagcacggacggtagcaacagagaggggagcgcccaagtggcgcaacgttgtggctgaagccaagcctgtcgcctccccctgagtaccgctggcggcccaggaccgtgcgctctcccttcctgagcacccagggatgcactgcgcagggaaggagggcacggcgggagggtgcttgcaggggactgctgcgcggattccccatccgcacccggctcgcggggaatccgtgggcttgcactcgccagaaagagctgctgcaggagcagccggatggtgaggcccgttcccgaccctgggtgggaggaacttaaagggctgagttctgaggcgccaggcacagggcgcagcttcataaatgcacccaaaagcttccatggacagacggcacagatgtcgctgaagtgaacctaaggaagtttgctaccccaagacccgggcttcgcgccaggtgacaacagacgtctgggagtgtggtgacacctgcgcagagtccctggtggttcaacctgtccgagaaggttgcaagaagatgccactgtcttacctttctcccctagtgctcatgccccagaaaaggccactgggtcactagatcccaaccccttgtgccatgagagggaagcctgcacaacggcgttggcactcccccataaatcgtctcctgggtccttcccattacgcacacacataatgtcatttctccagggaaaaataaataacaactttcttgactctccaccttctccctccatctctacccaggttctctgtttccctttacaaaagaatgcagctgtctagatggtggctctggtctctctcctctctctgggtcttgaatcgttccaaaacactttcttaagagttctacttctgctgtcctgcaatatctcacttttactgaggtcaccattcaacccaaaactctctatccaagagtccattcttagacatcttagatgacttacccatgacagtggacagaattcttcattcctgcctccttagaatacaaccttgactcagctttccagatgctccactctgctgatttgtgtcccacctttctggatattcccccttagacacatttgctgaactcctcgtctccccactgtcttcatgttgcagtgtcccaaggctcatctgtggaccttt

SEQ ID NO: 1882302 - DNA, 4001 bp, Homo sapiens
tgcaccactggcctcaagcagtcctcccagctctgccaaattttagacacctggacttggaaacccatgagaagttggccagcgcttccttttgcatttatgcagagcaatggtaaacgtcagcagcaaatttacaatcaatcttattttccagtgtctccagagatttgattgttttgcttatatggcttatggcaatacttacctccaatgtctgatttttcaaaaaaatttcatctaatcctttgtgcaatggtttacatctaattttttttgttctgagatgtagacagctattaagaactgatctttgcacagtaaatttttcctattcttagtcattatccttaggtgaggcaacatggtgccattcagttattcagcaaattctcacatcttccgtgtgccatgcattgttacaggttttgagcctagaaccatgaaaacaaaagacaaaaatctctgcccttgtggactttgtattccagaggagagaaaataaacaaggtaagtaaaatatatagtatggtagataatgaatggtatgggctgaaggaaaaacataaacaaagacgttaggtagtgctgagagggagggtggtttgcagttgagataaggatgtctccaaggatatggtggcatctgcattaccagagaaacattccaggcagagaaaccagtgagtgcaaaggccctgaggcagaagcatggctggcttgtgtggtaggcatgagtgagctaaggacagaggagctacagaggacgccaaagagaaattgagaattgaagggagttgggggatggagctgttggtaccgaagggagacattataaagaccttagcttggctgggcactgtggctcatgcctgtaatcccagcacattgggaagccgaggcaggtggatcacctgaggtcaagagttcgagaccagcctggccaacatggggaaaccccatctctactaaaaatacaaaaattagccgggcgtggtggcgtgcacctgtaatcccagctacttgggaggctgaggcaagagaatcgcttgaacccgggaagtggaggttgcagtgagccaagatcacaccactgcactgcagtctgggcaacaagagtgaaactccatctcaaaaaaaaaaaagaccttagcttttcctctgagagcagaaactttggaggggcttgagtcaagcaatggcgtgatctgcttcgtatcttaacagagtcaccttggctgctcggtcagggcagggggacaagtgtggaggcagcaaagtcaatttggacgctgtggccaacaaccataagcacggctgaggtcacctagggagtgcttgtggatgaacagggaagaggcccaagactggacgtggaggtctccaatgtttagagtcagggaaatgaaggacaccaacaaaactcacctaagagaggagcagtcgaagaaggaggggaactgctgagcatgggctctggaagccacagctccaggaagaggaagtgaacagctctgtcaaacgctgctgctgggtggagctccctgaagacagagagtgaacccttggttttcgccatgtagaggtgagtggatgtggtggaaaacctgcagggaggttagaatcagggagctctaccattttagccaaattcactacataaaacctaggcactgctaagcaatttactcacccctttgatcctcagcggtctcattagtaacacagatggaatgattcctacctcaggctggtgagctcttaaagagacaatgttaggagtattcatttgctaggatggccttcacaaaatacaaccgacctgaattgcaaacatttattttctcacagttccggaggctggaagtccaagatggagctgctgtgagggttggtttccggtgaggcctttcttcctagctcgtagacagccaccttctctctgtgtcctcacatggcttttcttttgtgtccatgccgagagagaggactctctgaggactctccctcttcttgtaaggacaccagtcctatcagactagggccccactcttatgacctcatttaatttaattatgtctgtaaaggcccctgctccaaatatagtcacattgaggattatggcttcataatcctgtgactctggggagaggacacatttcagtccataacaaagcccttagtgtgttttagtgctcaaaactgttcattcatacctcggttattccattattattgcctacgatattaccacttcagggtttttgttattttttacaatatagagcacaacgtataataaactacacatacgaattctcattgaggaattacagaaaatatatctatcgcgtctaacaaggtttaattagcatcttggaaaaaaaaaaaaacacctacgtttttaaggaaaaagttggccaatactgccatctgttggaattttggtcaaagctcatgtgttggactttactcattctttgtcaatatcttttctttctttctttctttctttttttctgagacggagccttgctctgttacccaggctggagtgtggtggcgcgatctcggctcactgcaacctccgcctcctaggttcaagcgattctcctgccttggcctcctgagtagctggaattacaggcacgcgccaccacgcccggctaatttttgtatttttagtagagacggagtttcaccatgttggtcaggctggtttcgaactcctgacctcgtgatccacccacctcggcctcccaaagtgctggaattacaggcgtgagccaccgcgcccggccctttgtcaacatcttatatgttgctgtgattattttcttccctaataagtgtaaaattggatgattttgttttcaatttaaacctacaataagtattctaagaaatacacaaagattctactatgacagaatgagtcttttcctacttgcgacattcattctaaatttcacaaatgcaagttgtggaaagagagacattgatggaaaaatttctacttttggagacaaattctcattcgcattagttttatttttatttctcaattataagttatttggcgttctggctcacctaatccgtgaaccaagagggttgctttcggaagcctactagtggaaaatgaaagtttcagatctgaagctagcaaatgctcacttgctgatgatgaggaacaagttctattataatagagttggttacaaggctatgcagcaagaaaaaggtgctcagctttatgagagaagtgcaacagatattggaatgtggtggccttgatgatgctgttcttaggagactccataggcattctttttttttttttgagacggaatctcgctccgtcgcccactcgccaccgcgcccggctaatttttttgtatttttagtagagacagggtttcactgtgttagccaggatggtttccatctcctgacctcgtgatccgcccgcctcggcctcccaaagtgctgggattacaggcatgagccaccgcgcccggccgcagtaggcattcttatactttgatgggagtagtgtaatatggtatagcttctttgtgaaatcgatccaaataaatatgagcacacctttgaacctagcgactccacttgttggaatttatcctacagatggagttgcaagtgtgcgaaatgatgggtttatatatcgtgacttttttaataatagcaaagactggaaacagtctaaatgctatcaataagacacatttaaataaatgatgggtcagtcgtataaaggaataacattcagtcattacaaggaatgaggcagttctctatgtactctacagattcatttccaagacatattgttaaggaagaaagcaaggtgtagtgcactaggtatggtatacacatgtgttaagaattgtgttttactgtagtataccataccttatatgtttaatagaacatatctcatctatattttgtaattcatttttataaaactgcctgtaaat

SEQ ID NO: 1882303 - DNA, 4001 bp, Homo sapiens
aacatcatatctcaagtggggagggagagaatccgccggtctcagcgggggtgggttttttaaagtggatttagtcatggtctggacttgcccaattttctgtgctatgctgtgggaagggacaaggtcctaaactaccctcacaggacttaaataaaacaaagaacacatacaggtgggtgggaaggcagtcagatgactcaattctgtgcccaccacccatggcccctgatgggtcatgccttctgcttagacaacagcctcctagaccccacagatgggggcaatggcataaactcagacctgcagccgaggcctgactcaccacaatggccctgccctgcactgccagtgacagacctgtcactttctcactgatccttcattttcctatgaaatggggctaatattgcctctttctaaggttgctattaggattaatttttgagataatagacactgagataacaaacctgccaagtgttacatcgatgtgattatcctgagattgagaggaaatgtcagtgaggcactaggtggtggcatggccgtgagtgggagaaagagggtggatgttccagatgtccctggatctctaccaaagagaagatgcagcgaaaggacagccgtgttcctggtgtctccttttcccctcaggacaatgaattacgggttttctgtgccttagttttcttcctttcaaatgcagttaataatactgtctctcagggggtattcacagacgtgaacaattaatgatcgcaaagtgctttgaaaataaatgagcttactcataatggtggtgtttgatatttataataataagcctgtgctgctggcttcgcgaactatattcattggtacagagcttagttttatgactggctttttcaatattttaacataaaatcctcttattttaaagtaatcaaatgaccttcctgcattcctccagagtcttattcggaaaaacttaagatttgatcatagatctattttaagaagtgccaagttaactgacatcgatgccatcgtatctggagtccctaggaaatccagggggggacaatgaaccgtaggaagactcggactcgggtctgcctgtagcactcggagcctgcaaggcaacacagttattgagttctattaaaattacttggtgtggctataaaccaaaccacacccctgtagccaatgcgaagagcttcccgtaaaagccgtgcggtgggaaggcctctcgctgtctcctctgcgcggcaggcagacatggacgacaccgaggcgtgaattcagcctgcacctcctaaagatgagctgttgagggcgatggccacagcaagtccgcaccaagtgctctttaaacatgagtgtttctttaaacaaagaaccttcccggcattgaggtctgattaatgatgccccggcacctcctccctcactcagggatcacttccctgcggcgcgttcccagacgcaggcttccctcacggaggcgggaagatttcaggcgctgtctgttcttgtcttttgtcagcacggacaaggatggagaccccactggtcaggcgagccccgcggtccctgttcctcacttcaccacctggggaagcctgatccccatcgattcgcaaaggaacaaggaaagaacacgttttacctggatggatggtccccctcacggtggccttggaacccgcttcagcgggagaggcagcgcctcactcacggctccccctggccgctgctttaccagggagcgccaccccgtgccccgccagaggaagtgcaggcgccagcacagcacgggccgaaagccacactgtgggacccgcagcgcagctccaagaaatccaaagtccattcacaagaggagcttctccgccaaatcgttgaaaaataaaacgagaaatgagtcgccaccggtatccgctttagtcagccgtacgaaaacgcaacccggtcagctgcacttctgctgccagccctcctccagtcaagcaccggcctcgagaagggcaaagggcaggtaggagttccgacgcatgcggccacggggcggagtcacagttcagaggcctcagctgaacctgaagttatcctaagctcgagccccagagtgaggactcggggtcaggcatccgattccccatcagctcctttactaaagctgtgcagagaatccgaggctatgagtgggggtgggggaaagatgtacaggatgctttggtttcactcctgagatacgagaacgtcctctgaacacacatgcagatagctggacttctagacagaggaaatccaaatcgtttctttcctcccagcataagggaacggtccggtaagagctggtgtttatcgatgctacgtgccagaatggggctgagcacggcgcctcactgtatcctaacgtctaatgaggcagggaatgtcactgtcacactctgcagacgaggaagccatgctgtcagcaggtacacatcttgccacaaaaccagtaacctgtggcactgagatcgcacaccggtcgtccactgccaagtccgtggcctccttctctggggtttgcctgcctcttgatggcggccatgcctctgtcctctcgcaggggctggctcttccagtggtcactactttttggttgcaagcagcagagattccctggagggcttgttgaaagcactcacatcaacggagcctcagaaagggagctgaggccatgcacggccctgcagtttctcctcaggctttggtttgcatccctggcctgactttccctcaacaagtcctgctatctccacaaggcggccagcccagccctgtcctcaccttccagccccagctgagcagcccctccccacatcatcttcagctgctgcccaggctccgcagagcaggtgtccaccgcccatccagccattgtgtttagagggcagagcgacctgccgggaccttgacaacacctggccccacccacacgtcctgcaatattcactgaggaatgcacagcagcacatatgtgcctcatgtgtcctgctgtgatgcagcgagtggcacacagcattattgtgtcaatcatgtgtcttgatgtgatgcactggttcagacagtatcatggatgcagtgtttctttaaaactgtcaaatttgaggaaacaatctaacaaaagccaattgatgaacattctgtaaaggtgacataaatacttcaaaaatgtctctgacacagaaagaaaaaaaacaaaaagggagctattccagattttaaaaataaaagatatagtaactaaaagcagttgtggtgcttggataaaaacaaacaacaggtataaatgaaggtataaacgatattattatacacactgggaaaaattttatatggaccatgtattagataatggtgctgtgttattgttaaatttcctccatttgataactgaaggggaatgattttgttctcaatagatgaatgctcaagtatttgggggcaaaacatcacatcacaatgactaactttcaaaatggttcagtcaaaagaatgatatatgtgtacttaaaaggggaaaataagtgtggcaaaatgccaacgatagttgaactgtcatgtgggaatccattggactattctagaaacatttctgtagctttaaaattatttaaaacaaatgttgtggggaaaagaacccacatttaaggtagtaaaaatattcaggacacacaaagagggggtgcaaacaggtaaaaggacagggtttctgacctcagagagcttcctgaagctgcgcacatgcctgtcaggaaggcagtggaatgagcagagattcgaggggcaggtcatgtctctactgagtggagcagaggataaggtctctgcaaacagtgaattttaagccatttgtttagtctacattacagtgaatccaagtaagagtttggaaagccagtcacatcagactatcttcactttgtttaatgatagagacaggcagggatggggaacggatg

SEQ ID NO: 1882304 - DNA, 4001 bp, Homo sapiens
acttaggagactgaggcacgagaatcccgtgaacccagaaggtggaggctgcagtgagccaagattgcactactgcactcaagcctgggggacatagtgagaccctgtctcaagaaaaaaaaaaaaacctgaaaagaaaaagaaattgccaagagccatacgtaaatgataaattcctttgttcttatggcttttcattcatttctaatcatgctaacatactccttaatgcttagcctatcaatgttcatcatcgcccctttcgggtaccttatatgaaataatacattaaatattataatgtcccattttttatttgtgtcacaggagcatgatggcatgatgataactagtttgaaatcaaaaaaaaggatgaactcttgagtgctgggatactaaccctgggttgtgttttaattttttattttctgtttacaattcttctcaggactttaaataggtattgcataaatatacatcacacttaaatgctgaaaggcttacaaaatacctagaaacatagctattaaaaaaaacagttcattctgtaagtgcatttgtaagctctactcataaataaaaaattactataatgctttaaagtcaaagcatatcacatttcagatggtgatataattaattgctgtttttcatttctagtaatcaatgtccacatctttttcctctaaattatatttgaaatcatagtgtaaattgatacaatgattataactaagaattgtatctgaaagaatcctctgtactacttcgcaaagtaatgtaagaaatactttacatacttgccagtgaaaaggcatctttaaagtaagtggtattcactccactagctcaatggaaagttgagcagccatccagggaatttgctgaaggtggtagccaatgtggaaaattcttaggaggggtcacaacaggattttgcttctgatcagtttgtctgcattgatctcactcccaggccagagatgcttttttctagactgtggttacccttgatagatacattggtttcttaatcccaatccagaaattggaagggagaaatgtatcatcacacagcaacggtttggagatttgccttttagtcatacaatagtagccagtgaactggcctttattagttactttcaaatgaaagtgttttcatttgaaaagttttccacttttaatttgatttcctatattttaaatttttgaacaaatttttagtttgctgaaatatttaatccctttagtcagttccacagaacagtccagattacaaggcgatattcgattttttagctggtcagataatgattgactagtactgtttagttctgaaagtctgatgagaaactacccaaagtataagaaagaactataaaattatcaggtagaaaattataggagagaaagcagtgatattttgggaacatataccaaaataccaagctaaatatgtgtatatatcacagtatttttggccccagatcttgtggctctttgagtgatgatgattaagtttgtatcatccaatttgacgttgagtatcttattgtttaggaaaagaaacagctgacagtaggttccccaaacttctggcattgtctaccatgctcactggattctgaaatacatgactattattaccttgaattgtgctgttcggaatgatgtccagggcatctgtagtaaaagaaaagaagacctgggcttcagatatgattttgttaccttcttacagttttaccgcaccaaggtgtcaggttggggagcaaggagtagcatcgtcccgcctccctccagtcgcaccctagggaccgccatgtgagcttccctcccagactgacgctgcgcgcggagagccgggagtcacaggcccaggcactcgcagcctccaccagaacaaacggcggcagcggccgtgcgcgcccacggcctgcgcggggacgcgcttcgggggttcgggggcgcccgcggtaaagctccaccgcggccgcgctcgcccgcccggccctggaatgaatggaaggttcaatctcgcgcgctcggcgccggcagccaatgacgcggccggtagcggcggcgggcaggtgtgcgcgtgccgccggctgacgcagggctccagtcgaaccgcctggtgccgccgccgcgccccgcgctcccccacccggctcagccccctcctccccgcgccccgccactcgccgggctgcggcggcggagtggtggcgacagcggattccgtgcccggtggccgcgcgccgcccggctgttccgcgtccccttgccggctcacaatgtgctgaccctcccggccccgccgcgcgcctcacaggtctctcgacctccgcgctccctcaggaagtgacagactccaggccccttcctccgccccgtccttcgggactgaacgccacacacgtcctcacaccctctccccctctcacacccaggctagcgacgcgaccatgaggccccggaggtaagcagccggccccgcggccgcgcgagtgcgagcgtggccgggtgtgcgtgcgggtgcggacgccgctcgcggtcccgagtctggcacgtgagcaacgtcgaggggagctccgtgctgaggagcaggaagaaaagaggaggcgcgagcgccagggaggggcgaggactgggcaccgcggggaagtgacaggtctcgcagcaagttgcggttcggaagccggcgcgccgcgtctttccttcgccggccctgatttattgccccggtgctgccgctaagacgcgggcagtcgatgtacttccgggttcacacctttctctccccgctcggtgctgctgggtcggcgcccggtgtgggcactgcgttgccacagcggccgcccaggctcgccgctgcggttgctgccgggcggccaaagccggcttggagcgggagggcggggcggggcagggcgggggcgcaggccacgcgggggcgcagggcgcgagggtgcggcgcaggctggggtcccggcggcgggtcctcgcggccggtgccggctcgtctgggacgcacggggccgcgccgccagagggcgtgcgcacctccctttcgcgctccgcaagccgaactgctttgtaccgggcaggcgtcggggatcgtttttgctttggtatcggtgatgtaaattcatgaattaaaattaaggattttgaaaagaacggggaagaacgcacttggatttaggttgtttttgaaaaggaaaaaccaaagaggaaatgatacgtttgcaggagcattaactgactactgactggaacattggatgcgggtgctttgtgaagatttgtactccaaaaactttttttaaaaattgcacgttggtaaatattgagtgttttcgagtaaaatctaacagtatgtatttagtgcccttattgcggaaatttcttaaatgtaagtaatagtaagtccgccattttgaattgtttcatgtaacacagaatgaaatcttaggtgcctgtgtttccttgagttcccttcagttctttgtgggtttgttttcatccgtaggtttttaaggttgccaagtgtcactgttcatggaactaaattctccactgtagatttttatacctattattgttaatgcaaggggaaaataaattatactcctattctattgtagttttttatttatcgatcacaaatactgtggaagtgaaaattacacctgacaactagtattagaatgaatttaaaacgttttacaacattgctgggaaaatatgacttaaagtgatttttaatcaagaaaatattaatgtttctttttttggtgctggttattaccatatttacttagataatgcaaaagtgcttttttaaaaagcacatttttacgtccaacaataagtataaaacatcacagttttatgaaagctttcagggaagatttgaaagttaagggtgaattcttggaaatatatgccaatttgtatgaaaaaataaatttgctatgaaatttatgcctttt

SEQ ID NO: 1882305 - DNA, 4001 bp, Homo sapiens
ctcacaacattacaagggagttgtgattagctacattttaaaaatgtaaaaaactaagccccagggagaataaacaactctccaggtcacacagcaagtctgtggcaaagctaggaactgactgtcggctctgttccactccatattccatgtgccttacacagtgtctcactgctgccttcttcctgtcaaccaactttatcacaaaggcctagcattttgagactacaattcatgaattttttttttttttgagacacagtcactctatcgtccaggctggagtgcagtgcctcaatctcggcttactgcaacctctgcctcccaggttcaagcgattctcttgtctcagcctcccaagtagctgggattacaggcatgcaccaccatgcctggctaattttttttttttttttgtatttttagtagagatggggtttcaccatgttggccaggctggtctcaaactcctgatctcaggtgatccgcccacctcggcctcccaaagtgctgggattataggcaaaagccactgcaccgggcccaattcatgaacatttaaggttactctgccaaaacaggtgacactcctggtacaaaaattcaaagcaggaccttgcctttcagtgaggctggtataaaatttccttcactcagtccctctccttcctcaccagctcatcttcaaaatatgatttcagaagactttagttctagggatagctaatccatgcttctgttaatcaccttggcggactagcctcagattgggaattcaacacatcctggcaggaatatcctcagagaggtgaggaaaaacacccatctgcagtcaggaggccctgcgtgtctgatctacttgctcaccatcaggacagctcttagtggtttagctctgtatggtccaagttcagggttgtgagaaacaaatgagataacacatgtaacagcagcttgacaattggaaggtaatatattttaaaaagatgatgatcctagtttgcaatacagaagggactgaacgttaaaggtggagttggagaacccttcagctcaactttacaaaacttttttttttttttttttgagacagcgtcttgctctgtcacccaggctggagtacattggtgcaatctcagctcactacaacctctgcctcccaagtttgagcaattctcctgtctcagcctcccgagtagctgggattacaggagctcaccagcaccccaggctaatttttgtatttttagtagaaatggggtttcaccatgttgaccaggctggtctcaaactcctgacctcaggtgatcctcctgcctcggcctcccaaagtgctggcattacaggcatgagccaccacacctggccttgcaaaacttttaataaaagatttttcaattatgagactccaaggaaggataatgaaatgaagcatcttctgtcacagcccctttctcactggtatctggggcatgaaattctaaagagcgttcattcttcttgagcataaacacgactgtggtcaaaagtgggccctctctgttccatcaatcttctaaaagccaaatatgatgatttagcaaagaaagatatctagtggaatatccatcacagcttcttcttttttagagatggggtcttaccgcattgctcaagctggtctcaaactcctgggctcaagtgatcctcttcccttgacctcccaagtagctagggctacacactcgactccatcacaggttctgaatggaaggtttatagtgtatcagagcctcatgaaggcagggagctacttcccttgtggttggtgaacctcaaattgcctctatatggccataagcaaaaatcacagaggcggattttgatgtgtctaaagaggcaggcacggctgggcacagtagctcaagcccatagtcccagcactttgggaggccaaggcaggcagatcacttgagctcaggagttcaagaccagcctggccaacgtggtgaagccccacctctacacacaaaaatgtacaattagccaggtgtgggggcatgtacccatagtcccagctactttggaggctgaggcaggaggatttcttgagctcgagaggtcaaggctgcagtgagctgagatcacaccactgcactccagcctgggagcaagatcttgtctcaaaaataaataaataaataaataaataaataaataaataaagacacaggtacaaaggaaagaaaacgaggaacacttgtgctggtctaaagccctctgtaaaaaagggtggtgcgtttcccatgtactgaaccccagggggaaggcgcatcacctgaagcccattttctacctcctcaaataacttctccaaagccctggtctcctttcctcctttccctcaccagcctactgcccgtttccaaccagctcctttgtttccaggttttacactgccatctctaactttgtaactcctactgggagtgatgagccctttgtcaaaagcatgcatagtgtcttccaaagactggtttacaaagacggagctgggtaatgcaaaaaaaaaaaaaaaaaaaaaaaaaaaagcactccctgccaggagggatgtcaaggtttcagtcttacctctgccttttgcatgttacagcatcttgggcaaagcctttcacctccctgagccacagtttccacatctggaaaactggtaacaatccctgcttgttcgttccatataaatcaagtgagatgtggatagaaatgcttggaaacactctacaaatctaaaaggtcctgttttcccctcacttatcctatgacaaatactgtcattcagtaaatgattattgagtgcctctgatgggccacactgggctgggccctggagatacagcagtaaatatggcatgttccctgacctcagggagctcacctgggggtggggggacagcagtgtaatgagcaatgaaaataaactcagctcaatctcataagtgaacccaggaggggtgcccagcttggactgaagggttttgcagggagagggctaacaacacagcattctctagtcagagaataggagaattcgccaagaagagaaggtggtaaaggtcattccaatcagaaaagcagcatgtactggtcgggcatggtggctcgcgcttgtaatcccagcactttgggaagccgaggcaggcggatcacctgaagtcaggagttcgagaccagcctggccaacatggtgaaacctcgtctccattggaaaaaaaaaaaaaattagccaggcatggtggcagccacctgtaatcccagctacttgggagactgaggcacaagaatcacttgaacccaggagatggaggttgcagtgagcctagatttcaccacttcactccagcctaggtgacacagagagactctgtctcaaaaaaaaggaaagaaaaataaaaaaaagaaaagcagcatgtacaaaggcaggaaaaaatgagggtatgggaagtttaaagtatggcaagtatttatttcattctaatggggcctaaggtaaggaggccagggaggtgtgactctggagagtcaggcaggaggcacatgttgggtgccatgctgcgtgcttgtgatttgtatatactgcaaggggtaccaggtgttgttctagtacattccatgaattaactcccttaattctcccagcaaccccatgaagtatgtcctattattgctgcttacagaagaggaaatggaagcgcagagaagtccagtaacttacccaaggtcacacagctgggaagtttgccaaggagttgggttttgccctaaaactgttgagaagcaactaagagatgttaagcaggtttagagaagcctgatcagattgactttttcttattctggtgcctctctgtttctaggcttttagataatttcttggcagcctgcgtaactaataaagtatatgtcactttctcatgtggaaatttgtattgtttgtttaaatacttaatgattatctcttgggc

SEQ ID NO: 1882306 - DNA, 4001 bp, Homo sapiens
ggacccaggagacgatttatgggggagtgccaacgccgttgtgcaggcttccctctcatggcacaaggggttgggatctagtgacccagtggccttttctggggcatgagcactaggggagaaaggtaagacagtggcatcttcttgcaaccttctcggacaggttgaaccaccagggactctgcgcaggtgtcaccacactcccagacgtctgttgtcacctggcgcgaagcccgggtcttggggtagcaaacttccttaggttcacttcagcgacatctgtgccgtctgtccatggaagcttttgggtgcatttatgaagctgcgccctgtgcctggcgcctcagaactcagccctttaagttcctcccacccagggtcgggaacgggcctcaccatccggctgctcctgcagcagctctttctggcgagtgcaagcccacggattccccgcgagccgggtgcggatggggaatccgcgcagcagtcccctgcaagcaccctcccgccgtgccctccttccctgcgcagtgcatccctgggtgctcaggaagggagagcgcacggtcctgggccgccagcggtactcagggggaggcgacaggcttggcttcagccacaacgttgcgccacttgggcgctcccctctctgttgctaccgtccgtgctggtctcggtccccatctcgactcttcgtggtgcggagactgagcgcagttccctacgttttgcgtcccaacttctccggggcagaaaagacccctggtgtgtgttggggagaacggggagagcaggcctttggcctcttaagggtcttttggggtccccccacactgcgcctaggcgagggcgcctgtccccacgcgggaggagcgcccctagcgccggcgacatctctgcggacctggtggtcccagcgcgcgggcatccatccattcattgcgactcccggcgcggcggccctaggactccaacagaaatgtatgaatgggaagaggaaagagaaccaatgtctgtttgcactccctgcttccccgcaccccagcctccctccaggcagagcgagcccgacacgtagtgacaaggggcgggggtcgggttggggggactgcgggggcgtgcaagactgggagagagtctggctggagactgcactatttatatactccggtgctccaggacaaagagggcagatccgagtcatccccctcccccagccccagcacctccccgggcccctcctctggtggctttgatttcgtgaccaccccccgggggggcgggctggcaggtgcgggggtgggagccgtctccgcgggagcagccttgccaaaggtccggctgctgacgtccgagcgcccgctcctgtcaatgaacggcagcggtagcctggggactgttctggcaacgaggctacagacgtcatcgcctcctgttggacgcgggggggtgtccgagcagcatctccggcttaaagggaaactctctaagttccgggcagccgggagagtcgttcctgagagcacaagcacccccaaatgtgaagtgcactcggacacacacacacacacacacgcacgcacacacaagcactcatgttctaaagagagaggtctgagtccgaagttgctgctgctgggagcttgagctgagatggactggtcttcatgggcgcccaaggcgctgggtgcagctttccccgagacccccagatggaaaggagggaaggaggaaccccacacactcgccttttgcgagaagatcggcgcgcaccccagagtgccccaagcctttggaatctgcctgctgagcggagcgcgcgagcgtggtggacaggtcccgaacttggccagcgggctttcttggcaacttgctttgcgcagttctccatggaaccctggacccactgtgctcccggcgccttgcctttttttttctttttctttctctcactgtctctttttaaatttatgaactcgaaatgaagcggaaagcagatatgcgcgtcagcatactttggcgggtaagttgacagttcttttacctattatttaacccttgagagtccagaaaaacttagtcccaatctttgtgtgtgtgtgcgtgtacttaaaaaaacttcctgtcctttccctccaccctttttggcaataagaaaacgtgtgcgcgtgtgtggtgtgttgtgcttgtggaggtgactgtttgggggaaagggtgatgagtggactcgagaaagaagaaaagggagtatataaagccgaagactcaagggtttgcagaggaggggagagagactgcagcccgccccagcgccaactgacagcctcggggctaacgcttgatccgaggagtttgagagctccaagttcccagcgagggctgcgcgccagctgcaaaccgcagcggctgccgcgccagacccgcaggtgcctcccgaggcggcctggagaagggatggtgtgtgcaccgcaacttccttcctcccgagccagccgcccttctccagttctcagtggggacaggaccccctgctcttttgatcctcgcctctgccgccactctcttctctccccccacctccccagtctcttctgcaaaagatcctgtgatgtcataggggaggagggggtccggagtccccagcacctgaaagcatcactagattgcattctgcagcattttattttcttcatgccacccaattttccttgcaacccattgaaatcgcatcctcaccaaacactgcaaacactgtcccgtcccccctccccccaagccaagccaagcccaaccataagacaccactccttcatagctagacagggccaggagtcctcatagcaccccaccccatcgcccccccaaatggggaagaaatccgctgaggcacccaaggagcctctcctttctggtttgatctctcctcccctctcggctcacccttctacttgaaggaaaaggaggaaggaggaaggagagagagactgagagagggagagggagaggcagagagagagagagagagagagagagagagacagagagagagaggcgcaacaccagcaaacagtctcctagacgtagggctacattgatggaccggattgtaggatttctgcactgagtccctgcccctctgcctttcctgccaccccaagtcccttcccctcctgaagcagcaatctcttccatctccctctctggtctcttctccccacccctttcctctgcacctaaccccctcccctccatccaaccccaccttcactctcctctccgaggggggagggccagggggtggggaaagaaaacccccaaatccccagccctgggcagagatgtcgaagaaacgcaaagccctcgagggtggaggaggtggcggagaaccccagctcccagaggaggaacccactgcctggtttggggacagcagcgaggagcaaggtagggggcggggagggggaggagaaaaaggaacaggagcacatgcaggaagacgtttgggagttgagatccctccgcaggaatgccctcgccacgcttcatcagagctccctatagcaagacaacttgagtagacttttcccccacagatgggattttacgtgtttcttcaggatacggggagtggggtgggagtgagctgattagataatgctggagacccagatctgcgtggacttgaagctgtgtggggaagaagggagggtggggtgggaagggaagaggccaagaggtattgactggggacagctgactgttttccctcatgcctgcctggctgtcatgtgcattggtgtggacacaccgtactggggatggagagcctacatgaatgcctgtgtgcaggacacctgtgtccagagggcaggggtgccggtgagatccccctcgggctccttgctgatgagggacagcagggagggacgtttacttcttccatgcttctccagtccagggatgcttagggctgcgtcatgtgaaatcttcatcctctgcac

SEQ ID NO: 1882307 - DNA, 4001 bp, Homo sapiens
aagaaggtcaatatgtaaatatgatatctttatagagcagaagcatgtgggtgttggtgagagcaaaactctggagctgtcactagtggcatagagctggatggggactacctctgcagcccagcagattcccaaagctcctccttccacagaagaagattcctagaatcatgtagtaggtggaaagggctgagaaaagctctccatagcagagggcctgtggagcccaagccctctgagacatttggcaagccagggtgcatgcctctggaatcaccacactgcaaggtgcccaacatgcccctcccccttgtcctcttgggcaatcccagcctttggagctcttggttccaaaagctcttccctagccccaggtgatgttcccctggactcttagccagaaagccttggaatggtcctgagagcacccactgtggtggtctgagattctccttctcagctcatgaataaccatcctacccaggccttctaccagcccagagaccttgtctgtaaaatgggaactacaatgacctcttcagaggttattctgagggtgaaatgagaaatggcagtaaaacgtgtacaagtccagtagcaaagatggcattagaatgtttgctatattttctttctctcttctctttgtgtctctttggattttgtatttcctacaggaaggagatgtggccaaactgtgatgttgcttcctacctccttaaactaccctaagaagcttccttctccacccctacctctagtgaaagccctcaccacttcccatgttgttgcatatggcaggatttccttctttgctaaggctgaattctactccgttacatgtatattccacttttctttaaccgctccttcgttaatgaacaccaaggttgcctccacatcttggctgttgtggataatgcaatcaacatggaagtgcatgtctgagaacctgattttaattcttttggatgaatacccaggagtaggattgctggatttcacttatatggagtatctaaaatagtcaaactcccagaagcagagagtggaatggtggttgccagggactgggaggagggggagatggagagttgttattcaataggtacacagtttcagtcatgcaaggtgaatacattctagaaatctgctgtacaatgttgttgtacattgttgtagttaacaatagcttattgtacacttaaaaacttgttaagggaggagatctcaagtgaagtgttctcaatacaataaaaaaatcatcaaaatcacaatgccccattctgctggtttctgtgagggaggctgattgatcttgctgcctagttggggacagtaagccgggctatacctgacactatattgcatctgtgttgctcttcctgctgctgcctttgttccagatgtctcctgactttcttgttctttcacaagaatcaaagcctgtgattattggtcaagcaagaatacagggcaggagaccacctcacccatccaaagaaatgcatgcagaaaagccatgttttctaattgtggggagccaccacctgaccctacccaggctccctccttcctgtcttataccatctgagccccaggtacctgtagagggatctgctcataggacctggggcctaagtttctgcccctccaccaccagtgtctagtctccaacttcagtggagagggagagctagggcacctagagaaaagccccatcgctgcctcctttctcagggtgaggttctcatgactgctcactgggaaggactgggatgtgagctggaatcccagtatgaggagaaagtgtgcccccatactccttgctccttcttttcctttccttcccttcctgaagctcagctgtgaccctccatttacgtccatggggggaagctctttacctgggcaggccccctgtttctcagccaagtgtcccagtactgccagccctgtcttgaagttgaccccagaacatcttctcccatggttcaaagggcctgggcagccactcttgttccaacagagccacccttgcatcagggtggggagaacagggttcttgaatgaaggttttatattgtatttcttactgcttgaagttgtacttgggggtgaagtggattaagacaagagtttattgttactttccactacaaccaggtggactgtacctgagagagaagcgggatgagaataaaagggagggactcccatctcccctagaggagcgatggcctcctgttaccctgcaggctccctagagcagagctgtgatttgctgggagtggggaccatcttcttatgcataattatgttttgcagagggggttctagaacactaaggaatggcttcttcaccactggcacactgggcaaggctggggagagctatggggtatggtttccctgctgtggtttattggtaattgtaccaagaatagtggaaaggatgactcttgggtcacagatgactgtggcagcagtgccatcttcatgtgggtggggaggtgactcccagggaattgggaccctgtgcttatgtcgtttatgtctgaagttatatcaagggctcttggatgcctttcagttcacatttgggacagtgaggctcaatttcctgctgggcctgggggaagtaagcagctggccccacctccttagaaattttctccagtctaagccctgactcatagctggtttttcctttcaaatgatgaccacagcccactctggatgccaaatctgtcggttctcagggatctaggagggcaagagtggatctggtcaacctggggaagactcatgggggacaggcaggatttcccactctcccaggccctggatgaactctgatattcaacatgcccagtattactgaggaaaatattggtactccttagcacaaatatctcacagagaattctaacctcagataaggaagaccaggctggatggcctctgaaatacttgctgtgccagttcagtgattctagaacccaatatgcccaatgttatcattaatatgctgccattgattacaatgtgctcagtgatgcatataattaatataatggaggccgttagcacttccacttctccaagtctgtgttatgcatttaattactttagcacttcacagtttatcagtataccatcccctgagctagatatttctccaatgccattttacaaattaaggaattttacaaattaaggtcatagaataaaaccccaccttcctcactcacgaagagacaagcagcttccccctatctaggctgctgaaggaccttcttgttcttcccaggccaccaccctatagcccacactgtttgccctcccccacaagctcacacaaccacatccccgaaactccaaaggagtttgctccctcaggcctccttggtcctcagaaaaaacagtcattcttttttttttttttgaaggtgtctcgctttgttgcccaggctggagtgcagtggcgcaatctctgctaactgcaacctccgcctccgggttcaggcgattcttctccctcagactcctgagtagctgggatgacaggcgcgtgccaccacgcccagctaatttttgtatttttagtgagatggggtttcaccatattggccaggctggtcttgaactcctgacctcgtgatcctcccgcctcatcctcccaaagtgctgggattacaggcgtgagccactgcgccaggccacaacagtcattcctaactggatggaaagctaatttcttccccttcaaggcattagttgagcttcaataaatgagacaagcaggtctgagaaccactaagagcacccgtgaattcttctggctgtaagaactaccttggactgagtgattttctggccaatccatccttgcccaggcggtgtgttcctcagagtcacaggtacctggtaaatttgtgaaaacatgcctgtctgtcagctcgagaagctagttcttcagggaggcttgtaaagacctc

SEQ ID NO: 1882308 - DNA, 4001 bp, Homo sapiens
aaaattggtcaatatatgactttttaatcttcttatggttaatccaagtgaattgtaattttcctccatggtaagggttatattttcccctttatttctggaatctttttgcttttcctttcttctttttctctgtctctgtatatgtctctgtctttttgttttttaaacaaacaccctcctttccgcagaaagcctaagggccattattattgttgttcaaggggaaaagtggctcccaaatgtcaggctcaattctctggctttcttcctcttccaatctttgtcccaagatgcctcactgcattgttactgttccaaagtaaaaccaatcagttctttaaaaatcttctgaatgcccataatttcatgtacttagtttactatcagtcactacatgatacacttttaatttggcaaatttaatgtgacaaattaattggacaaatttaatgtgatggtcaaatcatcttgagctacgcaattcaaaataataatttggataggccttagtttacttttccccatttttctctaacagtgttcaacagtttcgtatctgccaaacctgagaaaattcttcataaaatttcagagcttttgagcctctttgaagtggcaatatccacaggggacccgatgtgctcagctaacttggtaacctgaccctatatccctgcatacccagacctctctattcgtttctcccgggcgaatcccacctcagcccccaactctgagtagctcagactacaagcacaagccaccatgcctgactgatttttgtatttttgcagagacagagttttgccattttgcccaagctggtctcaaactcctgggctcaagtgatccagcctcagcctcccaaagtgctgggattacaggcatgagccattgcacctggcctgttggccaactcttaatagcaattcttctatgctatagtgaaataattagaaaagactacatccctaaatattttaggatgcattaatcactgtctttaactaataaattaattgaatgcaaagagtccattctaaaatatcggggaattttatccttcaacacagactttctacagtagttttcaaacagattttgaagtcttacgttacaaattagaaagtagaaacacatttctaatctgatattaaaacatttacagaggaaataattgaaaatgtcttaccagatcactgtcagaattggcagtactaggcagtcctcctgattttcattccagaattataatgataagaaggtagatatttttaagagaactaaacagtaagttaatcagctatagtattctcagttttttccctgaagttttttctcattatctcatttactttggggaccaataacttgtcccctttttgcaaacatgggcagaaacaatgagtactttttcattttgcctctaatgctaaacagtaactccttgaggctagaactacagatccgttctctctctaatccccagttcctaccacagtgactggtaataactttcagtaattatgtgcacgatgcacatttccttgttaactaaatattttacttatttcgattgtaacctgtaacttttatagaatccttgcaaggtgaccagaaagctcttttttgaggagcataattcttgtttgcgctatttttttactcatgtcttttcctagtgatgatattgtctctccagcactctctctcctcccctcaacccgtccttctccatccctgtttctgtaatctctttatcctaattataagctacttaatatagaaagaaaataattgtaacaaagggaaaagttccttaaatgcattaccttttttctgaaatttgcaacaatggcaggattcttagtagggctagcaagcaccacttacagttcttaggcaaaaaaccgaagccaaaggacatcatctgtcatggagaaagacccaataggggagaatatttccaaaattcacatcatcaacagcagtatgaaatgagagtgatgctaagagtctgacatataccagcatgtaagggccagtcgcactagtgggtgtcagaggttacttcttcattcatagctaaaaagtggaagatgattcatatgtctttgctactgatgtaaacaaaacacggtgggtggacagcaccccctgagggagatggagatgctggtgagtgggtcgataaggaagtcactctgccagccgcctccttcttcccaaatgtgcacaaactccaccttgtaaggtgtccaaggacaatgacttattccacagcaggtgcaaacactcaagatttcagtgagtgtcaacctcaaatagcttaggtgctgaatctaaattccacaatctgtcgacctgacatcgtcctctcttcaggtgtttatatggccctggaaaaagaaatagttccattacataaaaggaattacaaaaataatgcacccaaactccagagagtacttacagtcttgcatcattttgcaatagtttcagtttcagatctgcatagaatgttgaccagggataaggtttaacaaatcttaagtatgagcattttgggtcttttatttccttaatttcattgaaaatagctgtgtcattgacactttttaggcatatcattatatgtatgctcagagttcacttccaagagagtaaaatatggcaaaggatcattttaatccagttgttatctttttatttatacccaaattttgtatatcttatatgacaattgatttctactttatctggttgtatgatgaggatgagttattttttaaaaacacaactgttacttataacttaaacccaatttgggcttcataagaattgtccttctttcaggctaatatttatgctaacaattgtcacaaccataatggaggaaaaaaatattttaaggacaagaatgtcacttgagaataagtgaacaccccctgtgacctggcatttcttggaagaaaggaaggtgctgtgacatgcccctgtcattctgaggtcctctggaaagggctgtcgttcacagttgcctgggcaaggctgagcaggacgcacgtttggtgactcaaaacatgccgttaagagtaactagggtggaacgatgcatagccaccatttcaattatgttgggctatcaaaactttcttaggcaaaagattaaacatgtttttcaccaattgtaatggtgcttatttcgttgtgttttgttttttaaatgagctattgttagtgcctgtttctcagaaacataacttactgtaagaatccacacacaggcttagtcacacagcccacccctcctttgtgcgtttcagatgaacaaggggcgtgtctgcagagcatttgccactgactcattgcactccccacacagtgagcgatgagcagtaagtgaccaggaagatgacagaatcccatcattgttttggtatttagaaactagtaaacagtgaaatcttgttttagctacaaataaaaacaaaaatattccattcctttctcttctcgagggtgtgcataggtggaagtgaatgtgctcttgtatgaggacacatacacctcgttattcaaataggtatgaggagactccagagagctgtgttcttaagatctatgtaggaataagtagtagttgccagatagggttattaccaaggaaacctaaggctgaagtatataaaaatctgcccactgatgactttgtttgactttcggttttctcattttaattacaggatgctctgcagccttaccatcccttagtctttcctctacaaatatagtattcatagtaattcacttagttttctatgacattgaaatgaaaattataggtataaaaattaggtttacaaaaatcatttggaattcttctgcactgaggatttgtctactctctcctatttgttcagttctttaatcacttattttcatcagtatgggcatgtggatatttatcttaagctttgagttatagtccaacagcg

SEQ ID NO: 1882309 - DNA, 4001 bp, Homo sapiens
attcttctgcctcaggctctcaggtagctggatttacaggcgcacgccaccatgcctggctaattttttgtgtttttagtagagacggggttttgccatgttggccaggttggtctcgaactcctggcctcaagtgatccacccgtctcggcttcaacctattctttttgaacaccagaaatacgctaaggattcattttgagccataatctaactttgaatctaaggtacgacgacccagttggcttagaatatagctctaataaagtattgttcttttatgcatccctgacagtgaaaaagtttgtgaatatcttgagcactagagagataaatgaaaatgtgagtgtacaaaatccaacctcaaaatgagaacacagccctgagcacaggtcctgaacaaaaagcagaacatctttttgtcagcctcacacctcctctaaaccccaatttagaataggtttggtatgaagatcaaaatagattaactgtatggagaatctgtaaacccaaaatagattaactgtatggagaatctgtaaacccaaaacaccataaaggtgtaaagtggtataattattattactatatgtttttacacaccaaaaaccacagagtcggcttctgtacagctcacagtgtgaaaaggtgtgtttcttcttccagaaaacattaaaattggtcaatatatgactttttaatcttcttatggttaatccaagtgaattgtaattttcctccatggtaagggttatattttcccctttatttctggaatctttttgcttttcctttcttctttttctctgtctctgtatatgtctctgtctttttgttttttaaacaaacaccctcctttccgcagaaagcctaagggccattattattgttgttcaaggggaaaagtggctcccaaatgtcaggctcaattctctggctttcttcctcttccaatctttgtcccaagatgcctcactgcattgttactgttccaaagtaaaaccaatcagttctttaaaaatcttctgaatgcccataatttcatgtacttagtttactatcagtcactacatgatacacttttaatttggcaaatttaatgtgacaaattaattggacaaatttaatgtgatggtcaaatcatcttgagctacgcaattcaaaataataatttggataggccttagtttacttttccccatttttctctaacagtgttcaacagtttcgtatctgccaaacctgagaaaattcttcataaaatttcagagcttttgagcctctttgaagtggcaatatccacaggggacccgatgtgctcagctaacttggtaacctgaccctatatccctgcatacccagacctctctattcgtttctcccgggcgaatcccacctcagcccccaactctgagtagctcagactacaagcacaagccaccatgcctgactgatttttgtatttttgcagagacagagttttgccattttgcccaagctggtctcaaactcctgggctcaagtgatccagcctcagcctcccaaagtgctgggattacaggcatgagccattgcacctggcctgttggccaactcttaatagcaattcttctatgctatagtgaaataattagaaaagactacatccctaaatattttaggatgcattaatcactgtctttaactaataaattaattgaatgcaaagagtccattctaaaatatcggggaattttatccttcaacacagactttctacagtagttttcaaacagattttgaagtcttacgttacaaattagaaagtagaaacacatttctaatctgatattaaaacatttacagaggaaataattgaaaatgtcttaccagatcactgtcagaattggcagtactaggcagtcctcctgattttcattccagaattataatgataagaaggtagatatttttaagagaactaaacagtaagttaatcagctatagtattctcagttttttccctgaagttttttctcattatctcatttactttggggaccaataacttgtcccctttttgcaaacatgggcagaaacaatgagtactttttcattttgcctctaatgctaaacagtaactccttgaggctagaactacagatccgttctctctctaatccccagttcctaccacagtgactggtaataactttcagtaattatgtgcacgatgcacatttccttgttaactaaatattttacttatttcgattgtaacctgtaacttttatagaatccttgcaaggtgaccagaaagctcttttttgaggagcataattcttgtttgcgctatttttttactcatgtcttttcctagtgatgatattgtctctccagcactctctctcctcccctcaacccgtccttctccatccctgtttctgtaatctctttatcctaattataagctacttaatatagaaagaaaataattgtaacaaagggaaaagttccttaaatgcattaccttttttctgaaatttgcaacaatggcaggattcttagtagggctagcaagcaccacttacagttcttaggcaaaaaaccgaagccaaaggacatcatctgtcatggagaaagacccaataggggagaatatttccaaaattcacatcatcaacagcagtatgaaatgagagtgatgctaagagtctgacatataccagcatgtaagggccagtcgcactagtgggtgtcagaggttacttcttcattcatagctaaaaagtggaagatgattcatatgtctttgctactgatgtaaacaaaacacggtgggtggacagcaccccctgagggagatggagatgctggtgagtgggtcgataaggaagtcactctgccagccgcctccttcttcccaaatgtgcacaaactccaccttgtaaggtgtccaaggacaatgacttattccacagcaggtgcaaacactcaagatttcagtgagtgtcaacctcaaatagcttaggtgctgaatctaaattccacaatctgtcgacctgacatcgtcctctcttcaggtgtttatatggccctggaaaaagaaatagttccattacataaaaggaattacaaaaataatgcacccaaactccagagagtacttacagtcttgcatcattttgcaatagtttcagtttcagatctgcatagaatgttgaccagggataaggtttaacaaatcttaagtatgagcattttgggtcttttatttccttaatttcattgaaaatagctgtgtcattgacactttttaggcatatcattatatgtatgctcagagttcacttccaagagagtaaaatatggcaaaggatcattttaatccagttgttatctttttatttatacccaaattttgtatatcttatatgacaattgatttctactttatctggttgtatgatgaggatgagttattttttaaaaacacaactgttacttataacttaaacccaatttgggcttcataagaattgtccttctttcaggctaatatttatgctaacaattgtcacaaccataatggaggaaaaaaatattttaaggacaagaatgtcacttgagaataagtgaacaccccctgtgacctggcatttcttggaagaaaggaaggtgctgtgacatgcccctgtcattctgaggtcctctggaaagggctgtcgttcacagttgcctgggcaaggctgagcaggacgcacgtttggtgactcaaaacatgccgttaagagtaactagggtggaacgatgcatagccaccatttcaattatgttgggctatcaaaactttcttaggcaaaagattaaacatgtttttcaccaattgtaatggtgcttatttcgttgtgttttgttttttaaatgagctattgttagtgcctgtttctcagaaacataacttactgtaagaatccacacacaggcttagtcacacagcccacccctcctttgtgcgtttc

SEQ ID NO: 1882310 - DNA, 4001 bp, Homo sapiens
cagctgaagctggcgaaatccaagatggcgcctctgaagagcctctggctttatcatcatcctgttctcatgctaaacaacatgtcgccatgacaacgactggaagagaccaagaagggacagaaaaaaaggggtttcttgattccgggaaaaatctccgttctttcccaaggaaagcacgaatattcccccccgtgctcttaatgcccagccccttcattaaagacaccctacctctgaaacttcccagctctcacaagctaagttgatttcagatcttccaattccatagccattgaatacagcctgcactgcttgacacactccctttcggtttcgtgcattggcctcaccacgcaacaggaaacaaccctttttgggataaccgggactcccggtaacatttccatatatacatatcttaatgtatgcaagggcgtctgggggagaaagaagcagcacatttcattctttgctttctataatactggattgcttgagtttgtgacacatgttaacatttgcaacatttttaaactaaattgtatgtattatagaacagtcctctgcgctgagcttggacttaaagtggaaaggcttacatttgcagaattaaaaaaagcatcgaaacattctgtggcaggaagtcctgcgagcctcctcgccccagcccggtttcccgcgggccccagcctcatcccccaaggccccaccctgagagcccccaggtcccagccgcgtcctcctggacccctcccaggcgtggcgagccgggtcgcgggagcgctccgccaccaggggacagtgcggcgccgaccgtgggctgctggctcggccgagggcacccaggcgccctccgctgcagcgggctggttgcagaggggcgggctctcgccaggcagcaggcgctccgggcgcagctgggaggaaggaacgcccccgggagtgggcggcggccgagggaccctgcaaccgtcctccctggaggaggcccccgcagctcccgcagcccccctcatcccggacgggccggggattgggactggcctggggtctcctactctcctactccgcgcaggaagtagccccttggcaggaccggcggtgcctgctgctttcaggagccccgagccgcttttgtctgggtgcagctcagctcacatccccgatgcaagtctttcccggctcgtctccccttcttcccggagtccatgccttgctgtcggtgactcatcccacactgtgccctgcgactcaccctgtcgctttctctgttcatccgggagcgcggcgccatctccctccagccccgcctcccctacagtgctccgtgctgaggtcgcacgttctctcctccctccagctccctggctcttggcccttcccaggccaccaggcgacagcagcctccgccttcatttcccttggtcatttcaggcgcatgcttggaggatttcaggatctgactcagcttccccgccatgcatccctccaccagcatccagtcacacctctgcagccttcagtgtcctggaaaggactgaccaatctgacccattagaacctacccagaccaatttgaaggccactgcccctcaaccgtggccacccactcctgccccacctggagccccaaactgctcagttccttctctaaaactctgccctcttttgtttgttgtgaataactgtcttccctggttctttccacacctctctggcctctccttgtctttttctggttctttttttctctattctcccttatgcactggccttgctggaggtccctgctctccctgcaaaacctcaccacacccttgacttcagctatatccatttcacctcacgttgacatctggtgcctagacctctctcccgagccttccacaccatgccaaaaatgaaattcattttctcctctaaatttgctcaccttcttgttttcccaatcttatttattgtcacagccattcccctgctggtccaagtcagtagtctgagagtcatgctagactcctccttccttatctacccatccaccaatccccaagccctgtctatcctcctttttttttttttttttttccagtcagagtcttgctgtgttgcccaggctagagtgcaatggcacgatctcggctcactgcaatctttgcctcccgggttcaagtgattctcctgcctcagcctcctgagtagctgggattacaggcgcatgtcaccacgcccagctaatttttgtatttttagcagagatgaggttttgccatgttggccaggctggtcttgaactgctgacctcgtgatccgcctgcctctgcctcccaaagtgctgggattactggcatgagccactgtgcctggtcatctatcctcctttttaaatagctctgccatgtgtgcctgtctcccctgacagctcaccctcatcctatttgtccacattgctgcagagtagtctcttccatacaccaggagttcccaacccccgggccacagacctgactggtctgtagcctgttaggaaccaggacacacagcaagaggtgagccaccagtgggtgagctagtgaagctttatctgtatgtgcagctgctccccattgcttgcattaccaccagagctctgcctcctatcagatcaggcagcattagattcttataggagcacaaaccctactgtgaactgcacacataagggatctaggatgtgcgctccttatgagaatctaatgcctgataatctgccgttgtcttcatcacccccacatggggccagatagttgcaggaaaacaagctcagggctcccactgaaaataaagtgcacaagaagtgtcatgtgcttgaatcatcccgaaaccatcctctgctgtccaaggaaaaatagttttccacaaaacccctccctggtgccaaaaaggttgggatggttgccatacataactctgatgatgagaccacgaagctcagaatcctccagaggctctccactgcctgtaagatgaaataaaatttatgggtgtgacttatccataagggcccagtctaaactgcctcatatttaattatatagtaagctatttgtttcctcaaacgtatatattttggcccatttcccagtctcctaggttggaatatgctctgtgtgtcacctggccagctcatgctctttctcattctcagctcaagtgttagggactctatgacacctttcttgattctcccagtcagacatattgttgctactttttcttaacacttatccttttatccttggcaccactaaagcacatatcacatcagatttcacttgtttgcacatctgtctggcatcttgagcccagggaccgtgtcgcctgtcttcatgtccccaggccctagtgtagctcccagcctatagtgagtgcagaataaaagtttgtagaatgaggccaggcgcggtggctcatgccggtaatcccagcactttgtgaggccaaggtgggcagatcacgaggtcaggagtttgagaccagcctgaccaacatggtgaaacctcgtctctactaaaaatacaaaaaatagccgggtgtggtggcacgcgcctgtaatcccagctactcaggaggctgaggcaggagaatcgctcaaacctaggaggtggaagttgcagtaagctgagatcgcgccactgcactccagcctgtgcaacagagtgagactctgtctcaaaaaaaaaaaaaaaagtttgtagaatgaatgaaacaattagttacaccacagttagtgagtcatcgatacttcatcaaggctgggtatttcgtataataaagttattaaagctgataagcaaagatcaagttacccaaagaacagcactgccggtgatctaaaggtctttgccctcaggttgcttaggtaacggaaaggataagaactccccactgttctggggcggatcttacattgcttttggaagaggcaatagacttgggaaagaaaggagtgtgtgtattga

SEQ ID NO: 1882311 - DNA, 4001 bp, Homo sapiens
gtggatggatcacctgaggtcaagagttcgagaccagtatggccaacatggtgaaaccccgtctctacttaaaatacaaaaaattagctgggcgtggtggtacacacctgtaatcccagttactcaggaggctgaggcaggagaatcgcttgaacctgggaggcagaggttacggtgagccaagatcgcgccattgtactccagattgggagacaagagcgagacttcatctcaaaaaaaaaaaaaaaaaaaaaaagtataaaacacaggcttttatgttatacagacatgaatgaaaatccttggttctgtcacttactagttgtgggatgttggacttattaccaggttaaatcctctaagcctcagctttactgtggttaaatggatataaaaatatccaatctctctaacagagttgtgaggattaaataacaaaatttgtaaacctatttaatagtactgggcatacaactcctcaataaatgttattacaatcactgcgacagaacaaagatcactggaggaatatttccaaatcgttagaggttttaagatcatcacaactgtaatcccagcactatgggaagccgagatgtgtggatcacttgaggtcaggagttcgagaccagcctggccaacatggggaaacctcggctctactaagtagctgggcgttgtggcacacacctgaaatcctaactacttgggaggctgaggcaggagaatcgcttgaacccgggaagcagaggatgcagtgagccaagttggcaccacttcactccagcctgagtgacagagctagacaccatctcaaaaaaggagcaccactgaactttgtaacattaactgacagaaaagacactagacactagaattctatgagcccccagcagtgtcagaaaatcctcttacatgtattttgttttttgttgaagaaaaaaaacttaaacagagaaatattgctagatttcttagattagataaggataaaatgagaactatcttattctactcgttccttgtattattcaagattcagtaccctgctggtaagtttcattcagcgaatccagcacacatgaattaaatgctagttaaggtacaatgtctccaacaggcacgatgtcagaataatggtttctgtccatcagaacaaaggatgagatgcgcctcttggatttgactgtagcccaatggtcatcatcgctggctgcacattaacattatccaggaaattttaaagctctataggtgattctaaggaagaggaggactgagaggccgactgttaagatgcactgctactgtccgatgagcacacactcatccataacgttacacatttcctattcacctgatgcccagaatcatcaaacagtgtattcaacacagtcacgccatttctgttttccaggtgactatcctccacaagatactgttatccagagcaggtaaactccctagcatctgtcgctcaagaacttaaatccctccctgcacccaacccatcaacagtgacttattaccatccacaagccaggctgcttcccgatgcaccttttctcctggggagtgcccagacgagcgccatctgctcctgggtcagaggagtccctgcagagtcatcgacttcctcatttccaaaagccccataggttgcactggagtcccgaggcgaagcgccgacacttcatctgcccgtcacctcccgatttttgcaatgtgtttcttctgaacaagaatgtgtgccctggaagccaactcaagtcccagacctaggtttctcgacatttccccaagtcccacctgcgtcaggttgtaggctccggggccagtccctttcgatccgcatcaaaaaacctggcgatcccctttgggcacaagagctcagggcgttggtccccgcgatcgcggaagcccacttccagaaaaactcgaccactaacagtaagcttcaggggtagcaaaaaggggcagaagggtttgcatcccctggcgtcatttccgggtccgctctggaaacctcggaggtttccgtgtctctgtcgtttattccaactgttaatgctccatgtgcctttgactctcctcaccttcccttctaaacacacggggaagaaaggttcaggtttcccagagaaattgtggggaaaaacctttaaagtatatatacaaaggtagacagaatagtacagtgcatccaatgtacctgacacaccttcaagaattactaactcggccgggcgcggtggctcacgcctgtaatcccaacactttgggaggccgagacgggcggatcacaaggtcaggagttcgaaaccaacctggccaacatagtaaaacctcgtctgtactaaaaatacaaaaaactagttgggcgtggtggcgggcgcctgtaatcctagctactcgggagactgaggcaggagaatcgcttgaaccttggaggcggaggttgcagcgagccgagatgacaccactgcacaccagcccgcgcgacagtgcaagactcctctcaaaaaaaaaaaaaaaaaaaaaaaaaaaagaagaagaaggcctggcgcggtggctcacgcctgtaatcccagcactttgggaggccgaggtgggcggatcacctgaggttgggagtttgagaccagcctgaccaaaatggagaaaccttgtttctactaaaaataaaaagaattagccggatgtggtggtgcatgcctgcaatcccagctactagggaggctgaggcaggagaatcgcttaaacccaggaggcggaggttgtgattagccgagatagcgccattgcactccagcctgggcaacaacagcgaaactgcgcctcaaaaaaaaaaaaaaaagaaagaaaacaagatgaaagaaaagaaataccaactcgtggcaattttattaatctataaaccactcctccccttatgtggttggaagcaaatctttttaatttttttttttttttgacggaatcttgctctgtcgcccaggctagagtgcagtggcgcgacctcggctcactgcaacctccacctcccgtgttcaagcgattctcctgcctcagcctcctcagcctcccgagtagctgggattacaggcacccaccaccgcacctggctaatttttgtatttttagtagagacgaggtttcaccaccttggccaggctggtctcaaactcctgacctcgtgatccacccgcctcggcctcccaaagtgctgggattacaggcatgagccaccaaggccgggccactccacttttccttaaagcaaaacctgtcattcttctgtttcttacctcttagtttcttagtcctttttttcctattagccctatttgtatttatttgttattaatgcactatgactaataaaaacttgcctagggtcagaaactttgagctttagcagaaacaaaaacatacaaacaaaaactcagaaagttttttcagataaagttttgtttttcaagtacaattaagagcatgattctgctcaggcgtggtggctcgcgcctgtaatcccagcactctgggaggccgaggcaggcagatcacttgaggtcacgacttcgagaccagcctggccaacatggtgaaaccccaactctactaaaaatacaaaaactagctgagtgtggtagcgggtgcctgtaatcctagctactggagaggctgacgcaagagaatctcttgaaccaagatagcggaggttgcggtgagctgagatcccaccactgcactccagcctggacaacagagcaagactccatctcaaaaaacaaaaaacaaaaaacaaaaaaaaaaaagaaagaaagaaaagggaaaaaagcatgattctgaacagtttggtcattttagaaacttttgggataaatctgaatactcagagttttctctggccataaaatagaagataggaaaaatgtaaatttttattcatatggagagaaaagtcacagttgtccctgtattatctttaagaaagctcc

SEQ ID NO: 1882312 - DNA, 4001 bp, Homo sapiens
cgcggtagctcacacctgtaatcccagcactttggaaggccgaggtggatggatcacctgaggtcaagagttcgagaccagtatggccaacatggtgaaaccccgtctctacttaaaatacaaaaaattagctgggcgtggtggtacacacctgtaatcccagttactcaggaggctgaggcaggagaatcgcttgaacctgggaggcagaggttacggtgagccaagatcgcgccattgtactccagattgggagacaagagcgagacttcatctcaaaaaaaaaaaaaaaaaaaaaaagtataaaacacaggcttttatgttatacagacatgaatgaaaatccttggttctgtcacttactagttgtgggatgttggacttattaccaggttaaatcctctaagcctcagctttactgtggttaaatggatataaaaatatccaatctctctaacagagttgtgaggattaaataacaaaatttgtaaacctatttaatagtactgggcatacaactcctcaataaatgttattacaatcactgcgacagaacaaagatcactggaggaatatttccaaatcgttagaggttttaagatcatcacaactgtaatcccagcactatgggaagccgagatgtgtggatcacttgaggtcaggagttcgagaccagcctggccaacatggggaaacctcggctctactaagtagctgggcgttgtggcacacacctgaaatcctaactacttgggaggctgaggcaggagaatcgcttgaacccgggaagcagaggatgcagtgagccaagttggcaccacttcactccagcctgagtgacagagctagacaccatctcaaaaaaggagcaccactgaactttgtaacattaactgacagaaaagacactagacactagaattctatgagcccccagcagtgtcagaaaatcctcttacatgtattttgttttttgttgaagaaaaaaaacttaaacagagaaatattgctagatttcttagattagataaggataaaatgagaactatcttattctactcgttccttgtattattcaagattcagtaccctgctggtaagtttcattcagcgaatccagcacacatgaattaaatgctagttaaggtacaatgtctccaacaggcacgatgtcagaataatggtttctgtccatcagaacaaaggatgagatgcgcctcttggatttgactgtagcccaatggtcatcatcgctggctgcacattaacattatccaggaaattttaaagctctataggtgattctaaggaagaggaggactgagaggccgactgttaagatgcactgctactgtccgatgagcacacactcatccataacgttacacatttcctattcacctgatgcccagaatcatcaaacagtgtattcaacacagtcacgccatttctgttttccaggtgactatcctccacaagatactgttatccagagcaggtaaactccctagcatctgtcgctcaagaacttaaatccctccctgcacccaacccatcaacagtgacttattaccatccacaagccaggctgcttcccgatgcaccttttctcctggggagtgcccagacgagcgccatctgctcctgggtcagaggagtccctgcagagtcatcgacttcctcatttccaaaagccccataggttgcactggagtcccgaggcgaagcgccgacacttcatctgcccgtcacctcccgatttttgcaatgtgtttcttctgaacaagaatgtgtgccctggaagccaactcaagtcccagacctaggtttctcgacatttccccaagtcccacctgcgtcaggttgtaggctccggggccagtccctttcgatccgcatcaaaaaacctggcgatcccctttgggcacaagagctcagggcgttggtccccgcgatcgcggaagcccacttccagaaaaactcgaccactaacagtaagcttcaggggtagcaaaaaggggcagaagggtttgcatcccctggcgtcatttccgggtccgctctggaaacctcggaggtttccgtgtctctgtcgtttattccaactgttaatgctccatgtgcctttgactctcctcaccttcccttctaaacacacggggaagaaaggttcaggtttcccagagaaattgtggggaaaaacctttaaagtatatatacaaaggtagacagaatagtacagtgcatccaatgtacctgacacaccttcaagaattactaactcggccgggcgcggtggctcacgcctgtaatcccaacactttgggaggccgagacgggcggatcacaaggtcaggagttcgaaaccaacctggccaacatagtaaaacctcgtctgtactaaaaatacaaaaaactagttgggcgtggtggcgggcgcctgtaatcctagctactcgggagactgaggcaggagaatcgcttgaaccttggaggcggaggttgcagcgagccgagatgacaccactgcacaccagcccgcgcgacagtgcaagactcctctcaaaaaaaaaaaaaaaaaaaaaaaaaaaagaagaagaaggcctggcgcggtggctcacgcctgtaatcccagcactttgggaggccgaggtgggcggatcacctgaggttgggagtttgagaccagcctgaccaaaatggagaaaccttgtttctactaaaaataaaaagaattagccggatgtggtggtgcatgcctgcaatcccagctactagggaggctgaggcaggagaatcgcttaaacccaggaggcggaggttgtgattagccgagatagcgccattgcactccagcctgggcaacaacagcgaaactgcgcctcaaaaaaaaaaaaaaaagaaagaaaacaagatgaaagaaaagaaataccaactcgtggcaattttattaatctataaaccactcctccccttatgtggttggaagcaaatctttttaatttttttttttttttgacggaatcttgctctgtcgcccaggctagagtgcagtggcgcgacctcggctcactgcaacctccacctcccgtgttcaagcgattctcctgcctcagcctcctcagcctcccgagtagctgggattacaggcacccaccaccgcacctggctaatttttgtatttttagtagagacgaggtttcaccaccttggccaggctggtctcaaactcctgacctcgtgatccacccgcctcggcctcccaaagtgctgggattacaggcatgagccaccaaggccgggccactccacttttccttaaagcaaaacctgtcattcttctgtttcttacctcttagtttcttagtcctttttttcctattagccctatttgtatttatttgttattaatgcactatgactaataaaaacttgcctagggtcagaaactttgagctttagcagaaacaaaaacatacaaacaaaaactcagaaagttttttcagataaagttttgtttttcaagtacaattaagagcatgattctgctcaggcgtggtggctcgcgcctgtaatcccagcactctgggaggccgaggcaggcagatcacttgaggtcacgacttcgagaccagcctggccaacatggtgaaaccccaactctactaaaaatacaaaaactagctgagtgtggtagcgggtgcctgtaatcctagctactggagaggctgacgcaagagaatctcttgaaccaagatagcggaggttgcggtgagctgagatcccaccactgcactccagcctggacaacagagcaagactccatctcaaaaaacaaaaaacaaaaaacaaaaaaaaaaaagaaagaaagaaaagggaaaaaagcatgattctgaacagtttggtcattttagaaacttttgggataaatctgaatactcagagttttctctggccataaaatagaagataggaaaaatgtaaatttttattcatatgga

SEQ ID NO: 1882313 - DNA, 4001 bp, Homo sapiens
gtaggtgggtgggtaggtaggtaggtagataggtagctagctagttttaaggaggtaatacatgcacaccgtatacaattccgaatttccagtggtctgaaggagtgtgcacagtgaaaagtcagcctctttgatgcacttacacagtgtctccctacccacaaggatccaatgtcactagttctcctatgtatctttccagagacattccatgactctttctaatattcactgccaattgaggcaatttggaaaagcagagtgtgtcactgagatctcgacaaagttcgctttcatagacgcacctgcatctttgtacagtaattacagaccccgaaagaggaggtcagcccagatggtgctcatttcatatgggtggggtggggcctatcttgtgaagtcaccaagtcacctcatgaagaagtgacatgggtgtggccactatttattctgacagctatttttgttctcatatccagaggaagattccgtggctgtcgtttcttgtcattttcccccaagtataaggagtgatttcactgcatgcatgaaaacaggtgtaatgaaatttaaaaagaaatggtaggcaaaaataaataaatgcaataataaagtgaataataaatggaaaatttctgtgtttcaccaatcaatatggaccagggacaatgcgttctttgtttgataaaagttagaaatccaagtttttcctcaagtgcagccaaactacatgtaatatatactttaggcattcgggcatttcccttataggtaaacaaacagcaagccataaaatcttctgtatttctttgatgttacagacagtcttctgttttatcatgggctgcaagtctgattctgttctgtgagatgtcttgcataattttctagtagtatcaaaaaaaagtgccatacaatcagagtctacctctccaacgatagtaagataaaggatgttgatttcttcaggaacattcctatggccctagcattgtcatcactcaacagcctgtctctataatgactactatattttctaagacaccatctctggaattaaagtgtatctttagctttgtactggtgtttccagtccttgaattcccccaacttgatttttcttagcctaaaaaatgacctaaatttccttttcttttatgttctacctcttttttgcctcacctaacacatgtaaaccaccataaaagttgagtagtagctctcctgtttttccccttaagttttttacttactccaatacacatttattctagaaggacattttggttccagcatatcctcaagttaatgatatcataatgtatgcttctgactcagtttgaaaatccaaatagattaatgacagtaaagacttttgagaaagtaaataaatatattaaggatgcttgagagacaagtaatataaatacagtcccccaaaacaagtaaagagaaagctgtgattcagtgatagcaacttttacctgattcttaccttgttctcccactgtactgcctgctccaggcttcttttcccagcataatctatccagaccacttgtgtttagtatccaagtgtagctctcctttgttccaggctgaggtccaggatataaagctgatgcagtcacaggttctagtgggttaaataatacttgggcactgctggatgccaactagcacagttttctggagatgatgtcttaactggaagaatggaatccattagttggaatttcagttgctgactgatcagcagaagaaatatgtgggataagaatgtcttctgcagccccttaagtcaaaccagataggaaactgcctcctcagactgcacgaggagtctactgaaattctgattttcttaaatgtacagcaaagaagtttaaaacaccaaaatagggcacaagagagttattgtaatattagtatcaactttaggtgagaatttagtcattaaatataatttacttcctatttattaaaaatgctggcttcctgaagtcattcataaggaaatgaatctgtgaggcataacttgtgatcacagcgggggggtgaggaagtccttcagatgcagcttcgtggggaaagcgtgaggaacaactcaactggcttcctatgtgaaatagacagatttgtctctaagacgtttaaaaaagaagaagaaataataatttataacttagaaattaaaactgttgaatgcctcatctaagatgaggcagcactatccatttcaaggattataaaatgagagaagtatgatttgtagaaatgaaatagaactttttctaagggaagcttataaacttgagactacatatcagacaagttcacaagtttggggaaaaggggtacatgtgtaagcctctcatgttgggctaagaaaaggaaaaagttgttgggtcttgagtttaatttttaaatgttttggtgagtagaaatgagctcatataaataacatttcctcttttgtgctttgcctaaactattcttgtaaattgtgatctttagccacaccaatccccagagttcctcagatttctgcttcagtgctgctcatgtcataaacagaattcttataaaagcatttttagaatgtaaaatctgcagtggtccagagatgaagctatgttttaaatagacctatattattagtgaaaatatggtgtagtacagcacacagcacagagagcctgaggggtcctggtcctaggcccagctcttctgctggccatgtggcaatgaatgctttgtgtctccgatttttcactggtgaaagaagagggatgaaatgaatggctcctcagttatcttccaacactgagaatctgcctttgttatgtaagagtagccgggctttcactcaggcctgatcatgaataacaatcttaatagtggtgagtaatgcacagagtcacttttccacaactaggagaatcttgggtcttgaagaaaacctaggaaatcatatcaccttgtcctccattgccagtgagggctgcatcttcatccttcaaatacgctctttcaggctaatctaaacaactcttcccaaggggcaaacttcacaacttctatgtccttaatggcagaagttcttccttatgtttggtctgaatctccctgctgaatttgcaatttattttcatttgtcctatccttagcagagagggagcacaactggggcacacattcaagtgctatctattattaatctgagccatagtaaatttgtttgtactagagtttctggggtcttacattgcattccagtgagatgatagaacctgatcccttgatggaatgttctttttgaggtctaaaatgactgaacgataaaggctaacaggctggcaggaatcctgagcagttcttgatagtggtcacaggaaagggcattgtttctttggctgtccagtctcctagcaacctagtgtacagcggctcttgacatagggctctctgaaaccccacatttagaactattaaactatttcttctaaaattaaatatgtgctcaggcaactgtattttaaaaatctgataaaaaggtaatttttccaatagcacctggtgcttagtagagatagggaaaactgatgaaagggaacataattataccatctagccctacccactgctttctgaaaggtgagctcttattatgcccattttacagacaaggcagatggacacacactgagaaacgaacaatgctaacaatatcaacagtttaagagggaaacgtttaggatttggaaaagcaaatgaaagcaggtttaccttgctgacactcaaaaagtaataagagctccctattcactttctgcctcctcctagtcatgtgggtgtcctgtgagaggcacagaagaggaaaaaagtggtattccctggggatggactttcccagcctcctccagagcagtccaggtttgtgaatcaatgcaggaggtgggggtgggagtgggaggggttggccaggcaaggctttccct

SEQ ID NO: 1882314 - DNA, 4001 bp, Homo sapiens
aggggaggggcttggaagagtcttgctcacgtctcattgtctctgaggcatgtccagtaaacccaaggtcagcttttgccctaggctcaggcagcctggtttcagaagcttcttagaggaggagggagaggaggggctggaggaaggcccagggagcagggctggtgaggtctgggcacttcccactatttactgccccgcagggtgacacaggaggagacttggtgctgaagcccacctgggtgtgcaggtcacagtgcatgcttctcagttcccccatggaggcctcagggtgcctcatcaccatgtcctcctccagggcccaggcctaggacagtgtgtcctgaaggaactcctgcaagccaaacaggaacagcttcagggggtgttctagggacagggtgactatgaggctgggaggggtctgtgggagagtcagtgtctgcaccttgttcctgccccaggcacccaccactgggcggtgctggatcctactgtggctgccccaggggtccagatgttcacagaaaaccacagctggaggaaggcctgggcagggaagtgctcaacacactcttgcctttcatctgggttgtgtcaggagtgggtttggtacctgggtccactccctgcccagcccaccaggcctggtctggccctacctccaggctggagcagagagccatctggacagtgtggatgctgctctcaggtcatcacacaccagaagccaggaatctgtcctggctataggtcccagggtctgtcctgcatgctccttctgggcaccattggccacccagggacttaattctgtggctgtgaaggccatgtataccatagttgtcaccacacactcacctcccagtaggtagacatcccagagccacaggatgagcatgaaggaagtctgtgggaacagcaggtgtgggaggacctggcctttccaacctcggggctggtggcttgagcagggcccactgtagcctcagtctggacttcctgaggctccctctgcttgggaagagacccacccaatcttccataaggctgggtcagacaaggtccggcagctcttcatggggatggactcatctcagcagaaatgtggttcccagaataaggggcttcctgagggcttgtggcttccctggctcctttggctcttccaagatgggtcttggcccagtctgcccagaattccctggtgtctggtgtgtaaagctcccatcatacaggtcctggcttgtgtgccctgcagagacctgcctgtgcctcctgtggggtgggggtgagctgggtcctcctggggaagccagacccctgggctgggggagctgagcactgtggggaaaggaggtacctggcctggggtctcctatgcatccttatctcatcgatgaagcaccatagaaaccagtttaaggtggaaagccggatgcacaacccttccttgtcctgatagaaggaatagaagtgttcagggtcccctgggcttccgtgaaaacctctgtattccagaccccactgcagacccttccccaagaggtagaacagtggtggctgtgccccaacacctccccatggcatgggcccccagtggatgtacttcccctagccctggctcagccagagcttggcctggtcccagtgcctctgtcccctccaggtaaggaaaaggaggccaaactttgaatccattgaaaaccagatcaagccctggctggaagttggcctctcaccagccccaggcttcccctgtccctgctaaccccatgggacccagggcctctggggaagagctgagggactgaccactcaccatgtgcttcataagctctcagaacacttttagcaaaacttgctcttgatgggcttggagactctggaagttagaacatcttgggatgtagactcctgagaggctcctggggccccaaggaatcagagcctactcctgagatgtggagccatcaggctgggcagtggcagttgggcagtggcagttgggcagcagcggttgggcagtggcagttgggcagtggtggttgcttccagaccccaaggcctttcactgtcccatccagtgaccccatcatgtggtctcggccaggagaggaggggtgggaatgcccctggggcctggctggaggcactgcttagtggcttccagggccatggctccagaagggcaggcctgcctttgaagcagtgaggacaggtgggagctggtggggtgaccaggggtgctggagggtgtgtggccttctcctggatgtggggtcagggcaggggacacaggacagagagaagctgtcatctgggcttggtctagccatgggcagggagggtggttgggagggtggccagctgggaggtggaaggaccagcagggttgtaagagtcccctgcataaggtcagggccagaaggttgtgacaccaggatgcagaaggtggtcacagggcagctgtgatcccatttgctgatggggacaagaggcatctgacttggggtgtcgggtccctggccagtcacaggctcctgtgggactctcagcaggggataccctggaggctcaaaatgagcaggggacagaaggtgccttgtctgtaagtcacaattacccagccagtgtggccgtcccctgtcctggctgtgtgatgcctcgtgggtagctgtccactgtgagctaatgtcacatgggaggactgtgtcacctgagagggcagaggtcaccttggagagtaccatgcttggcaagcctctcattggccagcagctgggccagcacccagatgtctcctcattctggaacatgagcaggatagtggctcatggcatgatatggcttatgcccccgcagtagcctacctctggcaaaagccaaagtcatcatggaaagacttcaccaaggctgacgtcaccttggagggttgaggtcacctgagagggctaatgtcacctgagcacactatgtcaccaagagggcagaggttacctggaaaggcagaagtcccctggcagagctgaggtcacctgaggaaacaggtcacttggaagggaagaggtcacttgggagagttaatatcccctaggagaactaatgtcacctgagaaggcagagatcatctgggaaagcagaggtcccctggaagacctgagttcaccagggagggcagagataaccagggaggactaatgtcacttaggagggctgaggtcacctgaaaagactgaagtcatctggaaaggcagaggtcacctgggagagctgaggtaacctaggagggcacagatcacttgagaggggagaactaatgtcacccaggagggcagaagtcacctgagaaggcagaggtcaccaggaaggcctgccacaggtcccggggaatttagggtgcagcttccgtgcccctctcctgacactgtggttcacttgagccagtcatggacatctcagatgaaaaggagctatggaagagactcctgcttcatccaaactcatgtgtggccagaaaaggcataggtgagggccgttaagaacaccctgacccgaactgcagatgctaagctggggaggccactgtgccaggctcagggcaacacccatgaactgaatccctatgaaggctggcttgtgggtgctgaccactgcacataggggactgggatggctcacaggctgctgggcacaggaagacagctaggtccagaccctgtgtgggcagcccatggagtctgctcagcagctcttcctgccaggaatggtcaggaaagtgggggctggagagtgggagcagccatctcagtaagtccttccctgtctgctgtgctgttcagggttcgggtgaaggggaactttgatcccaaagcctgattaagatgatggcttcttcaggatccaaactcactttatgacaaaagaaatgttcattaggcacttcaccatcttgtaaaatattctgagagggacaatctgcaacaacgcaaagcttgtgg

SEQ ID NO: 1882315 - DNA, 4001 bp, Homo sapiens
ccctcctcctgaaccacagagtatttctgggtgggcatcgattgtctatgggccatggcgtaagacccccaccccccgaccccccggcaacaaaagtatcttcttgctccctaaaaaaaaatgtatggagactacatatccttgcctgtctagtcagccttggttaatttcataaagtaaaggggccctgagcctgcctgcccggccgagtttagagttgaaagggaaacgtctttgaggtggaaaccaattgcatggatcaaatggtcctgatggtgcatagagccttaggtttggaaagaagtgaagggccttgccgccttgctggggacttgagcctctcagccattggtgctctctggagctgcccgcccaccaggggcaatggcccttgttggcctccaggccccctccttccctggatgctgtgctgttctcctcttggtcttgtttcattggctgtggcagaaactttggtcccaacaaggcccaggaaacagaccctagcaaagacctgaggcaactgggtgccccaggaccacaggaactcatgtgtgctgtgagggctttaagagctttgaagtggggagtctctgacgtggatcagggctatgggtgctgatgctgtcaataagccacacgcaaaggttgggtcaatatgactgcttctcagaccctcttcggaggcagactctccctcacctgcctggccaaattccctctgggcagaaggaccctagggagcttttcctggcccatgtggcagaggcccaggctcccactcagacaatgaccccttgctttgcccactgaaagaagtccccagaagatgagctctgttacaagcagaacagaaaagaaacagtgggattagggctccaaaaaccctccagaactatcagagaattctggacagtggtccctgatggcatctgtgttaggggctgggaacaagaacccctctcacaggcacctctacaggcggggttaagactgtcaaatactggccgaggccaagggagactctgtcatgtctgaggccataggcatgttttcttctggacttcagcgagaggcagagcccccagccccatgcagtcacctcagctctgcctgagaagaagcgagggaagcccattcctccccatcagttggcctctggggaggcaaagtcaagtatgtgatggttccttacctgtgcagggaaaatggaacttgggagtcagctgtctgaaggcatcacgccttgtatgacccttgcaagcccaagctacctacctgttcctgtacagaaaccctccctggcctcatcctgtgggtggcaaacccacatattcagttattgctgttttcttccttccttggatacttgtctccaataaatatttacagtgggacccacagatgaaccttagccccaaacataagatagctatgtcaaaaggggtcctgggacagtgataccccaggggggtcaggcaaaaacagaagcaagcctcttggccacctcctcccttagccttctgcgtaaagatggacttgcaggaggagaacacaccctgcaactacagaacctcatggtacggaaccaccaggggatcctcgcccacggccctgggtggaattgatgttgggaagatagattagtagtgaggcgcatcaccccactgtgactcaccttcttctgcccccacgcctgtccttcagaccatctccctgctgcggcagagccactgagttcagggagcaactgtgggcagatgaaattgggctgtggtgggtgtgggaatccctgtggacttccaaaagcacttcggtttctgccctgcttggcgtggttccagaacccagggtggtggcgaggtgggagctggcagagcgcagggaagaagttccaggatcagagctcacctttctgttcttcaccctgatctgttcttccctgatcagtcctcccagactgcactggagagtgaggcctttgcctgttcggatttgctgcctcgtgtgtttcaagctgcccacacttcacaggctgcttcgaagccctccctacccaccccgtgagaaacgcccctggggagaggcagagatgggtcttttagtcttgcagcccttgtttgtttaaaatgtcaggctgacttcttctcaatcccagaaatattttactggcatggcttcagcaaacatgactcaaagcctagaaggacatggccagatctcactgagtgaccatttagtccaacctgaggactgatgttaggaggaaaaattctttctccaggtcaaattagacttctgcagatcaaataggataccaagagaaggaggcactttggccaggatggggaggggctaaagagcaggaaacaagcttggggcgagctggaaatatgtgtaacacaggcttgtaggagcacaggcttccagtggcagggaaatctccaattgggtgtgtagtaaagacttaaacctgttaaaataaattgattagccaaagatctctgctcagtgctctttaaactctaacatctgttcccagtaaataattcacatagcagatattaactaggaggcttaaaaggaggagatggcagcttaaaacatgcactgagatgcctctttgcctaagaaatgcacacccaaacccacacccaggtgttaaggaaaaagtgctgatggtgctgcttcctccctctgtcccttgttccaggctgcacacctggtcctacccctgtccctagtaggctggcatcttcacagctccttcctcccaccccaggacaagggcccctggaacactggcccgcagccacaataagggtgtccatggattcctaggactacaagtggtggaaggcagccccttctccaaccctccctgtcacacatacaccctcccctgcagcaggcagacagctcttgtttgctgaggctctgctggagtcctccttacctgtccctcaccaagggacagatgcacctccgataatgggcagaagttgggtgtcagtgatgggaagattctagaccactccctaggagatagccccttctcttcccttaagcatctccctcccgacttggttttctggatattccaagaatatccttttccttgcctcctttgctcagcagtttcctgcggagttccagtgtcttcagcagatcaccattgctttcaactttggaaggagcaggccttctggggacacccaagacattcctgggcagagtaggtggctagcttctccaggtagggcagcccagctcctgtctgcatggagttggagctgccaccaccaggcctggtcaggggcccagggtaaagctagttcatactgtcttttctgggtgaatagttcgagctcactgagactacctgggaattgagaagatgcacaggaaaagtactttataccctcggatgtctactctctatcaaacattgcaagagttttgtaaggacagggtggcctggctccacactcactggcaggtgctgccctcaaggggctgctcctcctttcaggtagaagagggtttctcaggttctgctggtgaaccaaggtcgctgagtaccatcttcattggcactgtagcccgtttgacccaaggctagaatccagcccgggcggggacaatgctttctggctggcacccaaagcaacaggtgggagagctctggtgggagtcatgtgtctgcccaggtgaaaagattccagaaattacccacacatcattttctccgtgaattacctgagcattaattcctgaaagctttgatctccaaaagggcctggcttgattctttcagaatctctcagtgctatgttattgcaatagccattttccttctgatcagaggtcattggaatagaacagaactgtatggagttctcttggattgagaagtggaagagtcactgtgcactctcttattccacactttcagagccaaaatccagaaagaaggggcagtaaccctcataggtacttca

SEQ ID NO: 1882316 - DNA, 4001 bp, Homo sapiens
taagcgtaaagacagatcattcgcaaaataattgcagccctgacatatctaaatgagtttgtaaaagaaaatacagtggcaattgatcttattaattagagatgtaccacgatggtaatacccacttatccacagattgcctgcagctacaaaaataaaataaaataaaataaaataaaataaaataaaataaaattaaccactttctcctggagaacacaatttctttccctccctgccatagaaagtcatctgggaaaaaaatccctggtgatctcttctcttcacagtggttaacagcccttagagggcagtgtggatgggtttcctttctgcccatggaggtttgggtttatactggattgcacaatgccttgcatggtacagtggcttgtcgcaattgatcgaacatgtaatctgacaaacaaacaaacaaaaatgggctacaaaaaagagagagctgctttttaagcctgtatgtgtcatttacctgtgacgaacagcagtaagcgcgatggtaggcccgactctctccattgctcattctgtctctgctctttccattatcttatttctgtgaacaattgcttagcactcgaacagaatagcccagcgataaaacgctgagtgacgattgggtggcagccacctctgagtgcggtccagccctgtgccattggaggcgaatcttcaggttgctggatttgaaacttacacaaacactcactgtattattgcagaagagagagagaatggagagagaaaggaagaggaagaggacaagaagaggaaagagaggaggaaaggaagaggtgggtaaataataaattgtttagcactggaagaatcatctagtgctactccagtcatttcaagggttgtgtgtgtgtgtgtgtgtatgtgtgtgtgtattttgggcacctgtgggcaggggggatcaaagtgggagtacaggcacaactgtgtttataaggcaagtgggaactaaaacccagcctttggtgtctcaccaagatggacacagtggcagggccctgtatctgcccctcaagggggaggtttttactaatttgcactaaggcctagtggggccagagggtgaagagtggtgtgatttgaaaacaaagcagggcaacaggtttgatattaaaaatgacccatttcacccttgatcttccaacttgtctggaatagaaaaactcatggccagcagactccaagcacatatcgatattacccacacaaagttaaaaaaaaaaaaaaagacatgaagtagtgaggtgtagtggtggtgtgcagctgtagtcccagcgactcaggaggctgaggcaggaggatggcaagtttgaggctactgggagctatgatcatcccactgtactccaacctgggcagcagagcaagattctgtctcaaaaaataaaagaaggacctgattctttcaaaagcaaaatacattttaatatcactgtgactgtgccttgactttcctggagtaacaagattaaatttattatgaaatttcaaattaactttaaaggaggacttgacagcttttgcaggttgtagggacacccaagcccatctcacctttctcttacctcctggaagcagcatctttgttgaggtgtgaagagcaaatatggctcattggttcttggtgtcacctgctacagggactcaccagttctgacctccaaattagccagggtgaacgcagatgcaggagatgccgtgtgaatgctggggaaggccatggaaaaacacaggcctgagtagccgacaggccccagtcagggaaagaaaaagaatgctcccaacagatcaaagcccacagtctcttaaaatggaaatgaacatttaaaaaaggcctttctcaagggagaaatatgcagtaaatcagagcttttgaaagacaactggggcctgtgccggtttttgaataactcgtcgtttaataaatgttctatttttgaccctttagggaaatatacaactccatctgaaacttatgagccaaaataatttaactttttttccatctcatttttataagttttgtgatggagacaaatgatctggaagctttctttttaaggttttatgatgaagcgaggtcatttaacaagagagaaatggttttctctgcacaccagctttgactcggtgagtggctagttagtcccagcatccgaagtctcaggatccacaaagaggaagctgtgcatggagttttgaggaattgttcttggttttctttgtaagggcttcatgaaaagcatgtaaacaagagaagagtagatcatctcttctaatgtgtgtgtatgtgtgtgcgtgcatgtacatagaacatttgaaactctacatcggtgactgtaccttgactatatgaaactatatgtcatgcatcctctgtactggtaaaaaggaagtacttaatatatgttggaattaagttgttggatgttttccacatcttttctaatccctaggatcctaggcacacagtttgtccacaatatattctcattgtcttgttgtgctgttttatcaaatcttacctatcttcaactgcctttggactgacacatactggacctgagagatcagcttcctgtccaccagaggcttgaattgttaaaaatgttacaggctcattttacctctgatgagtgggtgccacaaaatctcgggagcagatgtccctcatttactcacattgctccgtcccatccctttctgctgggtcctgagagcagccttctccctggcacccagctgggattcccactaacccaactcaggttcaagggctgagggaattcaggatctgagggatggctcaaagaccacatggagttcagttttgcatgttttctttgagtgccagccagcaaagaccgtggcctcacataatttttctgccgggtgtggaatagtgccatagaaagatgattcatgagaagaaattgtcaagtttctgcctggaactgaatggaaaaaaattggttgaaaaaaatcccagacatgcacacagaagatacgtaggaccaaatttatatctttagctttgggaatctacattcattatttctctcacttgacttgaaaatgggtaaaaatctggccacagtgctcttgttgggttataaataagatttttgtttttatattagcatctggcccataatagtcgctaatatttactttgtgttgctcagtttataaggtgtttttttcctgtgtatttaaattgcatattagacctgaatataggtatttttcttttacaataagaaaactaaatctttgtgagagccacatggacaataccagtgtaagtaatttaatccaagccctctgcattcttgcaacctttgttttagccacaaggtgattctatttggtgattgcattccaacagcaattctctgacaccaactgggtgtcctacaattcaattcaatacattttgacactaactatccctatttaacatcagaacccacaaggtaaagggcaaggtccctaataatactgcccttactcacataccagctacaaacagggtccccaggctaccctcacttcagtctgacttggcaacaaatttaggggttcccacaactccctctggctcaagaattcaatagaatggcttaggaaactcaagtaagcactatacttactgttaccattttattataaaggatacagatgaatagcaagagaaagagatacacagggcaaggccttgggggtagaggtggggtgcagagcttccatggactccttatggaagccttccaagcctctggtggacaggaagctgatctctcaggtccagtatgtgtcagtccaaaggcagttgaagataggtaagatttgataaaacagcacaacaagacaatgagaatatattgtggacaaactgtgtgcctaggatcctagggattagaaaagatgtggaaaacatccaacaacttaattccaggtatgtt

SEQ ID NO: 1882317 - DNA, 4001 bp, Homo sapiens
ggctaatttttttttttatttttagtagagacaagttctcaccatgttggaaaggctggtcttgaactcctgacctcaagtgatctgcctgcctcagtctcccaaagtgctgggattacaggcatgagccaccatgccgggcttgaaaaatattttctgtaaagcatttctaccataacttcttgagacttaaaacagagaaaaacatattcattgagaaaatgcagttttgattttttattgtttagatcaagaatacgaacattgaaaccaattactcataaagggtgcttcctctagaccttcttattgtcctgaattcctatttcattagcaaaagtacatttacatgaaatatatatatatatatatatatatatatttcatatatatgaatctggcataaatatggatgcatacttcccattattaaaattagaattctttaaacaaaacaaaattttcctctattttcaattcttgtcacttctgccatttgctgcttgaagtccttaaaaaatattatgtcttctgaatgctttctaagactatagagaatattggttgaatgaggtttagagttggctaaaggagggcttttttgaccagaagttgattctctgaagttttttgtgtgtctttaacttgtttttttccactgattaatctttcatagtatgtagttataatggtaaccatcacgtacatctgacctacaataaagaagaaaatggacagaaaaaagattattaacttttcttccttttttgttcttctgtaggtctcattcctgtcagttagacttgaggtcatgctatttcctgttggggtcacgaggatgaattagtgattagacacttaggtgctggactcaaagggacctggctccatcacatgcaaactttttgtaaaagaaggtacattgttttataatgtgcgtttttggttgaatattaaactaaaacttgagagcaatctagctcaggtagacactggtgtcctgaaatcatttgcaatacatttaaactaagatatactagataaagatattaaaacaaaagaaaaggtttagattttattccatatttcatttatatttttaccaaacacctattgaatatctaatatgttctagggaatggacttggatctagaaacttaagagtgaatgtgcaaatgcctagaatctgttctggtaagaaattcacttcagtaaaaaacaatactaatattatcaataataatccataatgtgattttttaaagccaactcatttaatctattatatctatataatagattagattataatctagactgtataatctatagtctagattatagacatttaataaaaacaaattgaattttgtaaaaaaagtacttaatatacctagtaaagttttatatgccaagtttgtattttaataatatttttattttaataaatatcaggaagaaataaacataaaacataggaagtgcatgttcaggttatctattgtcatattacaaaccacctgaaaactcagtcgtataaaacaacaattatttttaaatttttgaacagctttatatataattgacatataataaactgcacattttaaagtgcacactttgataagcatacataggtacacacctgtgaaaccatcgccaaaatcaagatcatgaccgtatccacaaatttcatgattctgtaggtcaaggattagagcagccataagcagagagtttgtccctgatacacgatgtttttggccacagctgtagttgtttggatagctgggggctcctgggatggctagagtgggatcatatgcctggagtcttcattcttctccattggatgtttgctgggatgagaaggtccaagatagtcctttgataatgtgtcgtggtgcctgggctgggatggctgaaacacaggagacctagcagaaattctctatactcaccgccatctccggatagtcagacttctcactcggcagctggcttcccccaggtccgaagttcaagagactttcaaaagacaggaagtgaaagctgccagtctctttcagcctgagcccgagacactggcacagttttacttccactatgctttattggtcaaagcagtctctgagcccacccagattctgggaaagaaggacattgacaccacctcttgatgagataatgtcaaagaattttgaccatctttaaagcaccacaacgcatgttggatattctatattcctgagtgaaagaagacttcaatttggtcacatgaacaaactatttctgtgttttacaagggcaatagtagggaaaggaggtggtagtaatatcagaatttccatcaactcttctgtcttcgttgctgtttatcaagtaatgttcttcaaacaaactggagttgctatgccttgatatggtataaatgagtgtgttttggatacaaatacacatggtaaaggtaatatggtaaataccattgtttatttatattatttatattatatttatattgtttatttatattaatggtatactttagccaagtaagtttttatcaagattccaaaatattattgagacataatcaattcagtaaaaaactatttgagatggacacatcggattctagtgatgttactcccccagggtcttaccctattgggaatctattgtataactcacatataactgtacctttggccaggcgtgttggctcacgcctgtaatcccagcactttgagaggctgaggtgggtggatcaatgggtcaggagatcaagaccatcctggccaacatggtgaaatcccatctttacaaaaattagctgggtgtggtggcacacgcctgtaatcccagctactcggaaggctgaagcaggagaatcgcttgaacccaggaggtggagattacagtgagccaagatcgtgccattgcactccagcctggtgacagaacaagactttgtctaaaaaacaaacaaacaactgtacctttataaaaattccatcttttaaaagtctataaatggatctgttacattttaacaaactactagaggtaatttcaaatagatcacttcaaattttctgaataaatataatctgttgtgaggatagcatcttgaagaaatgttatcaagccgtggtaaaaatatatctttccttatatgttcaaccaccatgtgaaatgtgtgaatctagcataaaatgcagtaaaaaaaaattttttttaagtcagtgaaataaactaagtaaatttttcaagagaatgtttttattgtgatcttttgagtagcacaagggaaacacaaagtataaatacggtttttatacatggaaaggggacacgtgactcatttaagaggagctaaataattattaacaattgtttgtattatttaaatatttgttcaatggcagtggctactacttgtaaagaaagagataccccatatcatccttttggattccacttaaccataaatagtcatcttggtggcccagtggcccttgtttcataaatttctcactgtaccaccatcctaaaacatctcttctggctaaagcacacaggaatgcaaagaaggaagatagactctttatgagtgcacatgtccttgcatacctgtatttctatatcagggagatcacaaagaaccattaaaaatgtaagccatttggaacactagagctagaggagtggccagatggtaaagatcttgatcatatagtacatctgaaggtgatgtataggggcaggaagtatctgccacagaacagagtttaaggcagcgacattccttgggagagaagtggcagcactaaaaacaagcagtgaaagcaccacatttcctttgttttgggtatcttatacctttggttactgaatgctaaagtcaaatctcacgtctgtttctttaagaagctcatgtcaagatttttattattattttttattttttacaaggttatatcatttccatggagttggg

SEQ ID NO: 1882318 - DNA, 4001 bp, Homo sapiens
ggcttggggacaggggttcgccctggacactgcgggagggtgcgggatggggctccgtggggatttgcctagaggcaggggatgccccaaatgacccctgtagggcccgcccccaggcagccacctcggcagcaccctcctttcctatgcgccctggggcctcttcagctctagagacaggaggatgactcaacacaggttagtcaagacccagggcagggaagcccaccggggaccacccgggggagccccccagcctcgcgttctgcccccgctgggaggcccgggcgccccgggggtgagggcggagggcagtgcggcggcccggcggctcttggcggcccctctctgacaatctttcctttgtttgttttcttaaatctgggaggcccgaattcctgccggattccgtaggtttcactcaggaaggaggcgcccccacccccaccccctctcacgtcggactcggctgcagggggaatggcaggttcttcccggaggccagcggcgcgcagccccacggcccgggcagggcgagcgggtgcccggcgcggcggagagtcccgggcgcccttcccgcgcgcgccaccgcgcagccccgccggagggccgcgggcagcctcggcagagaaaattacaagaaaaaaaaaatcaaaccaggagcgctttaaaacacacaaagagtagccctccctccacccagcttcattccacaccccatccacctctcacactcccccaccccttttttattttggtctccaaacttgagcctcattaatttccaaaaaaaatttcccccaataaaaggcaaacatggaaagaaaaacaaactattagaaaatagaggagggaggaaatgttatttaaaaggttagcagaccgcatcattttccaatgatattatatactcccagcagtatccaaaatatatatgggccctgggccaagaatgtaaaaaaacttttttttgaaaaaacccttacttagacacaacatctggaccggagagcgaacaaaccccccatttatcacacttaatcctccaatgaagcaatcgacagttgacttctgttttgctaatttagttgctttcaagcgccggcccagtccagaccgggaattaagtgtcacttgcggagggcctgccctgcccccggccgtcttcgctccctcccgcgcccaggctctcggatagggaaaaaaggccattaatgaagaaagaaactttttacgaattccctttacccccgcccactcgggtcagtgaaaacctcgactgtgacctagctctgtcccccgcccagtacccgacacccacttccttggcagccacgcccccacccgccagctgcctccccccaagactcggtggagcaaggcctcagcaggcacaaactcttgcagctccaggaggtcacccagctcaccgccttctccgcgggttggctaggtgttgtcatcctcgtacctggcactgcctggtggcctggcagcttgacccttaggcctggagaaggcaggggagggtcgtggtgcttggcggtagggagcttccattaccctcgccccggaagtggatgagaggcagcagctcctgaggtggaggcccttggccagcagtgtccagagacaatgggatcttgtgagattgcaagcgggagagagaataaatcagggaaagtgtatcatttgaggattagtcaataaatccctgggaccctggcccagtggggctggtgccagaggcagggctggccccaagtgcagacttccttcctcagcaaccttcccttcccttcccagaggcctcctgggtctctctctcctcacctctctctgtccatctccatggctcctctcctaaactttggagcccaaggcatagccttttgtccttcctctcccccttgctggaaaaagttctacaacggagcagagaaggtttgaaggtgtcctcaggcacctgcaaacagaagaggctggagaatgtgtcccaactccagcctgcccgctcctgttcactctgatccagcccaccccccagtccgcagctttgagccctggcagagtccacaggaacagcctgcactcctaaaagaggcccccagtaccctgaaccccagtcctctgcaggctctcatggtggtctggctgggcctcaaacttcttgggatggggccctgagttctggccgcaatccaaatgcagtctcaaacctcctgagtccatcctctaggcccatggaagcctcgtatctggagcaccctccatactcactccaaagggcacttatgagggcatttagtatattccaggcagtgtgctagactcaggacatttggagactaatgaaactctcttcctgcccctcccttggacctaagcctctactgggttttattttctgttcatatggggataccatattacccagctatactccttccataaccagttattgagcacctgccatatgccagacactgttctaggcactgggggttcagagctgagcaaaggccatttctgccctccaacttgccagggagacagacatgctgacaattaattccaagactaggccaaaaataaggggccatgggaggcatttataaaagcctcagaggagggactgactcaccttggctgggatagaaggaggggtgttggccgagtgcagtggctcatacctgtaatcccaacactctgggaggccgaggtgggcagatcacgaggtcagaagttcaagaccagcctggccaagatggtgaaacccccatctctactaaaaatacaaaaattagccaggtgtggtggcgggtgcctgtaatcccagctactcgggaggctgaggcagagaattgcttgaacccaggaggaggaggttgcagtgagctgagattgcgccactgcactccagcctgggtgacagagtgagactctgtctcaaaaaaaaaaaaaaaaaagaggggggctgtgatggatcacagtgtggtgggggtaacctcatcactgtagctcttaaagcccatcctgggggaccgtacagcctaatggttaagagcaaatggtgtggtttaacttcctgctctgccacatcagttgtaggacctagggcctcttagtctctctgagcctcagtgtcaacatctgaaaaaatgggactaacagtaggaactgccttgtgagtctctgacacagtaacatggggcaagcagctggcatacagcaacctctgactgaatgtccacttaattagccttctttcaaagtattcgaataaactagcttgtagcctccttgccaccctcttcttgtcctcctcctcaacttgagggcctggcacagtgctaggcacatagagtaagtggtggaataaatcaatgggtacaatagaaagcccatcaaaccttggctcaagtgctgctaggtagacaagcagtgggcctgaatgttccatttctttgttctgatacctggccataggctgggtgggccacgatggctgttcttcttgctcccacatttccagaagtcaggcagagtatgaccctctgaagcccccttttctctgctcagtagaaagtcaagaaatgtcttctagcctggagccatcattctgtgactctggtttgggctgagtcttgacttgctgtgtaaccccgggcaagacatgtccctctctgggccttggactccttataggtgaaatgagtaggttggactggatgctttccatgctcctctgcagcctttgtgtttgatgtctgcttcttctttcagctgggggaacctcatcgtccttgccagagcctgcttacctggaggtgtggttttgtgctctcccatttcccatctgcttcttggcttttcttttcttttcttttcttttcttttctttttttttttttttttttgagatggagtctcactctcacccaggctggagtgcagttgagcgatctcagctcactgcaacctccgcttcctgagttcaa

SEQ ID NO: 1882319 - DNA, 4001 bp, Homo sapiens
aatgaagaaatcacccatcttctgcatcgatctcactgggagctgcagaccggagttcctactaggccatcttggaagagtccctggtttttcttcttgtgctcccatgtcctcttatttatcactttaatgtgattatttttggtatttcattattaagtattatattggctttggatttctaaaaaatacttgttaccaagttaagaaagtctgcttttcccttggcacaccaggaattttaatcaaaagtaacgttaacatttataaaatgtcctttagcatctaccaagattacattagcatatttcctaaatttgaacaatttttgtactcttgaataaatttgatcaggtaaagtgtattgctcttttagtatactgttggatttgatatttcataacagactttttatttgtgcttattagatagattggcccatggttttgtgacatatttatcaggtttattgtatcaaagttatgatttctatagctttgtaacaattaagtactacagaacttaactattcgtcagtatttggtaaaaatttctgagaaaatgaacatggcccagagccattttacagtattttttttacaaaagtttcaacttttctatggatattgatctattttggcttcctatattttattcaggcaaattggttgtttgtagtttccttaaaaatatctattttaaaattttatactcagaaaagtacaaaaattttatttaaaaattataatttcctttggttataccttttctgttttctaatattgtatttgtgttctcttaggtttcctttggctagacttgctagggattgattggtttgttttgtttttataacttttcaaatacaagatcactgtttttatcaataaattgtaatgtttggctttctcatgtttaagtcattgcttttacattcttttactttcttttgatttattttcttctttttaatttcctgagttatacatttatgttattttaaacaaaatttttcataaggtaagatttggttacaattcacaagattatattatgttatcaggattcttttttcctctttgatacaagagttatctagaagactatttttatttccaggtgatttttagaaatgctttattttgatgctgatgtcagtatttattgcatggagtcaaacatatatttcctatacaaaattattcattttcaaatatatttctaattatacaagtagcacatgaatacatttttattgtgaaagatttatataatgtagacaaaactatttcctctaaccccatctctagtggcaacattagttactggcttattgtatatcatttcagtctcttttctattcatctgtgtcctctcaccaggaactggtaccatcctgtacttactgtatgtagcacactgatccatacatgcataggcattgctcccacctgcaggctgctgcctagcttgtggctaatacggggatatagagaagccaattcatctggttgctcctgctgaagtacaccaactaatcaccttcttgattacttctgatgcactcctgctcattgtatctgccaacccagagcatgaagtaactcttttatagaagtttttcctgcatgcagtttgaccatacatttctccttcaagtgattgtgttttcatctttcagttattcaacataattttgtgtagtcagtattcatttacagttaccaacacatttacccatccagtattcttcattccctccttgaatttccatcttttcaaatgagatcatttttacttttgctagtagaaatcccttcagcatttcagtgtaaaactcctagcaataaattatgtgaatttttgttttttgtttactttttgcttctttttgttgcttgtttgtttgaaaatgtcatcatttaacgttcatttctgaagattgtttttcacacgttggcctttagtttctttcagtactctagagatagcattccattatcttctggcttctattgttgctattagagacagctgccagtctcattgttgctcttttgtagataatgtgtcttttttcttctggctggtttttccatcttctctgtctttggttcagcagttttattgtgagttgcataattgtggttttctctatacttatcctgcttgagggtttgctgagcttcttaaccagtgggttaaatgtattttatctgctttagaaaattcccaaccattatccctttgaatattgcttctgctctatttctttctccttgccctctgaaacttcagttttacatggtagacctttcatacttgtcctgtatgtctcttacatttgtttcttattttttctctttctttttttcttccatgcttcactttgtatatttttcattgatatgtttccagttcacaagtcttgtattcaatagtgtccaacctattgttaaactcatatattgagtttttaaatttaattttgaaataatttactttgaaatatttttatcagaaaagttgcaagaacagtagaatgaactcccacattctcttcatccagattcctcagttaatagtttcatattttctccatctctttttgtaaagatgatagatagatagatagatagatagatagatagatagatagatagatgtgtattttcaaggatatgataccttttttgaatattttgagagcaagttaagcaagttgaaacctttatgtcctatcatctgtaaatattcctattactacttctcccaaagacactctcctacagagtaattgccaagcctttcaaatcagaaaatggacagcgataaataccagcattcaaaccacagttcattattatccaacgttccaggcttatcttgaaatttctctacctccatccttgaatcatccacttttacaaggagtccttgttgtttgttatggaaattggaacctacatacttgttattaattgctactggggtgtcattgcacctaggtcctctccatggtcagaattttgaaatatatgtatgtattcatggatatgtacacagacatattcacttgcattgataattttttttgtttctttcctcccttccctttcactctttccttctttccttccttttgctctttccttccttccttcttccttcttaccataacaatagcaatgagttatttttttcgcttccccttttcatatttgtaaatttgttttcccacagagagaaatccagcttccattagcttcaatatagatactttcttgatcaatcctcctttacataattaatttcctaaaaatgctaggtactgccatggccaactcatcactcctgatttcatctccaggcaagttgtcacttttgaactcttctccccaccaaaccctggtctgtttgatatgccactgcctccatgcccctgtctccaccttctggctgttagacacattgttaactgtgcaccccaacttactcttaccttcacctccctggtgcttcttctgctgagcatacaactgccaccatatgtaccccctatacatgcttccttggacaccaggcactctgctgcctccacatggctttcccattatgacttcttttgcccctatgcacatcactatctgtatgcccgccaccctactttcttggctgttggacacactgctatctctactgatcctttccactgcagttttctccatatattgatttcttaactgacgatagtatattttttcaaatttagaatgcctaaagaaatcttttttataggttagttttactgaaaattgtccatttcctcatcaattttgcactttattttcttaaacatattcataaaaattatttgtaaattctcatttgctgattacaatatcttgatcatctataattgtgtttctattgtgtgtgtttttttctcttgattattgggcaaatgaacttgatcttccacatctagtaatttaaaaaat

SEQ ID NO: 1882320 - DNA, 4001 bp, Homo sapiens
aacttctgattgcttctgttattttcattaaaaatggaagccaggtcatccactgagagtgaggatggggaaagagctgctagagatttggcatagttgtgtgtttttctccatctatgttcagttggatgtaatgtaagtgtggagtgatggaaagatgcatataaccatggttggaggttttcctagcaaattcgacaaggcaaaggaggatgaagtgtttgggtgtgtattcaggggagaaattacagtgaacaaccatggaattttaggtgggtaaggagagatgtgaggaactgggggcactgagagacagtgagaaggcggtactgtgaatggattggtgaagttggagaagtagaaggaatacattgcaaaaacagaagctgttggtcagagaatgggctgcttaaaattgagattctagaaaggctgcaattggtaatggcaaaggctagggtatgtcaatggaagtgagtagggtgtaggacaagatcctggaagttttttacactgaagttgctctatttaattcatttcttttttcttaagaattttctttcactgaaactcctcaattaaactcatatttcttgcgagttccatccatatggatttcaaatctaatgaaaatttacaaagccaaattgagtaaggaaggagtttgttgagtattatttcaataattaagatgtgttcatatcaaagatgacctaatcactcattaaagtccctaaatatattagacagttaaaaatttgttatttatttgtttaatatttggcttcatgctacctttataaattattatctttaatatcactcttctcaccatcatctattgaactatttatattcttaagatattgtttagtgttgggcagtcactaattattaggttgtgaaaatcagataggagatacctaattatcaaaaaacgtgaatgtattgtttatctgaaacaatggagaaagtcctgttttatacttgacaaatcacagaactataagttaactttgaagcatcagggcttcaggtcagttttggatgcttagaaaaagttgaaggtaaatcattgaatttatatgaaaaaataattacaaataatttaaagtctgagactaagaatgagacttactgctaaggagaaaatacggttattgatcctaacctgaccgactttatgtcagtcttttacattgacatttgattgatataaatctcatacaaccccaaattttggattagcttttttccaaatgatttccaatgaatgtgaattcatatatatttctaatttacatgtatgtcatataaatttaattttatgactgattctgaggttgttaaaggtctctaaggcagaaactgttatctcccaattatccttctcctttctttaatataaatacctgattttgtcatagcatttttcagcttaaagactgcattttccaggcttgaaagcagccaagtgagctttgggactaggttggggaattttaggtggttcttcttagaagtcttctttaaagtgagcgtgcatgcccttcttttctccctctgtctggtttcctggaactcagatgtacacgtgatgtctggagctctggtagccatgttgggtgatgagatgaaggagttactagcactagaattgggaaagaagacctggaaggtgcctgggttgctgaagagctcttgaagccactgcatcagcctggactgctgaatatcagttttcttgatggaacaaaattttatttgtgtaaatcactattttcgaggtctctcttagttgcagcaaaattcaatttctacagataaagtaagaatcattcgttctcatcccacccatatgtcttttaaagaaatttttcttttattgactgctcttctgttacctcctcatttctctataacttcctaggaaaagacaaactttgggtgggccgctgttttcatgtacaaggtttctagccacttgtcttggtgttccacatctatgacagcagtttgatctcattatgaagtaacagctcaaacagtagttctaaatgagggtgagggtgggggagttgtagaatcattttggggagtttttccaaactacacattcctagctccattatctctgcagagattctgatattcttctatcagctcccattcgagactcacttatctgtagcacatccgcaagtgtttacttgcttccaattggcaaaatttaacattaaaaacaaaccaggaattctgtgaagtgaaaaactgcctagatcattacaaggtagtagaaaaaaggtatacatttttaaatattttgaaatccacttagaggctcacaaccttttaatttaaatgtgtcttgaatcttagtttgaaaagccccagtcaaatataagtggcctaatgtaagtgactatatattttttctccactagtttcttcctagaattcctcctttagaaatatggggagaaagtatggaggaagacactgggctgtatgtctgtcaaatcactatttttcttttcgttatcacactttcagtaatatatattaaacactaaatcatatgtattgctgtgctaggtgctatatgcatttgccaatggcaaaacacaattatctcctgtttccatcagaagctcttccaggtctctgtgggaggactcagggtcttctttttactctcttggtgggtggcctgttgatttgggcttataccgctcagcgtgtactcattaggctaagctgtaattagaccaagactgtggcattccttgctttgtctacaagacatggtgatagaagagacaaagactggattatatatacctgatatattcgatgaagaagtagtgtgttcaggacaggtgaactctataaataaaaataatcaaaatagaattaaaaactgaaaagagagcaaggttacatgtaacaaggaaatgaccttacctcagaggtgtggcagcagcattgctgattttaaaattgaaaaagaaatcatagactgccttcaatgattagttccacaattagagaggaactaataggatgcaaatactatacttgtgtgtactcagagcattgcagaacagtgtcttgtgcaaaccatatgttcagggaatgtgtattattgactgattactttcttttaagtagtaattttgtgctttgggtgatactgaaagttcatttcaatctgagtatgcttttgatttaaaaaaatcttatttgtgtaactttaattgcacagtcttatattctttgctaatttatataagttgtgtgaagtccaggatttattattatggcattcagcacaagcctttaataaataatgggtggattaagtaagtacaaggaaaaaacctcagcatttttctgagatttgactttttaccttattgattttctttttaccttattgactaagacataagccttaagtactggatttgagagaatggctgtggttgtcagctatctacctgagtccagtctctcctctgctttagtgaagggaatactgccaggcaaatgctaagacttcagttcccattcttccttggcttttgagtgaaagtgacttgtgtcacatctgggctggctgaggctttttataagtgcacctgtggggttttccatgctcttctccagtttctgcccactggatacagatgataatgcatcactagaagataggacagccacacagcaggttgaggagagaggcccattagtatgaatacgagccctctgctgctacatatgtgagaaataaattgctattgcttttaactgactaaaatgtccaggtctattgattacataagtttattttaaccagtacagattttaacttatttatttcatatgaaaattaattattcaatcattaaaatactaatacataattaaagtagaaacagatatatactatgtactacaaaagtctgaaaaagtagctgatttaatgaccactttcaaag

SEQ ID NO: 1882321 - DNA, 4001 bp, Homo sapiens
gaagcccccacgcccaccccagcatagccctggatcttctgaacgttctctgagagccagctgtcccccagatatgcgtctaccacgtggaggctgggagggtagtccagtcactacggtttggaagaaaaagtctagaatcttaggctttaatctggacctggtctctaataacctgtgtttctgttacgctctgcctcaatttccccatctgtaaaatgaaaatgacagactgactcctgggcttcttaccagtctcacttgctaactgatcttggacaagttacttgacctctttgaaactcaagtttctttgactataaaatggggatgtgaatctatgccctgccttcctcactgggcagggtgaggagcaaatgctagggtgtctgctaaagtggtttgaaatcagcggctcctcatgactacaggagagtattattatgatcaaggacatctggttcaccccacctgggccaggccctggggccaaaagagaaaacaaagatgtgatctttcccttagccaccttctggtctgctggggccatggaaatgaccagcaccccattccgacaaggcgggagagctgaacccataggagccgaaaagattcagtaatgggagagaaacctgactactgtaggaggcttcctggagggatgaatcaacacagggaaatgaggctttttttcttttcttctttttttttttttttttgagacaagagtttcacaattgtcacccaggctggagtgcaatggcacgatctcggcttactgcaacctccacctcccatgttcaagtgattctcctgcctcagcctcccgagtagctggaattacaggcgcctgccaccacgcccggctaatttttttgtatttttagtagagacagggtttcactatgttggccaggctggtctcgaactcctgacctcgtggtctgcccgcctcagcctcccagtgttgggattacaggcgtgagccaccgcgcctagcccagaaggctttttaaagcaagccccatggggtcacttagagagggcaccagctgctcctgacccacaccaaaccccctgtctctttacagggctttttcattagaacacgtcctctcatttgatattgaagatagcccagttagtcatttagtcggcagaggagtcccccagccaagaaggcgcagcagtgggttccggacaggggcttttccctgaaatgcaggttcaagaggccaggcgcggcccctctcagcaccccctccgccatgcctgccaccctccccttttctctcctcgcccctcccctgctcctctacctggaggaaacacaaatgcagatggctcttttgatgtctctggggatcaaaggtttggctttggaagaaagatgtgctgcttgaaagccacccagagcctggtctgcacaaaagccctttcccgtgagcccctcccgcccggccctgggcgcccgcacctgactggcctcctgccgccccccccaccccagcctccccccaccatgcgcacacagcacacagcagggccggcgctcacgctcacctgaagcacgttcctcctctcttttgttggatgatttgtctgtgaaacatgttgtccccgctgggccaggcactgctatgtctcagaacaatgagagagagagaaagacgaagaaagagagaaaatgacagaggcagcgcgtgagatggagaaacgctggaagaaagagaaacaggtggacagagggagagaggatgagcagacaggggacactcacaggcgcacagaggagacgcaggaggaaaacccagccttaagaggagcagagaagcagaaaagggaacaggcaaagacaagacggtgaagaggagatggatgaggcatcaaagggatggagatgttaaaagataggccagaaatgaagagggaagaatgagatgggaaaagagggaaacagctgtagagactagaaaggaaggcttcctgagctaggtgcacgcagggaagctgagcctctagtcgggggcgggcagggggtggttcctgccatggctctgggtacccctaccctgccactgacagagtcccgggggtgggacccagactccccacagcccactccctcactgctagctccccccaccacgaggttctctcctcccgctctgagaccccacgcctcccaacccagatgagactgccaggtggcctccagacaacgtggctggacagggagggcctggagttagcagacctggaggagggaaggatccatggcagcttggtcaggaatccctgtgtctctctccacagaggagtgaagtctgtgcccttcccctccattagccctgaaaaccctccgggctggaaaccaggggaatgggggcagggcaggaaggcccgttccttccatgcaagctctctaaggcaccttcctgctactgtgtcctgagacatcacaaccaatttcttccaccgacccccacctacctcttgcctggcccttcactgtctctagggtggaaagacctagacttcctgaagccggggcccctgtgtcctctgtctccaccctctcaccgactggctaggtggccttcagcccatcatttcttccctctgagcctcgatttccttatctgtgaaatgggaaataagcacagtgcctgccccagaggctggtgtgagggttcaataagattaaggtggccatgtgcctaacacagcgcctgatatgggcaaaggagcagctgaggaggtccccgtcccagccatggccatggccatatccacagcagtggtagtgtcaatggctggcgtgggatgagaattctggccttgcccaactcacggggacagtatgaggcttataaaagctaaaggatggtaatcccagcactttgggagcctgaggcgggtggatcgcctgaggtcaggagttcgagaccagcctggccaacatggtgaaaacccgtctctactaaaaatacaaaaaattacccgggcatggtggtgcacgcctgtaatcctagctactcaggaggctgaggcaggagaatcgcttgaacccagggggcagaggttgcagcgagcctcctgagatcactccactgcactccagcctggacgacagagtgagactctgtctcaaaacaaaacaaaacaaaacaacaacaaagctaaaggatgggaaaggcatccccgccagcaatgctgaggctcaatgcggactcctgcagccaggcccagctggagccctagccatcagggcggcttctccaccagacacaccaggctcagccccagcccatggtactcctaggagcccacaaagtattctgagttgttttaaaatcagagggaagaaatgatcttctaagtcaacagaaatgttttcatatataatgtgaatatatttacctttatcccaacacaactgtaaaatgtaactttttacttttttaatggaaaaaggggtccatgacaacaaaaaatgcttatggcccaccaagtcctaatgtggtcctgtcagccacttctgctggccagggaggagcaggacaaaatgcactcttggtggctttaatagacacagccctgaccagaggggtgtaaagccatcctgggatgtggggctggggggtggcaggaaggagagacatgggtgatggcagcagagacacaacaaataagagattttgaggccctgcccttgggtaggcctgaggccaaagggcacatagtgccataccttagagacccctaatttgagagagaaacatattctctcctttggggagcccctaatctgaggcggggggtgcagcctgtcctgagggaaccccagtctgagagtggaacacagccctgctttcagggactcccagtctgagagagagagacatagccctgcttctgtgagcccacatctccaagaaaagacaaaatataaaactaaaacaaagcaagctactagtggtgggagggtggaagacatc

SEQ ID NO: 1882322 - DNA, 4001 bp, Homo sapiens
aatagtctcctaattcttagtccccttgaatttacttgcagcccttgctattttttgcaaatgcttctctgaacctgtatctccgcagtacagaacgtttcaagggcccccaataaggaaactacaaaatatttaacccaatttacaaatccctacatcatctatgcctccagacttatcgccgagaaagcaatgggcttgcatttgttgaatgattctaaccaaagattaaaaagacatgccaagcctttctctcaagtgacttactttctttgaaaaggtagttaaaacactagcgttgggatggactgagatatcccaagagctgattggagaatagtttttatttctgttttgctgagctcatggtaattggggaagcaaacaggaggaagtaagaggggactgaaattgttttagtctaggaagcaggtggaggaactgggttccaagctgtggagaagagccgaaacctggaggagtggaaatgaaacaaaaatgaaaacggagcagagagaccaagattggaagagagctttccgaactattttcaaatctctttcaggttgtaagagctcatttcatcaaaagaagacttatgtttgatgtttggtgccatagatgtggaccctttgactcagtgattctcaatcttggctgtacattgaaatcacaaagacatttataagatgataatttgcagcactcacctctggatgttctgatttaacggttttaggtggggctgaaaagtgtagtgtttaaaagctttcccctccccgcccccaccaccaggtgactcttgtgaagatgaaaggagattatccatgtgactgcactttacacaggactctctaaagattgatcttattgataggatcctatcttattgataggattactaaatcagtggccactgtatttcaaagcaaatgagagaaaaagcacagttatggactccgctagggcctaagctctgttcataataactttttcaactaaatcttgaagtccaagttaggtaaagaatagggtcaagcagcccaggagaaggaagagcatacacaaaggcacaaaggtgagaaatagcatattctgtgcagaatgcatttaattttctgatttattcaacaaccatttattgcatacttaatccatgcttcacactgtcctattcagtgggggcataaaagtgactgacaagaaatttacaaactaaagtggatttgacacagcaaggctgtcttctcctctggagtgcttgcaatggtgtgttggtcaagttgaactttaaaggaacctttaggagcaaacaaagggcaggaccttcctgtggtgaacttctcatgcctcagctaattcagagtcaaagactgaatgtcaggaagaaaggacttaaaagtccagtgtgatcagcttcacaagagaaaaatacatgagtaagggtctcatatacatcctcttattggcacactgcaaagtctctgcaatatgaaacagcattattattattattattattggctcttcaaagcaaatgttagtaaatcgagaaaaaaatattttaatacctagtaagtattaatcccacagaaactataaaatgcatttaatattaatgtattaagatttaaacctttattcacatcttcatatgtgcagtgacccagttcatccaagttttagtagttgtctgaaactctttgtagaaagatacataaattcacaaacacatatacaggattattgagattgtaactcttcccagacatgtttttttcactaaaaattttccacatttctaagaaatatgtgtatgaatcaagagtaacttaccaaggcagcccagggagaaccaggaccaaggacaagagacccctgggcactgagggtgttccataaagtggcaggagttgagaggtgaagctggagactcaaaaaccaactacaacacagaaattggtgcagtgatttgcaaatatggtcctagaaccagctatgtcagcatcaccgggaacttgatagaaatgcaaattgtcaggccaggatatatattgagccagaccccttgagggtaggatccaataatgtgtgctttaacaaaccctccaagtgacttgatggttgagaaccactagattagtggtccccactcctggctacttattgaatctatttaaggactatgttagttttctagggtggccatgacaaataccacagactgggaagcttaaatgaaaattattttctcacagttctgaagaataggagtctgagattaaagtgttcacagggcgggtttcttctgaagcctctcttcttggtttatagacagctgtcttctcactgtcttcacatgacatttcttccacgtgtctgtctctgtgtcctaatttcctcttcttagaaggacatcagtcagattagggcctaccctaataacctcattctaacttaattacctctttaaatatgctatctccaaatacagtcacattctgaggccctggggtttaggacttcaatatatgaattttaggggtgttatgaggtaacaccctaaatagctcagatcataacaagaacctttcatttagaaatatcaatatcacatgagaccaactgactctgaattcttaagggtggggccctggcataagtatttcttaaaagctctcttgtgagtcatatgtgtagcagggctgagaatcaggctataatgggtaaaaggccaaacagttgggcacatggcaggagatgtagccatcagtggccacatgctgcccagtaaggcaggtagaccctaccaggaatagagggtgctatgaggtagcaggaacccaaccatgagaagtctggcttaggacagcatattcagctaagccctaaagcaagagtgaagagactgagaattcaggtaatagcatagaggtgtgtgagacagccagtttataagacaccaacatcggaacgagtgtgaaagattagaactcagctgtaatccacagagctgatttgactctggtggcacaggtttgtgccagggtctcctggccaggaagctgttgccagggccagaggatatagctgcagaaacccaagagatggcagtgaaggaattcagagggcatctgaggcttttacaagacatcctaccttttaatatctcgaatacacatatctctttatagtgttttataaagaaagaaaacaagacaaacagcaataacaaaaccactgccctgaaggtaaaatgtatttacggtcttaggaggctgtgtgaggagctatcctattcctagtgagttcctggactttattttctgggggtgttgaggagtctcaaagagtaactcattaaacgtctaaccacttttgtctggtcaaagccaataatctctgctttgttatccttcagagagaggaagccagttgtgttcaaattgtcattattagctccatttccaacaccacaaaaattaaaggactgttgcaaagaaacaaatggaatccaggaagaacacacaatctctttgaaacctcctcacccctatccacccacctggcccagagatggaggaattacagggaacccagctgagtaataatgttgttgattccctgctaatcggatttttcttgagtccagcaacagtcaagtgtttacaagacttctcttttcaaaacaactcaaaagacactcccagcagagaagctagaaacgagcaaatcaataatgtaggaactgctactaagggttttcatctgcccagcaaggagaatatttatttatagaaaaactggccactccagtttagtgtggtaataacatggtgcagctagttcaaagagtggcatggttgaacacagccttgtattatgcccaccgtaaatggtctctatgaggaaaggcctataatttagaaagatttgccatggatggtaaagcccgggtcattgtaacagatactttttaccaactctatttgtggagaggg

SEQ ID NO: 1882323 - DNA, 4001 bp, Homo sapiens
ggttgagaccactgaggaaaggcatcctggagtgctaaagaggacgcgctgcagctggactactacttacttatgtaatggacagtgagacattctggaatgcatgaagagaacaaatagagatgggattcaactgccattgttggagtgacctgacaggaagaacaaaatttagaaagcagcccctgcttctctcctcttgctttctagtctctttctggttcctcttattgacagaacacaagaggaagccaatgggcaaaggagtttgggaaatatcatttgcaggcgcccagccccaatgtcacaaaacaaagtatataagggtgattttaaagctgagagggaatggattaataggaacacagcttggaacaaagtaggactcaagagcaggacattaatgatcagtcttgctcattattatttgagtcaggggctcatcttgactgtaaatatcagcctatcttcttcacttcttgtttctctttttaccccttcctgcatctggtagtttggatgatttagatccagtcaacaggactggaagcaagagaaaaggtccaatgcaatgagactgaggggggagttttttgtcagttttttgtttcctttcttttttcatatggaatgttattggtggcaacctggtggtaagccattccagaagaatggtaaaagataaccaagtcagtaattgataattagattctataccttccacacccctagtacaaccctccacccactttttcttatctcagcactctaaaactggcaagtttcttgactctggtgttgttaaaacaaagacaattgccaagcatatctgaaaaacatttgaaaatgctaccagctctatctccaattggtatgcagggcgggaggggagatgagaattttggagaatttaattcttagtgaaaatcactgttttgtaactgaacatggttctattaaacagcaattacccgttctgttccatcaaagcaatgtccttagatttttttttcccttaccagacatattgtacacttttctatagagaaagcagagaaagaacaacgttttgtcaacttcctttgttgtcttactcattttggatcaagaagaagtaaaatggcaaaacagacgccttgccccctctgaggttcgaactcaggaccttcagattatgagactgacgcgctgcctactgcgctaaggaggcaactgtctctcccgcttaaccaacggctctaccaagatgattatgaggcattttaataaggttttacgttctctgaattacagtgtttcaaaataaggcgtaactatgattcaattcacttctaaaacactttggatgacaaaactacgtagtacaaggcaggggccaattcctaaaccaacctcgttctcccacagaccttcctaaggaaactttaagggctgcgaaggcaattgagtctggactttgcgaaaggccttcctgtacggggccctggatttctcatctcatttctgggccaggaacgaggagtctttccctctatgattagggctttcgtagatgtaccgcctctgaaacgaagacaagacaaataataatgagttcactcttttcctcccttgtgaagttccgtggagacactcggtcccctgaagtggatgaagggcgaggggaggaggtctcaggatttttcctcgcttttcttagaagcaacaggctcaaaccaaacggttggccttgcttactcctgaagtcgagaggcttactccctggaatccaagtggatgtggagcccatggcgtcctctggcgctctcggtctcttcgacccctttttactgtgttgatgataaatggggcaggattcccctcctgcaccacctgcagcatcctgtccaggatccatctgggagctgagaagaagcaaagtgtcagggatcgggggttctcgggctatgctgagaagcaaggaatgctgaagaaggggcctgagggaagggcttatggtgatgtgggaatgggaatgaaaggactggaaaggggcgacagtcacttgggtgaaactgaaagcggcgacgcaccctgtgggtggtagcgtggccgagcggtctaaggcgctggattaaggctccagtctcttcgggggcgtgggttcgaatcccaccgctgccagtgtgaggtattttttttttccccctcgtcattctgacccagtaaagttccattttcaagccttgtgtgggcagttctcacagcttcctaagtgagacaggttcctcttctgttttcctaggggccacagataacacccatatgtacagtcccacaaacggtgcccaaatgtttctcgatttaggggctcagacatctcgtcccctagttattcccttcagtggccttcatgtgttttcattcactttgcgaaatttgtgaaccaaccaagggcaatcctaaggaaaaagtacaaccttcttaactccagactcaagaataaataagccacgcacgctcatctgccctattttccattgtcttctccaagggataaatgtgctaaggctgaaaaaacaaacgaaccaacaaaagaaacagtcaccagacacctagagcctttcccgcttcacctatcctcagagagcagtttaaggtccttagttgaacacagttgaagagttagcttttgagattctgttatcttcttaaacagtaaacatttttttcttttttttttttaagaaataaggtggaggctcatagaatagaaagaataacacctgttttagggaagaaggacttgatccgttatttacctggatctggggtagtttagaccatcttttaaggctaggagactcgaggagatagaatggagagtttttgtgtgcagggaggtgggtagatgcttaggagcactttacagtcgcctaggcagaagtcttctaatttcactgcttccttcctcaccttccaaaagatgtatccaatacatactaattgagcagatattttgtaacaggcaccttgcttgaaaggatgaatgccagcaaatgattccagggttccttagcaatttagtcttgagagactagagaggcacattaagcatagttgacaaataattaatattaagattgactaaagtagtaatttatatctgagtatttcttccagacacgctacgtatatatgtggtctatttgttatatgttgttctcacaattactagataaataaccatgttatcttaataaagttaagatttgaaaaaatgaattactacatccagcactataacatcctagtttggtcatccatactaaaggacacctatatgttgggtcatctggacgctaagatgtccacctgggagctgggacctggaaaggcaaaagaagataggaggaggaggagaaataattattcccttttgaacttgtaaaatttagcctagcaagtgaaggcaaaaaagaagtctaaagtctcccaaaagtctaagctgggctgtcccactgagtattcattcattcattcattcattcattcactcatcctttcatttatgcattcatgcaacaagcattggttgagcttctacaaagtagcagaccgtgggctatcaaagactactgagactcagccctgcacttaaggcattttggaggaatgcgggagacagattttaaaaatttaagcccatggttacaactgaggggcagtgccaagatactcggaggttgttctagaggcatctgtaggtatcgtacaatgaataaataagactgtagaaagtagatagtatattttttcttttctctcttttctccctttcaaaccgtgagactaaaattcaattcaccttttcgtgggctggaaacgaaagaaaataaaaatctccaggaataaccatattcccagatcagtatactgccctgccccgaaggatggaaagaaatctgggagaaaggcgcggtggaaacagtgtgtgagccctacccctcccatccctgcgt

SEQ ID NO: 1882324 - DNA, 4001 bp, Homo sapiens
atgatggatggacagatgagagatagataaatagataataggttaatagagacagatagatggtagataatgatgataatgaacttaggtatagatagacagtagatgtggataggtaggtagttagtaggtagatagataacaggttaatagagatagataatagatagatagataattaatagatagagatagatgagagatagagatgaccctggctttatcatttattaatatcatttcgacaaggcagagaccccagcccatggagaagctgttggtggtgtggctgaggtatgcaaatgtttatgcacacgtgtgtttttgagggggaagagaggaaggaaatgggggagaggaaagaagaaaaacaatgggacaaagcacccagggccgccattcacgggtccatgtgttaaataggtggttatttgaatagttgctgctgaaagcttctgctaccttccccaggtcaggaatgaaacacacaggccctggtggtggctctggttttttctggaattgttctactggaaactgctctctgtgaattgacggctaatgagacaagcatccggagcgaatgaggggcagtgccctcctcccgcgtccccctcgtgggctcctcccaggccgaggaagctcgctgcccaggcttggacagacccccgaacaaagggagccgacagctccacaacactcagcccatggggactgcagcaggtgagtctccacccagcctccctcctttggaccaacacgaactccggagacgtctgggtgcagctgcctcaggccctgctgtcttcaacggggactgaggttgcagtttagctggctttcctgttcctgcttccccgggtccccctcaaagaagccgcctgcaccccgtgccacctcactctggcatagccctacttctccaaaccaccaggcctgccctcccttgtccacgcagatctgacaatctccacagtgctgtgcagacttcagctccaagaagttgcaagtgatggagataaaatcccttcctgagagagtcatgaaccgtggcctgtttgaggtcaaaagaagaaatgagaacaaagccaagccaaggcttcggagtgagccctgagacacctctcagctggccgggtggccagagatccaccctgcaggagccgccccgaggcaggtgggccacatctcccaacaagcggcacacaagaaggcccctcgcaagaggaggcatctgtggtcttcccagagcaaaggcagcagccccgggagcccagccagtcactggccacctgcacgcctctacacagcagacctggccaggcgggcagtgcccctggccccttgcgaatagaacgttgtggaacaggcggaacctgggcagctgtcctgcactctggccagccagtccgtggatgctcctgccaggcaggactgagccactgccagtctggccggtgccagccttttctcagatccagccacgccctctctggatacggtctggacaccggcagaccaagcaggcagttgcctccctggctggctctgacctcctgcagcacaaggagaggatgcactgcactgccaggcctctgggcaccgagggccgctgctccgccgtttctttctgctaccgctaattcaaaacagggcagggagcagctaggcagcagctgggagagctgcgggctcctccacccggttgctggtgggctccatccggccgcaccgcccgcacctgctcacctccagctgcctcggccccagcggcacggacggactcaacggcgaccaccgcggcagctccccggggactcctcgcaggtcagctgagctttgctttcagtcggcgtgcacggttcccaaacgtcggtggtgatttttgtaagtgaggtgggggtcaccacaggaagagaggggaggcaaacctcccttcccgctgtgtcccgcctttcctcctggcggttgcgtttccacgtgtcctgcctgctgcccgccccagcccacactgagcaggaaggtggggcgtggcggggaggggagtggaactgagggaagcagagagggtggtgccattgcccccggcctagcttctgtttgatcattagtttcaattcaagaaaacgttcttttgagggaattttaaaaatgaatcacgtgcacctcttaagaaaaccgagtgtcacaatcgttgttaccacgcaggtgagaggagaggagggaggacgggaaagggaaggggcatgagaaaggcggatgggactgagcttctacggctccctggccgcggcgcacgcgctggccctccccgtccacagcagcagcggcatcctccccaccctacagcgaggaggtggacgttgccccgaggggaggagcgtgtcagggtggcttccaggtgcaggttctcgcgcaggcctcagccttcataggtgcattccgctctagaacattcctgttcatgcgtggtcgtcgctcactggtggccgcttaggtgcacttctcaatggcagtgcccagcacggagcaatgcctcggagtggcagtttcttcagtacggtccccacggcctctcccaaggcggaggatgctgccgccaaggaaactggctcaccacggacgctggtgagctatggagctatcagtgaggtgtggatttctcaggcctctggcgggagccggagtaaaggccctgagtgtctagaccagccagagtgtctgcgtgtaggtcagcaaatgtgggcaaatgtctaggcggtggtgtcctgcagggagccgaaggcccgtgggggacgtgaccaactcagcattccgctggaggctacaaacagcaaactgtttatcatgaatgcaggatgtgggcaaactcacactgccctgccaccaaaaggtttgctaacagacatcactccctagctccgggctccttaaagttatctgcctaaaaaatctagtgcctattgtccaaaaaatgcaagactactgtgaaccaaacggcagactgacaatcacccccctcccccagctttctcgctatctctttttgcctaataaatacggagggctgtgtaaagctcagggcccttgtccactaaaggcaaggtgcccctaaccccttcttccaaatatactctgttgtctcttgtcttttattcccgtgttgcccgcctttgttcagtccagtaggtccccaacaatgtcctgagggtatgaatcctgaaagactactctccatgaagcaggtatttaccaggttagtgcatgtttcctgggtattaagggaaaacagtaaaatgttctgtacgggggtcccggttctgtgtcgcacgagaagagtgtgtgtctttttacttttttaatatggctcaataaaattttaaatcacatatgtgactctcattgtatttctattacacaatatgctttttaccatgtcaaaatatcgggtggtttcaatcaaattggttagttagcaccgtgttcaagaaaaactcttcttttaggaaggtactaaaaggttcgttggttgggtttttttaatggaattatataacgtgttatcactaatttggatgcagaataggagtctgggggttggctgtaatggcctctgaggtcttctaagccttatagctctgtgatattaaacttggtaaaaagatgccaagagattcctagatgacaagccagaaagtattcgcagcccataaagtagagacaactcagccgctgtgaagagataaacatctccaccgccacgttcgtagtctcctcctcaaggcctcagttttgggtctggtgatctggctctagtcccccactccaggtgggagcttcgcaggcatgggctagttactcgagttccgggtgcctgcgtgacccatttgtaacatggaaatagcaaaagtccctccccaatgctatcaaagggtagtgacgcgagacaggagaagtgtgaagacgctttataaaactcagagtgctaaatactggggctt

SEQ ID NO: 1882325 - DNA, 4001 bp, Homo sapiens
taggactcctccagggggaattaaaaatggtatctccctttcctctgtcccattctcttgagtcatttgcgaatgagctgggaatgttagtccccctcttgtcttaaaatggaaaggttctggatgtagggccctggaatagtaattagaactaactttccccatccacccacccactacgtgacacaaactgccttcaaacctggctggagagattcacccaaatgcttattgtcatctattgcatcatcttctaggaaagaagaaaattgcttccatatctccatggccctaaatggtctttatctaatctgaccaaagtcatctcttggccttttgatgccaacagcattggccatccttgctgcacccagggtcaccctgaccaaacactctggaagtgtgcgtgattcatcaggtcccaccttatggaagttacaacagtagtatgggtaggacaataggacagagttacagcaatagcagtggccaacctgcattgcagagaaccaaaactgcaagttctatttccattctccatccaaacaaatactgtatttttttaaaaaaaataaataaatccagatatgccttccagttccttgaccttaatctctcactctggatctgtttagattctatgcccttcatgtagctatttacgacccactggtttactatctcggtctgatgttctagactctgacatctggtcaaatatttcatcaaatatttgatacatgaatgaagaggagactttaagactttcaaaaggataagaaccagaggctaggcatggtggctcatacctgtaatcccggcactttgggaggccaaagcaagtggatcacttgaggccaggagttcgagaccagcctgggcaacatggtgaaacctcaccattattaaaaatacaaaaattagctgggcacaatggcaggtgccggtaatctcagctactcaggaggctgaggcacgaggatcacttaaacttaagaggcagaggcagagtctgcagtgagctgagattgcaccactgcattccagcctgggcaacagagcaagaacctgtctcaaaaaaaaaggataagaaccagagcagcaaactcaaccctgatacattgccatgtatctcagaaatatctacctggatgttaaaagggtaaatagaaagagttcacgctccatattcccctggttaaattgagacattataagacggatgtgggaaatagaagagaacgaattatgaggtgtgctggcccaaagccacatgccttgtggggaaacaaattctttgaccaccctcaacaacagtgactcccaacctccttggaattttggcaccctatcattatgtacttgatgatccagtcttgatttgacaacctccactcccgcacttggcatgaaaaaagttatgcagcatagatttatttcattttttcctaatgaatgtgaatgaacatgacttttattgcaagcattttatagcctttcttgaaacaacttgcatcatcctggctaaatggaacacaatttttcaaaaaaataaacttgagcagtcgtgtagctaacacaacactacagttagtaagacagcatgacagcaacagccccaaggaaatagacagcaatcctggtttcagtgagggagacaatgtgagagagggagagctcccagtatacctgaatatgttttctgcaaatagattcccgaacatgtcctcacatccttccagtaagttttccagtaagccttccagtgagcattcacttgagccagtttcagtttgttttccatccctgcaaacaaatgatcctggtctagatcatgctgaattggcactcagaaaaagataaacagagaccagtaaaaagccttggcagacccataatctaccttctctcatcagcccctcagagcacaataccttgctggaagtggaggagtgagacagaggttacttcggtgtctgggatcatgtatgtgccgcctggttttcctataaccagctctgacacttctgcctaacagagccatctacccatatctgaaatccctaattctaaagtaaagataacatttttcttggcttctttggctgatatctttggatagagcaaaggaaaaagagagcaacaacacggagaggaaagatgaaacaaaacatggagaactgtgtaaatgtatccccaccaaaacaagcacacttcattctacagagcacacaaagaaaagatcctggagttagaaaaagactctgttacagcggagtaaatacttgctgggcttttcaacaaaaatttctttgccctacagacaggtctggctgcctaatttctgctattaaacaagctccaacttgatctggacttcatgaggaaatgtgaaatttgaacctttttatttccccagcttttttccgtgctcccactttattttggttactgccttgacttccacccccaggtgctataactgctttatttcctcctgcccatagcctgttcaacacatggcggttgctggtccattttctcgaagcactgctttctgccatataaccgtgggtggcaccagtttatacaggcagtggcagtgtaggcaggaggcgttggtttcaacagggtgacagcacacagctaagcagccagtgccttctctgggcctcaatttcctcatgtatgaaatagatatttcctcactactagggttgttgaggggatcaaatgagagagcaaatgcaaagctcctggctcaggggcaagcacacagcagtacccgctaggaggatgctggccttccctctggaggtgacaaagtacctgctcctgagagttcaagtaactgggtccaaaagtgcatggaatttgagacaggtttataaaacagtgggtagaggatgaaggactcatgctcaggaagaacttctctgccctcacatcccactatcccagtacatgaacagaatgtgcttttagaaccccatcatgggctcagagggaaacctctgagaagattcaggaagccattcagccagaaaggctgaaggaaggcaaacagcagaactcagcactttcagcataatggtcaaaacagaactctgcagataaaccttaattgtaaaacaaaattggtgaaagaaaaatgggtgaattaatggggattctaatttaataaagttagaattaactactgtcaagttaaaaggaagtttaaagtcagtcttattataaatgattagtccactcagtcctctgcgggaaccaaaattctccttaacatgttagggaaattaaatttgttatttagaacctgtgataaatctcttacactctttgttggaaaaaactttaaatgcatcatttattgaaattaatcttctttcattaaataacctttgattccaagaaatagcaaaccttttaacttttaacctacaagtgaaacagccaaatccagatagtaaatttgagttaatttagctgatgatatggctggaaattttattctcagagatatcttagaagatacaaatctattattgttaatgtgagaagagcaatgtatatgcatattattatgtcaatcttatttggttgtagttttaaaatttagctagttattctcacagaatttttcataaagaattaagaagcctcctaggttttatttaaaaacttaataacataacttaataacataagctacatagaggtgaaaaagataaatgaaaaacaaaaataagtagctaaactacaactaggaattaatccaataaaaaaaatttttaatatacaaagctattttgcgaccttggtaacacctttttaaccaggtaaggaaaaaatagtttgactttttataaatatataatatttaactttttgctctttccagtttaaactttgcctgtttgaaggacattccaaaaatatttcagtacacttcttaaaaaccttctaatgcgtcttcttagaatgtcatatgttattgc

SEQ ID NO: 1882326 - DNA, 4001 bp, Homo sapiens
gctaatctcacccatgagcagtgtgtgttccaatgtggtagtatttaagggctccagggtgtcattcatatgtcctggtgcctgaaattccactatctcagagttgttcctttggattcttctctctgaagattctttttaaaaatgcagataaaccaggaacaacattatatgaattcatacacagaaaaggatgggggcttgttattactttcctctgacaacagagccccatgatatgggaagaaacgttaacaactgagaggcacacactcagatgttcatttcttcatttggtcatcatttgttgagcacctactgtgtgccacacactgagctagagcgtgtcgttcctggctgcaggaggcccacagtctgatgggagaggcacacatttccacacagtgcaagagagagggcccagggcacagaggagggaggcatggaccctgggttgggcattaattgctgagggatgtgatgtgactccaggctgggttttgaaaggtgaatggagtctgccagctggggagaggcaggagcggggtcctgtcagtttgttttctcttagttctttctgacccctgacagaatgtccaggcacattcctcagaaggtcacgaggccatagggctagagaaccctgcaggcccctcaggaggtcaccagagcatgccctctgcccagagactggggcactctccccgaactcctcaaggctactgctttcaagcagttcaaagagaaaaagaaggaatcattaagagaaatccagccaatctcatcactctgcttcgggaagaccttgttcttgggccaagatttagtggattcatctaatcctttcatggaaggaattaaaatggaacacctggctatttgctttatttttatctgaagccacttgccatcacttgaggataattatgttgaattttgtttcattcttgatatcccacacaaaatttcctcaactccagaaatcacttttccataattaagagcatagattctagagccagattgcctggacccatatcctagttcagctacaagttatgaaccttattcctgcctcagtttccccaagtgtaaatgaggataattattttttctactccattgacgtgttatggggcttcagcaagctggttacatgaggtatttagaacaaggtgaatagcgagtgctcagtgaagactggctgttattcactcccttactgcagagcacctgacccggaactgtttgaattacaatatagaggaagtgccgtctcacccagcaaggcagtcagaacctaccaatcaactgaaacattcaccgagggccaattgtgtccctgtgggttctgttctagccattggaaatactaaatccaatacagagtggcccccatcctcaagaaacctacagcctggtgagaaaactagacaccatctcttccttaacatgcacaatggtgtggtttgtaccgtgctatactatgaaatgtcctcacagcccctcaacaggtacctggaacaggtatcatcctccccacttcctgcatgataataaaatgcttatcaggaaacaccgtttgcttattacgtgtcattggcaccttagcataggaggtcatctttcaataagttaacctagagggaaggggagatgttgtctaagtaggccctgttttcgtcctgcagtgatgggttgtaacgaactcaatgtttgtgttaggtttggaggagaccagcctgtctacatcaacatcattagagaccccgtcaaccggttcttatccaactattttttccgtcgctttggagactggagaggggaacaaaatcacatgatccgcacccccagcatgaggcaggaggagcgctacctggtaagtcctgtcgcatgcaaaaggcggtctccccactgcctgaggagtgggccctccaccagggaaggttcactcttcccttcccaggccttctccttggcgcctccatggagcgtggcgcagagagggtgcttccgcaggaaggaggtcttggcgagagaaactggttccgggtgacccagatcctaatgaacatttcctcaaattattttctgattttgctttgctcagttgtctttagtgctaggttttgggacccagagcgttaacagtctttcctaaggagtcctgactagcactgtagtgcttaagaagaacaaaggtgttgggggggtgtctgttagagggcggcagagccccttctcatccctcagcccattcagttcccatgaccactctgggagggggaggtgttttcagatgaggaccctgagattctaaaggttgtgggatttgccacagtcacctctcaggtaagggcgcaactgcgaccgactgtttcgggtttcctgccttcacagtctgggttctttccaccacagcgcgatagaaccctgtcattgcaccagtaattgtttgctttctctggacttgttttgggaccctcagctccataagggatgttagtctcgagcccagtaattatttccgcagcacagaggttggtaacaaaaacggagggcggagttgcgcgtctttctttcagcactagaacgaaaggtacatttcccatccctgtgttgagaaacatgtactgaggagctgacagcctggtgcccaggaggctgaaatcctggtctctgtgtctgagagagcccttggggttcacccggacccatcctgggctgttgtcgggcacaagcaggaaagtaggaagtgttgaggatcagtcagaggtgttgttcccaaagctggaagatcgcccagagctgaggccactgctgatgtgccgtcagcagcagccttgccgctggagaaaagcaccgaatctcagggccacggccaggacggctgcttcctcatctcattttaaaaacataatggaagtggatgttcagaggctgggagcatttggggatgatgtcccctcagtgtcacgttcatgttttcaaatccatgattagagtagagaaaactgagatacagagaagttagtgtctcagccagggccagacgactacaccagacccacggctttccactcaccttcggtatttgatcaactacctaaggcttcagtgaaatattttgatgattttatttttatttttattttcttcctttgatgatatattttaaaagtggcttttccctttttttttttttttttttttagtttttatggcgaaaccctaatctatttctttataggttatgaggccgggcgcagtggctcacgcctgtaatcccagcactttgggaggccgaggcaggtgcatcacttgaggccaggagatcgagaccagcctggccaacatggtgaaaacctgtctttattaaaaatacaaaaattagccgagcatggtggcgcatgcctgtgatcccagcgaattgggaggctgaggcaggagaatcctttgaatccgggaggcagaggttgcagtgagccaagatcgtgctactgcactccagcctaggtgccagaccgagactccatctcaaaaaataataataataataattaaataaaataaaaaactataggttatgaatatgactatatgttttttatttggtgagacgtgtattcagagtatagaaacactacaagaataatgtcttctctaattatctttattatttgttttggatcttgattaatatatctatatgctctttaaaaacagcatacattccatttaatccagacaattttttcatagttctgattcaatcctcatgctaagaaagttagaaccaaaggacagcagaaaatgccaaaaaaccaacaatacagaaacacgtcttatgaacactactcttcaaatattaatgtaagagttaagaggaatgctctagcttcttccgttctgtcaagcttctgttgccatcctgtaaatcatttcatataatgcagttttcacacactcacacaaataataagctgcaatcattagagaga

SEQ ID NO: 1882327 - DNA, 4001 bp, Homo sapiens
gccacgccttataattctgctgtttaaaataatgggaaacaggttctcattaggtttttccttggaaagaaaatgtgacatttcagtcatagattacattttgactttttttttttttttgagacagagtctcactctgtcgcccagcctagaagtgcagtggcgagatcttgactcactgcaacctctgcctcccaggttcgagtgattcttctgcctcagcctcttgagtagctgggattacaggcatgcgccaccacaccctgttaatttttgtatttttagtagaaagcgtttcaccatgttggccagggtggtcttgaactcctgacctcaggcgatctgctcgcctcggcctcccaaattgctgggactacaggcgtgagccacagcactcagccagattaccgatgtttttagtggcagatgactttccggccttgtcttagttttaatttttttttttgagatggggtcttactatattgtccagggtggtcgtgaacttctgagttcaagtgatcctcccacctcagcctcccaaagtgctgggactacaggcgtgagccactgtgctcggccagattactgatgtttataatggcagatgactttccagccttgtcttagttttatttttatttttggagatggggtctcactatattgcccaggctggtcttgaactcctaagctcaagtgatcctcccacctcagcctcccaaagtgctgggattacaggcatgacccactgtgactggcttagttttaaattcttaattatttaccttgtaaactacttaattccatttcttccacatctcatagaaaaactgatgttccaggaagatgtatcaccaatattctgctgttttgtatcctgccagtgcagaattggggctgtgcctctctagtttgagaagcatgtagtaacatacttgattttgccctgatcagtaacgtaccgcatgctgggagccgcagtctcttaaccgctccaagcccgtgacagaaaaacgaaatggaaaaatgacttaggagaattatcactattaacccccagaaacaacacattattaaaagcggttctgaagggctatttaaaagggaactcaatagtagtttcaaaggagtcctattgtaaggcaaaaattgtgctttaccttcccgcacaaccttccctaatgttttgggaaggactgatacaaacttttagtcctgttggcctgtgttaataatggccaagaggtccccaatgggtaacagagtcctgtgaaccaaacagtgtgagaagtcagaaagcagctgggtgtggcccccaaagcagcttagggggttacttaactgtgcggctacatttcttgaccatatactaaaggaactgggcctttccatgcgatgttttccttttataacggtggcaggaagcggtccctctgaggggcctgaccgaggtatgcgccggcgccaggctggggtccaaggggcgctccgaggcggggcccacagagagggtttagggcaattccaagggatggcggggacggaggaaaagtggcgttgaaaaggcaagagccaggttcccagccactgggacagtgaatttacagcttcagacatccaccaaagagcggctgcgtgggctcctaagaagtctaagaactgctcagaaatccagcgccgccatccccactccaccgccgccaggggcgcacagcagcgggtatgcggccggagggaaggggcggggcgggaggaaggggcggggcgtgccccgccagcggaggccgggaggaccaggaacccaggagagcatggccacgctgcgccggcttcgggaggcgccgcggcacttactggtttgcgagaaatccaacttcggcaaccacaagtcgcgccaccggcatcttgtgcagacgcactactataactacagggtgagtccggctgtcctcggcttttcgggccgtgctcagtccccgcgtgcgagagaggtttggggagagtgctaggcttcgcggggcggggccgccggcggtacgcggaggggcggggccctcgcccggcttgctgggagttgtagtctcttaactgctctaagccagtggcttgcagggctacaggactacaactcccaggatgcgccgggcgtgggggcggtacccagtctggagggagctgttgtcaggggcgttctggctgctcactcgtgtcaacccgccgaactgggagtgagtccagggagggattcgaggttcagggccgggaccagggagttaggctgtggggcagccacgtgcacctcgctttttccccaaatcagggcgggtctcgcgcctcctccccaccactgcctcctccccagcttgaatccctctcccacctgcgtacctgtggatctcaccagagcatcctgcctaggctcggcccaggaagcgactgattttccttttttttttttttttttttttagacggagtttcgctctgtcgcccaggctggagtgcagtggcgcgatctcggctcactgcaggctccgcctcccgggttcacgccattctcctgcctcagcctcccgtgtagctgggtctacaggcgcgcgccaccacgcccggctaatttttgtatttttagtagagacgaggtttcaccgtgttagccaggatggtctcgatctcctgacctcgtgatccgcccgtctcggcctcccaaagtgctgggattacaggcgtgagccaccgcgcccggccgaagcgactgattttctaaattggttgttggaactaatttgatatctgagagacttcaagaaactaaccttatcatgggggattaaacattttacactttaaatggatcagcttaataactcaggtttgactgagcagtgtttcagagatgttaagtggtgacctgatcagtcagaacaggctggtgtttgagccttgggacagtgatgacttttacaatgtggcaacatttgaagcctgccctgtttttaacacctattttggatgtcaagctcatcacagcagtcagggatgtatactttaactcgcctgttgcatttttctgtctcgaaaatgaaaacatacaggagcaccattgcttgcacatagattcttagtaattggatgtccataaattaattccttatgccccgacagatagtttgtttcattccaggataacaccagggtaaacaaatcaagggatattcaattatactatatttccttgaaaataaaatagtgaaaggaacaggacataaaatatacagcattgctaatttgcaaaagattaaatgcaagcacgagttttccattaaaagtattctgttcaatccccttcctgtactgtacgtttgaatgcagaaatgaaaaacttaagtagtcagatttctctttgcctgagataggtaagttaacataagagttttgttgcccgtgtttttatgttccagtgaaactcgtggagaaataacaactttcatgattttgtttcattcctaaaaacctgggtgttcatcttcatggaagtaagaccttgtttgtattacacattccaataggtttcatttctcattcctgaatgtgggatactatcggaagaactgaaaaacctggtcatgaacactggaccctattactttgtgaagaatttacctcttcatgaattaattacacctgaattcatcagtacctttataaagaaaggtaagaaaaacctgaaatggctgtgaacaaggctggatgaggaagggtagggagaccacatcacgatgctagggctgttgttttgtttcaaacagggcctgtggtatagtctgtgtggtcaggtgcacacgcgttctcccccgcattctcatcctgttctttcttgtaccctctttaggtggtggtttctgattgcaattggccacaagtgttggatggggatgttgtaacatgacagtatccgtccccttaaaatgaggattaatggagaggagagacttgcag

SEQ ID NO: 1882328 - DNA, 4001 bp, Homo sapiens
aacaaagtagaaaaatatgcctctcatataagattgagtgtttccattgatcaatataatttttaaaatgttgtgatgattctttttttcacttaattggctatgtcatttgcactctacctaagtgagatattaataaattgtatatgatgtaaataacaggaaacaagaagaactgctggccttattcatagttaataaagagaaccagatgatgaaattgtctgaaaataagccattttgtttattaaaaagttacttctgctccagggatccaagtaatagagctttgtgttttcagagggaatgttgccataaatcagggtatcacaacctcagcactaccgaggtttggggcagctgggtaattccgttgtgggggctgtcctgtgggctgtgggaggttgagcagcacccctggcctccacccactagatgccactagcaccccctccctcatttgtgacaaccaaatgtccccagggggcaaaattgccctcagttgagaaacactcctataaatatcatgtccatgctggggtgggtgtacttttacatgtacgggggactggcccgtaggtttggcggtaagtcctgggcttccaaattggcatttcccagtagctgggctgatgtgacagccttcggttgctcgggcctccaggcagaaagtggaggtgcaacaggggctgtttgcacgctgccttggcagagttggggtgacaggcacatctcatgtgttcacagacactgccaggccttctcagagctcatgacttgcctcccctttccctgcagttagggagccttttgtcttgccctcaattctccaaaataacccaaaaggtttcctttatctttaactctgttataaacatgttgacactttgccaaacaaaaacctgatgaaacatattctgaattttctactttcctacataaaaacttacaaacaacaggctgaaggaaagaatgtgtagagaagatacaggaagtgacatcataaagctggaggagactttagagctgagctgctcttggtcacgcggcacacagtcccagtgctcagtcaccatgtgtcctgcatggctcccatgttggacggcacagacggaacatctcgatcgttacaggaagttccaccagatggcgctgtctccagggacatctagggcacaggccttactttataacgaagtcctagagagatttatgttcacccggctgaagagaagcaacgagctcagggcagaaccaagactgggaagcagcccagttaaccccacgctgcgatctctcccgcacacaactgccttgtggcaggtccacacctggaatgccacatggggttttggccatcatagcctaagaatgagggtcagataggtaattaagagaatggaccaactctaaataaaatgttagtccagttcagtaaccatgtctcgtatacctgccatgtaccagaacttggtctggttatgaagttgaaaacaaacaaacaaacaaaaaccaaatagatccctgtcctagcagggcacacagactgggaggcactcctttcaatcccacgtagccatcccaaagataaagatgagcccagggcccagcctggggtggggaaggtggggaaggcgtgcttgctagaggagatagcatccctgtaaagaaggcaagaaacgagctgggatggagggagttgcagagcccagcactcaggggagcagacgggagggcggcctgaggattcccctgactgtggcttcgttccactcacctggctgtgcccggccaccccatgtagaggtccctcctcaaggcagcatgtttagggcaccgcctccacacagattcccttcccatcctgtggcccgcttctcatcctccacacctgtcttgctcagtgacgctatgctccatgcaggcttatgcttctggagcctgagaaccagcctccactcttctctctcacactctatatctaagctgttggcacactctattcctttttttttcggtaagttctagaacctgcttcatccatccccatgactatctttgtctcggcttccatcatctttttctctctttccctctcttctttttactttttatgttttttaagagataggatcttgctgtgttgcccaggctggagtgcagtggtgcgatcatagctcactgcagccttgcactcctgggctcaagaagtcctcccgcttcggcctcctgactagctgggactacaggcatgctccaccatgcccagctattttttaaatttgttgtagaggtggggtctgtgttggtctgactgatttttgaactcctggcctcaaataatcctactgccttggcctcccaaagcacagactacagatgagctgtgatgcttggtcttctttatacattaaaaaaaattgagatataattcactgccataatattcatccttttaaagcatacaattcagtagtttttagtgtattcacaaagttgtgcaaccatcactgctatcttattccagaacatgccatcaccccaaaagaagccccatatccatgagcagccactcctcatctccccttcccctctccctggcaaccacaaatctcctttttgtctctataggtgtctctgttctggacatttcatgtaaatggaatccaacaatatgtggtcttttgtcactggcttctttcaatcagcatgttttcaagtttgttgaaaggtttccatgttgtagcacacatcagtatcatcactttattccttcttatggccggacaatatcctcttgtatggatatagtgcttttgtttatccattcacgggtacataacagtatgcttttgtctgcccgtggacatcagggttgtgtccacttcggggggattatgagtagtgtgactatgcgcattcctgtgttaatccatttgggctgctataggaaaataccacagctgggtggctcacaaacaacagaaattcatttctcaccattctggaggctgcaggttcaagaaaaggtaccagcagatttggtgtgtgctgaggacttgtttcctggcccataatggcaccttctcactatgtcctcatatggcagaaggggccaatgaatgctctgggtcctcttttatatggcagtaatcccattcatgagggctccattcttatgacccagtcacctcacgaaggccccgcctccaaataccatcaccttgggggtgaggatttcaacataggaatttgggggagacacacaccttcaacctatagcaactcttgctcaagtgtttgtgtggacatatggtttcacttctcttgggtacgccttcatctcttcataagattggtgaatacattcctcagtttttcctgcctccagacttatcctctcaacccactctccaaccttttagtcaaatttatttatttattcattcattcattcattcattcatttattgagacagagtctcactctgtctcccaggctattcattcattcattcattcattcatttattgagacaaagagtctcactctgtctcccaggctagagtgcagtggtgtgatctcggctcactgcaacctctgcctcccgggtcaagcaattctcccgtctcagcctcccgactagctgggactataggcgcgcagcaccacacccggctaatttttgtattattagtagagatgaggtttccccatgttgggcaggctggtctcgaactcctgaacccaagtgatccgcctgcctcggcctcccaaagtgctgggattataggcgtgagccactgcacccagcctagtctagtttttttaaacatgtaaatcttttaaatgtgtaagttgtatcatgctgaaccctgtatgtaaaatctttccataactttccattgcactgagaaaaaaatggccaaagcttcatctggccttcctcttcaaccccgtctctgggggatgggggaggggagttggagatggggctggg

SEQ ID NO: 1882329 - DNA, 4001 bp, Homo sapiens
gatctcggctcactgaaacctctgcctcctaggttcaagcgattttcccatgtcagcctccccagtagctgggattacaggcgcacggcaccacgcccggctaatttttctattttatggtagaaacgggatatcaccatgttggccaggctggtgtcaaactgctgacctcaaatgatccgccctcctcggcctcccaaagtgctgggattacaggtgtgagccaaggtgcccgacctgatgtgcttgtaagaatttaaatgaagagggtcagtcagcttaggagacgaggttagatgtaaggatttcagacttgtcagtatacaggtggtgattgatgccgtaggaatgactggtattacccagggagctggtgcaaagtaggagccttggggaacatgttaaggggatgtgagagtaagcccacaaagactcagaagtggccagggagtaaggggaaaatgggatagaatagagcaaaagccacgggaggcattccttgaattccttggactcagatatgttaggggacaggaaacacattgaagacaactgaagagacttcagtgtgctgctgagttcttagcagagtagacagctgatttcaccactattccagaccctaaagatttctcctgaaattgcactgttatgcaatttttttccttctctattgccccacctctggggcctacactctttaccttctctgatttatctgacccatccgcatatctctgcaaagtcttaatgtaggtttccaggatttaatgattctttcaatcaactttaaagttcttcaggaagattctccaggtccgtcaacagttttccccttcatgactttgtgacaaagctttcttgttccactatccaggtgttcccaacaagttgctgtaacggtggcccctcataagcttgcctggaaaccctagaaagctcagaaaaattatgaactttgcccagtaagaggctgggaagtcagaaagggttttaaacaaaactgaccccacttgttacatgctcctttcactgtccaaacgtcaaccaaaggaacttttgtgacgctaagacgctcccggcgtcctcacccgttcacagccagagttgatcttagaaggcagggggctcgcaccgagacgctcctagcaagcccctcacgcgagcgaatgactggcgccaggagaaacgcataggacctcccgaagccgccgagagcaaaaggacccatcagagctgtgctgagacccgccgcgggccgggctcgcactcgagattctcgcccgtgggattccagtcctgagctgaacgagagataagtctttgtcaccccccagtctttactgtttcgagaaaccctaagattttttaaaaaaaagcccaagacgtcaagtcggggaactccaacattggggtgtccagaaacactggggtttcaggcgctctgtaaatgcgtccgaggtccgcggttctgcccgcaagcccagaccccggcctcacttccgccccgcgccccgcgccccggcctcacttccgccccgcgccccgcgccccgcgccccgcgcgcctccgcccgcccctgctccggccttgcgcctgcgcacagtgggatgcgcggggaggtggtgcgcggggaggtggagggcgaggggcggggctacctcaggtcccgcccgcggcaggcctgtgggctgcgaggaggagctttgcctagcttgcaggcagcgcagggcagacggcggcaggagaagcaagatgaatgcaggctcagatcctgtggtcatcgtctcggcggcgcggaccatcataggtgagtggccggcgggagccgcgcagagtccgaggcgcctgctgcttcggcaggagcgccgagggccggacttgtgtaggagaggggcgtatgtggaggaagccggtcaggccaagccgcgaggagccgcgggatccctggaaccctgcggctcccgcgttccctgacctggtgctacagccccaccctctcctctcccgatgtgcgcactccgtccctcgtgcttggattggctcccggggtagagccatcgcgtggcctgcctctcccattggttggcgtagggaggtgttctcctccggggcccctgattggccggctccgggaggcgccatcggtaatgcctgcggcaggggcggaactgctaggtggtctgagcccggctttgggctggggtcgggctgtcacacaatggctagaagtcgtgacttcgtctccttcgtgccgcatggttttcaacgcccttgacccgccggttccttttgtttgggaagcatggggtcgcatccagtccttcggatttggggaaatagaagggctacagcggcgtccctaggccgttctggaggtcgcctgtccagccctcggctgctgcgagttgtggcacccaccttgacctttgctcagaccagcaggtgtaggaacgtgtgggaggagagggcactgcctcctcgcgtggccttgccaaacagggtcatgaggctcccctgctcgtaggtggttcccgtattacccgcaggcttgtgatgtccacgctctccgcctttctattgtaggttccttcaatggtgccttagctgctgttcctgtccaggacctgggctccactgtcatcaaagaagtcttgaagagggccactgtggctccggaagatgtgtctgaggtcatctttggacatgtcttggcagcaggtaagtctcagtgattccaggagaagtcaggcttattagaaacagcccataaacacacacacacacacacactctcacacactcacacactctctcactcactcaagttcttgcctccttgcttttgctcagagttccctctgttatgattcctcctgttggcccccttcttccagccctgtcagtagcttctatccagcttgagactcagcttcttggccaggcagggtggctcccgcctgtaatcccagcactttgggaggcggaggaggaaggatcacttgagtccagaagtttgagactagcctgggcaacaaagcaagaccccgtctctacaaaaaataaaatagccaggtatgatggcctgtgcctcccagctactggagaggctgaggtgggaggatcacttgagcccaggagtttgagactgcagtgattgtgtcactgcactccgtcatgggtgacagagtgagaccccttctctaaacaaacaaaaagacttagcttcattaatatgctttttgtgaatgaacttagaccactgacctacaccacctacactgccttttcttttccttttttttttttttttttttttttttttgagacggagtctctctctgtggcccaggctggagtgcagtggcgtgatctcggctcactgcaagctccgtctcccggtttcacgccattctcctgcctcagcctcccgagtagctgggactacaggcggcccactgccttttcattcttacgaagcagggccggccgggcccggtggctcacgcctgtaatcccagcactctgggaggccgaggtgggcggatcatgaggtcaggagatcaagaccatcctggctgacacggtgaaaccccgtttctactaaaaatacaaaaaattagccgggtgtggtggcgggcgcctgtattcccagctacttgggaggctgagacaggagaatggcgtgaacccgggaggcggagcttgcagtgagctgagattgtgccactgcactccattcagcctgggcaacagagtgagactccttttaaaaagaagaagaagaagcagcagcagggccagcctgacgcataggaaagtatgcctgctcctccttactacctcaaagtgtcactcattcaacaaaaatgtattcagttcctcctatgtgccccatactgtgcttagtgctgggagtatggttccaacaatacaggtaagttccctgccctcttagggctcagttctgagcttggaaaataggtgccacatcatgcccc

SEQ ID NO: 1882330 - DNA, 4001 bp, Homo sapiens
aagacatacacatgtccaacaagcatatgaaaacatgctcagtatcactaatcgttagggaaaggcaaatcaaaaccacaatgaaataccatctcacaccagtcagaatggacattattaaaaagtcaaaaaataacagatgttagtgaggttgcagagaaaatggaatacttacacacggctggtgggaatttcaattagtttagccacagtggaaaacagtttagagatttctcaaagaactcagaactaccatttgacctaacaatcccattactgggtatatacccaaagaaataaaaattgttctaccaaaaagacacattcactcgcatgttcatcacagcactattcacagtagcaaagacatagaatcaatctagatgcccatcagtggtggactggataaagaaaatgtgacatatatacaccacagaatactatgcaaccataaaaagaatgaaatcatgtcccttgcaacagcatggatggcagctggaggccattatcctaagtgaattaatgcaaaaacagaaaaccaaataccacatgttctcacttataagtatgagctaaacattgagtacacacagacacaaagaggggaacaacagacacctgggcctacctgagggtggcaggaggaaggagggtgaggattgaaaaactacttattgggtactatgctcactatctgggtgacaaaatgatttgaacaccaaacctcagcaacacacaatttactcaagtaacaaacctgcatatgtacccctaaacctaaaataaaagttaaaaaaaaaaatttaatttaaaaaatacatatatagctctcctaacaacaataagcaatgagcaattaaataaaatgatatcaataaagatgaacttaacatatgttgaacatttttaaggtattattaatctttaccaagaaaaagggaaaaacaaataaaatgagacatgccacattcttcaaaaaataacttttaaatataaatttaaatgcagacatttcaaataattgtctgcattgtgtttggattgtaacaaatttatttcaagatttatttggtcaaattacagcttagaagagtcaagccattttcataaacgaataataagcaaggatttgctctggccagcactgaaatactatcaaatattactaagggtttgatttggggtcaagagcagtggctcctgcctgtaatcccaacattttgggaggcctaggcaggaggatagcttgaactcaggagttggagaccagcctgggcaacagagtgagacacccctgtctccacaaaaaacaaacaaatagccgggcgtggtggcctgtgcctgtagtccccgctactcgggaggctgtagtgggaggattacgtgagcctgggaggccgaggctgcagtgaacagagattgtgccactgcattccagtccgggtgacagagtgaggctctgtctcaaaaaagaaaaagagtttgatttgcatatgattgaaacaacattgcctcaaaacagaccctagtgtgttttacattacaacagtaaatatgaaaagaatgacattacaaattagtgtgtgatgaaggcctatttgttgaccagcgtgagaaaactgatgaaagatctagaaataaaatttgtcagtaaaaacaatacctaaaaaacatacattattataaattttaaattgattaaaaaatgtagagagttccagcagagatcccaggcctgaagcagcggcgaacctgtcttccccaccccacctcggtgacctggtggccgccggcacacagcacctttggatggccgcgggtgtgccgggcgggaagaaacacgcagaggctgctggggtgcagggcccgcgaaggcggagttagggagaggcctggcctcctctttaggccacggcgccgcgcagatgctgtcctcgggggacctctctgtcccaattgggtgagacctacctggtcctgatgacaacagacaacagccttaacggccggaaggtcagcgaagtcccggatgaggacgggtggaatggtagcgaccatggggcagttggccttccttctaccagacgttgatgtgggaaaagagaaacggagtaacaggacacatttagcgatttggagattcccatcacgctttgggaggatgtaccggcgtttataggagacctgcgtgtataatgtgagaaagctgctctcagcttcccccaaaacttttacaaggaaacatttgccacatctagcctttccagatgtatagaggttaccgacctatgatagagttagaaaatcacacatggaattttttaaattccatattacagagtaggtaatcagtatgtaattgtatcagtggattacaaaatctggagattatattctgagaatctatttttgccaacacaataagagccatatattacaagcccacagctaatatcataatgataaaaagttgaaagctttccctctaagatccagaacaagataaagatgcccacgctcaccacttctgttcaacatagtactgaatgtcctagccagagcagttaggcaagaaaaagaaaaaaaggcatacaaattggaaatgaagaagtgaaactgtctcttctgatgacatgatcctttatttggaaaaccctaagaactccaacaacaaaaaaagctattcaaataaacaaattcagtaaagttacaggttacaaaatcaatatacaaaaatcagtagtgtttctatgcactaacaatcatctgagaagaaattaagtaaacaatcataattaaaaaataaattaattaaaataactaggtgcaaatttaaccgaggaggtgaaagatttgtacacttgaaaactataaaacactgatatttaaaattacaaaagacacaaaaattgaaaaatacctcatgttcatggattgggaaaattagtatttttaaaatacctatactaccccaaataaagattcaatgcaatctctatccaagtaccaatgtcattttgtagagaaatagaaaaaacgattctaaaatttgtctggatccacaaaaatccatagccaaagtaaccttgaatcaaaaaacaaacaaacaaaaaaaaacgggaggcatcataatacctggcttcaaaatctactgtgaacctatagtcatcaaaacaacaggatactggcataaaaacagacacaaaaaccaatggaacaaaatagcgtaaaaatcaatccatacatttacaatcaattgattttcaacaaaggtgccaagaacacacaatggggacagggcagtctcttcaataaacggtgttgaaaaactgaatatccacatgttgaagaacgaaattacatgcatacctcaaaccatatacaaaaatcaactcaaaatgcattaaagacttaaacataagactattaaactactaaaagaaatcatagaaatgctccatgacattgatctggtcaatgattttttggatatgacctcaaaagcacagtcaacaaaagcaaatataaataaatgagattatatcaaattaaagagctcctgtacagtcagggaaacaaataaaataatgaaaagacaacctatggagtgggagaaaatatttgcaaatgatgtatctaataaggggctaatatctaaaatatataagaagctcaaacaagaaaacataattctattttaaaatggagctggctgtgttggttcacatctctaatctcagaattttgggaggccaagatgggtggatcacttgaggtcaagagttcgagaccagcctggccaacatggtgaaaccccgtctctactaaaaatagaaaaattagctaggcatggtggtacgtgcctctagtctcagctactcaggaggctgaggcacaagaatcacttgaacctgggaggtggaagctgcagtgagccgagattgtgtcactgcactccagcctgggagacagagagagactccatctcaaaaataaaaata

SEQ ID NO: 1882331 - DNA, 4001 bp, Homo sapiens
cgccctaagactcctccctgcacagcacctgcacccccactgcccagggggctgcatccatctccacatgactcaccctccctgtgcaacgcatgggggtagggagggaagcgccagtattatcagccatcagcaccctggggtgaactgattatcaggacaactaaaaacacacctaataaagccttggagacacatggcaagcaccgtgatggactagaagcgatttctaagctgaaatgctgctttgaatgcaatgtcagctggatgcttggtgagcagaaatagacaaggggaaatggagcaagcgcggcataggggtgagtgttgttctgattcctaagtttacctaagactggggccacggggtcgggtgtcccctgggacctacgtctcatgcagcctggggtccagagctggcaggaacaatggagatggggaccaaaggctgtcaccgctgctttttctcgaaatgcccgcccgggtcctgtctggggctcccgcctacgcgctcatcacgtgcacagcccaaacttttcagagccggcccgaggcctgcgggcccgggcgccagggtggtttttagggttttctttctttcttatttcccttcttcttctccacagttgatgattttctgcagaaaaacaactgcgaaaaagaacctatttcatttccagttcccatcaccgcgatttccacatggatgtgacgtgaccccagcttccgaaatgcccaggtgactcacgcggggacaccccggggcggggcgagggagtttctccgggcgcctgcagggaccgggcggggcggggcagcggggcggggcagggaaagggggcggggcggggcccgcaggcccggtcgggcggaggccgcgcgcgcccctcgccccctgcgccctctggcggccggctggacgcacttcgcagcccgacccagagagtcacgtgactttggaaagtcccgtggaaatccccgggcctacaacccgcatacaactgaaacggggcaaagcagactgcgcagtctgcagtcttcgtggcgggccaagcgagcttggagcccgcgggggcggagcggtgagagcggccgccaagagagatcacacccccagccgaccctgccagcgagcgagcccgaccccaggcgtccatggagcgtcgcctccgcccggtccctgccccgacccccgcctgcggcgcgctcctgccttgaccaggacttgggactttgcgaaaggatcgcggggcccggagaggtaaccgccgcgcctcccggagaggtaaccgccgcgcctcccggagaggtaaccgccgcgcctccccgtgccgtctgcctcgggctcaccgcagtcaagggctgcgggtgcatgttgggcagcgacccccgggctggcaccgtctacctggcgttggttttgcagcgctcctggactgggagtttgttggacgtttctgtctgggttttgaagtgctgggagttgaggtcactgctgcagaggttggagtgacagccctggatacctccagccagctgttcctttcagataatgcacggaacttaagctgcagctgactggtgaagaggcgcccctcgggccctccgatcgggtggtcgttggcgctttgctcctttcgtgtcttttttggagccaagcgttgcatgctcatggccacgtagaccttgcagaagcgctgcggctttttcccaaattgtgcaggaccagcccgacggggcgtagggtaccgcagtggccgccagcccggcggaggtggggggcttcagtcccagagacagcttcccagacgctcacgggtccttgcagggggctggggtcctggcgcggggttcagcttttccagtagcagcagtgtaagagaagtatgcatgtagacgtgggtcgctggcccctgctccagcccctaccccacggttagactgtctttgtcagctggagtcgtcccacatcctgccacctggcctctcagaaaagcagtggcattaagtaaggaaggagcttaactctttttgagcccgctttgttttcggttctcctcgcctcagatcttcttgccttggaaagccagtctggtcaagtgtctcagggtagcattttggcagaaccattgttaattaaagggacttctggaccgcaaccttaatgtaccagattattgagcagccaatgaatgcttcattctcattgtttaaggtgctgctttgatttttttttcaattctttgtactatttttgattttttggagaggcacatccccaaatttggatgaggtatttgttgataaataattcatcaatttccacaatgcagacaaaaatgtctgcccagagtggaaaaataaaacaagggggagaagagtttgagtaacggagaagttctgtggaatcctagtgacaaaagttgagaaactacctttaaataagacagtgaggtaacaaatgttaaaaaaaaaaaagttaagggtaatattgcattgtttgccacttataacgtatctgaaacatttgttctttaatcttaagcgtagagtggtccaagacctggaaatctgggcagtgggttttgatttctaaggaggcagttttacaggctgtgcaaggctaaccctaccaatgagatcacactggcgtatccgatattgacatttgcatgtcttgcctatggtttacagctctcactattttagatctttggtgaaaaatctttagattcagaagagaaaaataaaagagtcaggcaagcaaaaagagataacacctcatttgtttaaaatcttcctactgcccatctctttccatctgattgtggcaggcactgtagccacaggtttggtgttgtgggattgcaaggggcaggtattgaaagacctggctcctaggcaaaactttgcccctgaatggctgtgggatctgagcagtacctgtaactccattgccttagctgcagactaaggtggtagtgtaatttcagggaagggaataaggtcatctttgacttttagtcccatcatcaagcatggtgattggccttcagtaggtggtcaggtagtgcttgttgggtggatgggtggatggatggatagatggatggatggatggatggatggatggatggatggatggacggacggacggacggacggatagatgatattgtgaaagagacttttgctgtgccacaaaggaaaggtatatgtgttatttttatcctgctatgattttgcccaattccacctgtagaggacgtctgacatcaaaagagagcaccatctgatccagagaatgactcccactatgcctttcccagcaatcagattaagaatcccaatctaaaactatcaccagaaaactcctcaggagaaaccatgggtcatctagtccaacctctctcctttgagtgggccacaagaattatctcaacaccttatcaatggtgttgagagtctagacccacacagaagtagctaccctaaaatctaggtttcttctcctccctcttccataggtttaacatttttattaactggaaagttgccctggcaaataagatgttgcaggaatggaattaacaatcactgtgaaatttcctagggaatgtctttgtgctctgaaaacttcttcatcttcttggaaattaggaagtgtggccagacaccctactaagggctagtaaatcacagctggctttttacagtgttccacactggagagatcctacatcatgttaatttgcatcatcctgcgctgttggcatgggttgtagatgctggtctttgccacctttcctccttcatttgccagagtggcctcctggtggaaacttctttccttgtctacttctagattttcattccttctactagttgattatgcttaaagatttcagggtgaaaagccaggcagacttgcctctgtgttggtacctggagggtgatgataaaatttcattggcagttgagttaaaatgattgagctccaa

SEQ ID NO: 1882332 - DNA, 4001 bp, Homo sapiens
tcttgccaatgcctggctggtaccaaaaccacacgattaagtttgtgctcatctgtgataggaaaccttgccattcctcttacttagatgtggaaaagtaggaattaacttgttgcccttttgctaattaaatgtatgtttttacttactcagataggataaaaattgaacacgtttagtttatttcgcctaacttgtattcatttttaggtcttggtgcccagaccgtactgtttttcaagcaagaaagtatattgcagattctttggaggagaagtacacagaaccagttatcttaaatctggagaaaacttgggaagaaagtgatacccggacacctctgatatgcttcctgtccatgggatctgaccccaccaatcaaattgatgcattggccaagaaactgaaactgggtaagactagcaatctacaaaatgtagcaacacttccatatttttttgccccaaattttgcctttcgtaattttataactgattcttagaaatagatgtaaaactgaattcgaaaaatattaaacttattcctctttcatcctttcatacctcctaaagtgagggtatgatataggtatctttgtttagagaagaacatgctcatctagcatatagtgttttttttttgattggttgtgttttaagttctaaggagatagctgtattgcatggatagctgactaacaagaatgaacacacaatagccaaagtttatgttattgccatgtctatataaaattacagcaaagtttattttgtcacaaattaaaaaactataaccattattgtaatgcatagtagttagggattaattatttcattgctttcacttaataaccattcagtacaggcagtgtgctagatctggggagcacagagatgaatacaacacagctgggaaagacagacacgtaaacatgtaattgaaggcaatgtgacaactgcagtaaatgtttcatagaagtggctgatcacaggattcagagctactcggattgcctggggtataggggaaaacatcacattgatgatatttgagtaggaaattaaaaaatagataaaatttaccaggtggggtggtgggagatagaaagttactccagggagaggagatgggaaagaagttataaacacagaagtgtttataagtgtgactgagtcagtaggattaaaggacagggatgcagagcacatcttgacaggactgagccatcctgtaagaaggactttcttgacaggactgagccatcctgtaagaaggactgtttatcccttgcttcattcatactctgaaaatcggaatgctgttgacattggcatttgcaatcttctagggtcaggtatctgtaactataccttgtagggttaatccaatcatgtcttttgagtattacagtgattgattatgaatcactaaatctatcctgtgaagtaaaattacattaaatttattacatagtcgacataagcatgatataaaatcaattcagtcatgtccacgtactagccacatgtccctctgcataaaaccaagctacggtagcatggtccatgttcatgttctcttttctcatcttgacttcactctatttgttgtcaccacactgttctatattctcagtggatcagtgttcaaatggccacggtcttctgtctgaacactgataccaatgcaaagagctcccaggttctattggcaactgctcatggttaagtctcattcgctatcttcaaagtaggcagttttgctctagtatttactgcagcacaccagccgtctgagtttatctcagagtgatgcctctcgagtagccttatagtttgcaaatctctctcaaatctgttgctctatgagtgtttatccagctgcctctaagcctcacttctctctgcacacaggtatattttttctctcttaacacttaccattcttctccacatggcagaacatgtggcttctagtggctcatgggcttcactgcttacgtgctcagaatgttcagcaccctcagggaaactcctcttattgtcatggttccaagttccaatatccagggaagtaactcattgtctttgctttggtcatgcactcctttctgggccaatcaatgaactgtcgctctggagataggttcctagtagaaaccttatgtacagagctggaatgggggacatttcttagaagatacaacgcctagaagaaggagtattcaactagagttaccatttcaaatgttgtaatttgagaacataattaaaaaattcaaggtctcctttgggagaaattataactgacattaaatgaatgcagaagggcagacttgtgttatatcctttagtgttatcatactgctttgcttggcaatttggtggtttccgtttcttggtcctaccttactttttccaacaacaatccaggcttctattgattactttattagggtactggaacaacatagatttggctttaacactgaaggatcaaatgaattttataaacaattctactgccaaatcatttgagcagtattaggaagtctcaggctgcttgctgctttgggttgaaagtcccaaagatagctgttaaaatggaactattacacataccgaacaacatgttaatgtagtctcagctattaatattttatttgaaaatctggataataaataatcatagaatgcttcaggtgaatgtgactggaaatcttgaaatccaattacttttttttttttttttaacagttgggggaaactatggtctggagataaggccccagacctagtccgtggcagatctggttcagaacttatctcaggaaccccacttcagtgatctcattggtctttctttttcattccttctcattgttttcattgaatgaattaaccagctacccgaaaataacatacggatgggacagaatcaataagtttttgtagaaaaagaggagaagggaaactttggttatagatattgtcttgtactggtcaagatctgtagtgagaaatttggagcagataaactctgcacagagtactgggtacatgggcaaagtggagaaagcagatgggtttagcacgagagcctttctaggagcctgactactggaggagggaggtctcagaggaaggatgggcttaaaaagaacacctaaaaacaaacgaaagagaacaaatacataaaaccccacaaccacacaaaagtagtagtgggaaaactgatataacaatatgtacagatgaaacattttaacattttaaataataagagaatggctcataattatagtaataaattacaggccgggcgcggtggctcacgcctgtaatcccagcactttgggaggccgagacgggcggatcacgaggtcaggagatcgagaccatcctggctaacacggtgaaaccccgtctctactaaaaatacaaaaattagccgggcatggtggcgcgcgcctgtagtcccagctacacgggaggctgaggcaggagaatggcgtgaacccgggaggcggagcttgcagtgagtcgagatcgcgccactgcactccagcctgggcgacagagcgaaactccgtctcaaaaaaaaaaaaaaaaaaaaaaaaaataaattacagcatctcattaaaattggcaaatttatagaaacatatgaatttagaaaatttcctcagaaaaggtagaaaaccctgaataaaccaataatcaaggggagaaaaagtagaagttttaaaattattacatcagcaaaggctctaggcttggataattttctgataagtcctttaaaactttcaaggactctcatatgctatattctgttccaaaagatggaaaaagagaatacattttcctttttcttttgagacaggctcccactctgtcacccaggctggagtgcagtggtgcaatcatggctcactaaagccttgacctcccaggctcaagtgatcctcctacctcagccttccaagtagctgggactac

SEQ ID NO: 1882333 - DNA, 4001 bp, Homo sapiens
ccacctcggcctcccaaagtgctgggattacaggcgtgagccaccgagcccggccttcctggcctgtctttagcaaaaaaaaaaaaaaaaaaaaaaaaaaaaaaaaaaaaaaaaaaaaaaattatatatatactgttacatcagtttagcaaagaactaccctacttcttagtaatttttcagccattaacccccgcgctgatcctttgctgtaaagctccacttgttcttttgtatttggagttgagcccaatctcccctactgcaaaactccattatagtagtccccttgaataaaatctgccttaccatgtttagctagtgtcatgaataattttttctttaactaaaaaacacaacagaacagcacaaatcaatactaataaatgaaaaaacactaaagaaaaaaggtataatctaattggcttacagtaatggatagttgaaataatatgaattgatggcatataaccaattagtaataaaaagtaaattaattttatttcagatatgctctaaattccaaaaaaagcataggagaaggaagagacttcttatctggatacaaatattttaatgtaaccaaataactaaattttataaaacaagtatgaaatttaacctaatttatgagtaaaaacatatgccaaaaagagtaaactgggatgcatcaatctcctgagaatttgagacacaaatagttttaaacacatatgaaaatgggtacttctaataacaaataagtaataaaggaatgtgacttttagaaataagtccatttaaataccatctgtgaacaataaattcttcaaactctttcagagctgccggtggctggagccctgtcctccgaatggatgagaggcagctacccgccaaggcttcaggtgacatcacaagaaatggcgcggatccttattgccctgtgccttggcttccgcatcagcgaactccgccttcggtcttccaggcggcccgtactgcttagtcggtagcagtggccccaccagcccagccccacagtccctgggtctccagtctttcgctcctaacaaccctatctgcgctgtggcgctcgggcccaactcctcacccggatgcagtgggttaggggttgggggaacagactgacttgagctcggagtcctgagcccacaccttccaggccagggtcagtccaaggcagtccaagtttggagatccagtcccttctccgtttccagatctgcgaaattcagtaaagctatacccaggtgaccagtacgggccacgctgcactgagaatgcagagaatcatgagagccactctccttcctcgcgcccagatcccaacagccaccagaacactgcggatcccactctctgctccccaacgagttaccttggcaagtcaagaccccagccattgtcgtcaccaggggagagaggcagagggagatttggctacaaaaaaaaaagaagacaatgtgatcttgaatcaggatgctacgctggtgactttgaaaacgggaggaggaggccgggcgcggtgcctcacgcctgtaatcccagcactttgggaggccgaggcgggctgatcacgaggtcaggagatcgagaccatcctggctagtacggtgaaaccccgtctttactaaaagtacaaaaaattagccgagcgtggtggcgggtgcctgtaatcccagctacgggaggctgaggcaggagaatggcgtgaacccgggaggcggagcttgcagtgagccgagatggcgccactgcactccagcctgggtgacagagcgagactctgtctcaaaaaaaaaaaaaagaaaaaaaagaaaagaaaagaaaagaaaagaaaagaaaagaaagaaagaaaatgggagggggagctatgagccaaggaatgtccctgtagaacctgggaaggccaaggaaagctgcttctcctctggtgcttctggagggtgtcagacaccctgtttgacattttcattttggtccaccgaaactgattgcagatttctgacccctagacctgtaagggaataaagacatattgttttaagcaccagacctgggtttaagagagcttgagttgagtttagtgaaacaaattacccaagctgaagtagagagcgagagagggagagagagagacccataaggagatatttctgcccagtttccatttcgcgtgggtggcacacgtgacaaccactgcattacaaaaaccaccgttcacccaggagctatctttaaaatttaaaatggacatttcctgaatggctcacgttcagtattgtgaaattattgtttcttttagagcattttcatatttgtggccctttttttctttccttatatattccattcaccaaaaccaacaatacccaaaatccatgattcaagaccaaggaaggctttcgcccagtgacccacatcctcataaataccatgtcatcatgtcaggaaatttcaggcagaataaggaggaattttatttcaagaccattgtccatactgtgctatgcctttttctgtatccttccaacacacccaaacattaacctcttgattacagaaaaaaagactttttagaaaccaggaccccaagggaggggctttggcgacatttagcattttctgtcaaggaaacgctttgccataagaaactgtggagtgaggtggggtcagggggccacctgtgaccaattatcttcctggccagcaagagggcaggggactgagtgtaatcaggtgtcttccaagaggtggcaagtgtgccaatcagataatttaacttagtttcttcccctcttcacacaatttgccaccattccctctggcattagtcattcagctactgcctcacccactgtattttgtgtaactctgtaattttaattttggtattgtactatacatcctgatatacattttgtttcttagattttactttgcactgaaaaatccacctgtttttggtatacatgtacctctgcttcattagttgtgactcctgcagagcatgaaacttcacacaaacttgtattcactgcagtacttactcattctggtgatggacatgcaggttgccccaactctctgctgcctgaaattgctgcaatgactggattctatgaagccactacagagctaagctggaatttcactgatagacattcgtagaagtgggattgctgggtactcatcaaaaaggctatacagaaataaacacttgtttaatgcccataccgtgaaatctaagacctagattgttaagattaagatcttacctttatttcatgtagaaattcatacttgtaagatttttagtatgacaaatcaaaacacaggaagtacacctaactcacactggtctcagaaaaattcccaggggaaagtgccttgaggtaaagctaaaataatgagtaaacttatggtaaagaacgaaggatttgggagaatcatccaattgaatgaaaattagacagcatgaaatgtcctcccatagtaattgaatccatcagcagtgacctaaacctgtgaatccagagagcttacatggctctgtcactcccacaaccctcagagcctgatttcagccctttggggagagttttgattggctctagggctttctaagggatgcaggataaattacctgactttaacaccttctctgtggatttttctgggccaaatccacagaagtgaaacactagaaacttccttcttcagttctttgaattcagttttaagatcagtgatatttttctgtgaggaagctgcctctctttttagttagacagaggtacaaggcaggaaaagactttttcttttccctttttttctgtttccttaaaacacacaagattgagctcaggcattctctttatcaaactcttcctgtagctgaaagagggtctggctgattgtcacttgtagaaaaaagccaaaagaacaagaatgaggccgggcgtggtggctcatgcctgtaatcccaggactttggg

SEQ ID NO: 1882334 - DNA, 4001 bp, Homo sapiens
tggcttggattctggagatgccctgatccctggggtctcttccaaatgctggtaggaggtttggaaaccaccacccaattcatcttaccgagcctcctaatttccaggcttctaagctgccctattcaatcatacgttgcattagagcttcattgttatgaattcttattcattcattacttgtctgtattaatgccatctgccttatatttttaaagttcttagaaaccaaaataccctcctggtgttgatttaaccatgtgcagtgtccacagggcacagttacaattatatgcataataaattattctgatgataattattcttcgaacccagtaatgatttaaggaccacctggtttgggattacctttcaagcttctttactactttaaaatgaccccaaaggcctaagctgtggtaaaccggagctgaggacaaaaattacagagccatcgcactccttcacaggaaccgtggaggcacttggtgcacggccctgcacctgtgcccagaggaacctggaggcgctccgagcacagccccgcacctgtgctcggaggaaccgtggaggcgcacgcacgcgcacggccccacacctgtgcccggaggaaccatggaggcgcaagcacgcgcacggccccgcacctgtgcccggaggacccgtggaggcgcacgcacgcgcacggccccgcacccgtgcccggaggaaccctggaggagcacgcacgcgcgcagctcccgcacctgtgcccggaggaaccgtggaggcgcacgcgcgcgcacggccccgcacctgtgcccagagaccgggaagggagggcctccagccatgcaggctgcacgggtcgtcgtgctagacttcaccttttgtcctggctgaggtcagggaagtcgctgtgatgttccttttagaaaacttagccgagggctgcgcatgctcacagatggcgaagcagtgagaataacaggactcacagttctctctgataacaaaggaatgacagagctaatcgctgcgattcctaagaagtgaggaattaattatgacatacgaatcttcacctgccattacttcaagaacagaattaaagtaggcttcctctcctgcacagtggtgggattcttcggtctgtctccctggcaccggggcgtgatgctggacaaggtcgaggggttgcggctgctgaggctgctccgggagctcctgaggtcctatgctgggccctcccaagtgcccctgctcacggcagacagagggaacttcctgccccaagagaggggcgtcaggctggaccgtggcccctgctcctgcagctcctaggcccaagccagtgggccgccccacctgtgttcgcctgtggtctggcggaagctggccacgtttccttccctccctgtcaccggtcaccaagggccacgggacagaattggtggtttggctgcggttggtgagctgggtccgtgtgcccgggctccctcgctgcgtctctctcttccgcgagaacacaacgcacctccctggcctcacacacccaaacttggcccctaccacagctgagtcgcagcagaaaaggccatgttgaaataaaaccctggagaggaagactgcgaaggccaggtgggctgcggaagctgaggtttcctgcgccccagtggattctgcccacagcgtggagcttggtggctgagcccagagcagcggagaggagaaggggccgaaatgtggagcccgaggtggctgcagcaggctgggggcgcccggggactcgctcggggcagcgcagcccctttcccgggccctgggcgcggaccctctgcacacgcagtcacaggccccagccccactgtggccgaggaccaggcaggccccaagctcttcctccatggatttagtaattcgttttcagggcaagctggaaacaggacatgagccaggcaaggccgcgctcctctccactggcctccccgcgctgtggaactcgcttgctcttacatagaaaagtgagtttcctggtgaaaagctgaaagcacaacggatctgggcgtgggttttgccgctttctcctgaaggaagccacggacgtcttggcctctttgaaacctgtacatgaaatttgttttctggggcaggcgccctctgcaagaatcttacttcccttcagcccaccgagatggctgcggcgtcccgggcgctgagatgggggagccctgagggcgtctcaccgggaggaggccgtgggcccagcgcgaagccgacccgacattcccccatgagcccgggaggcatcgccacatcactgggtggaaggcgccccgccgccggcgcaggcccagaccccggggaacgcgagagccacgaacctgggccaggagccgccgagaccagccccggccgccccagcgctcctcccgcccgggcgcgatgcggtgagaatggccccgggcgggaacgtcccctgtcggggcggccatgggaggcactggggtccctgctctgcggccgccccggtgaggaggcgccccggccaccccgaaacccgggagaggcgatgctggcggtgacaccgtcacccaccgcgaggacccgtccctcctcctggggctgcgccggcgccgggaagctcccgcgacccccgctctgtccggctcaggctcaggagggcgccctcgggtgtccgggagccgcatcctcacctccagagcgatggtggcaggacaggcccacggtcctcgttcgccccgggggtgcctggcggggaaggcgcccgagatgctgagacccccgagagcacaggcagaactcagaggaggcttctgagggaaaatctcaaattcacctccttgaagaaccgactgtccagtatgggcccttagccacatgtggctacttaaattaatttaaagtgaacagaattaaaactccgctcctcagttgcagtggttgtgtcccagcactcacgtggctgtggcgaccctcagtgctaagaatcgtctccacaccccggaaagttccatgggacagggcaggtctaggagttgctgggtggtaatcacagacacatgtgagaggcacatgcacacacacacacacacacatacaaacacacacgtaaacacacacatgcacagacacttccccctggcagtcatcctgaagaaggggctggctcgctatggcgctaagcctagaactcagtgtctcctggaggtacagcttcagctccagagaggagccctgtgtgtctgcagtggaggccagaggagttggcagccgcagtacagcgttccaaggatggagggtttgggaggggctgcttcacttgcatggggctcaccagggtccacggctgggggtattgggagcactgaggcagagagagtcacggcccagcaccatggagcccacatcctccaggggaacccaggatggggactgaaatgaccaatccccatgagggcgctcagggactcatctgcacctcccttagcccctggacagagctgccgagaaaggcatcagtcagagccacgcaggcctcctgagccgagtgctggtagagaggggtggccttcaggaggaagactggaggagagggagttttctaaaaggaatgcagtgtcattgccacagagagccctgatggatgtcacactgcctccccacagtgtctgctgcctggctggacaagcccagcgctccagcttggaggctcctcccagcttagcagtggggattccagccgggagaaggcgcctatatttaaaactaaagtgaataatggagacattttctattcaggcttaaaaaaataaatttacaaaagacatggagttaggccctggtccttctctgaagggaggtcatccggccaaggccccacccagtcgccctagtgactcagggatccagcttggcttccctgaaggaagggcccagcggccagcatggcacccagggtggggaacagcgcagggctcctcacgggctcaggcaggcgc

SEQ ID NO: 1882335 - DNA, 4001 bp, Homo sapiens
aaaaatcattgtttctcaatatttttgtgcctatggaaaatttttgttttagtgcttaagaaaagcagttttggggctgaagtttatttcagtttattttattctttaaaaacggacttttattcccattgaataaacagggtataaactactaaaatacaataaactccaagtcaagaagcttagaggtttgactctgtctcaggttgaaatgagccctggctagttcatggtttaccagtaaactcttcttcatggatatagagtgtgaactgctataacaccatcttcattcaaaaagactaaccagaaagaaaaaaatatatagaatttatgctctatgttgaaggaacaaggaaaaaaaaagaaggtagaagaaagggaaggagagggagaaggaaggagggaggggagagaaaaagagaaaggaaggaaagagacagagaagagaagaagaaaagatagaccaaaaaaaaaatttttttttgaaatggagtctagccctgtcgcccaggatggagtgcagtgacgccatctctgctcactgcaagctccgcctcccgggttcacgccattctcctgcctcagcctccagagtagctgggactacaggctcccaccaccacgcccagctgattttttgtatttttagtagagacggggtttcactgtgttagccaggatggtctcgatctcctgacctcatgatccgcccgcctcgacctcccagagtgctgggattacaggcatgagccacggcactcggccaacaaaagaaaatttttggaagaaagatgaggagttaacaagcctggagaacttaagtgatttccctaatttctttcagaatcttgacaaactttttctcttccatacctgagttcttggcatcttacttttattatagcttcactagggacgtgattgtacaaggatgaggcatgatcatgaataaaacgaagttggaaccctaagcctaatagtaatgaaaggtttcctgtaaatgtccgaacaaatgtaccgggtctgtgcaggaatacaccaatgatgtttcaatatacttaaggcatcaatactacagacacatacccgtttccctgcctaagatgttccactggttttccattttttacaagaaacatgatccataaggctgtccaaaaaccacttagccctacaaaatcttctacaacagcacacaaaatattctgacgaaataccaaaagacatagtttcctgtgtgtgttcaccggagaacggaggagaaaagatcatttcaagtaaaggatgcagtgttgactgagaggtgtcggagggtgtgacctgctctctgcgaagtctcccctgacctcccggaagagtgaacactctctccaccagaaaacctctgacccatagctttcttatcttacggcgcttatctaacaatcttagatctctcatttatgtaggtgccttctctactgaactggaatcatttctgaaataagaaactcttgttaacaatgtgtctgatacatgttcataataatagttaaaacatgcatcaggaattcagaataattctgctattgcgaagattgtactgagctacaaaaataattccttccatttgtaaaacattcattgcttaagaggcacattcacaaatcttatattttaccattagatctgtcaagatatttttaacttcaacttcaggttaagaaaagtgttaatagactagattaactaatgtgattaactaattagattaactagttgagagtttcataaaagtgaattaacttctctaggcctcagcttttctacttataaaacaaaaatatttcatgtgagtctctttgaagtccctctagctctatagcaagcagccaaatggaaaagtataagcagccaaaattgccattgttgtattaataaaatgaaataaggatcagataaactcacagaatgagaactgtcatcatctgtaggagttgttggctctttctgcaaatcctacggatgacaacaagaacgaaaaactgttagagagtttagagaggaaagaggaaccacgaagaaggaccaagtagttgcaaaggacaccaaaaataaaaaataaaataaaataaaaattgagaatgaataagcttaatttatactgcctaggaatctctcttttattttattttattttattttattttttctggagacagagtttcaccctgtcacccaggctggagtgtagtggcatgatctcagctcactgcagtctctacctcccgggttcaagcaattctcctgcctcagcctcccaggtagctgggattacaggcatgcgccaccacgcccggctaatttttgtatttttactagagacggggttttgctgtgttggccaggctggttttgaactcctgacatcaagtgatccgtccacctctgcctcccgaagtgctgggattacaggcgtgagccacggcaccaggcctaggaatgctttttcacaaaaaacacacaggacacttttttttttttttaattatactttaagttctacggtacacgtgcgcaacgtgcaggtttgttacatatgtatacatgtgccatgttggtgtgttgcacccattaactcatcatttacattaggtatatctcctaatgccatccctcccccctccacccaacccacgacaggccccagtgtgtgatgttccctgcctgtgtccaagtgttctcattgttcaattcccacctatgagtgagaacatgaggtgtttggttttttgtccttgtgatactttgctgagaatgatggtttccagcttcaaccatgtccctacaaaggacatgaactcatcctttttattgctgcatagtattccatggtgtatatgtgccacattttcttaatccagtctatcattgatggacatttgggttggttccaagtctttgctattgtgaatagtgccgcaataaacatatgtgtgcatgtgtctttatagcggcatgatttataatcctttgggtatacacccagcaatgggatggctgggtaaaatggtatttctagttctagatccttgaggaattgccacactgtcttccacaatggttgaactagtttacagtcccaccaacagtgtaaaagtgttcctgtttctccacatcctcttcagcacctgttgtttcctgactttttaatgattgccattctaactggtgtgagatggtatctcattgtggttttgatttgcatttctctgatggccagtgatgatgagcattttttcatgtgtctgttggctgcataaatgtcttcttttgagaagtgtctgttcatatcctttgcccactttttgatggggttgtttgtttttttcttgtaaatttgtttgagttctttgtaggttttggatattagccctttgtcagatgagcacattgcaaaaattttctcccattctgtaggttgcctattcactctgatggtagtttcttttgctgtgcagaagctctttcatttaattagatcccatttgtcaattttggcttttgttgccattgcttttggtatttcagacatgaagtccttgcccctgcctatgtacacagtacacttttttattcaagcacatggaatgtaaaaaaataatctatcatgcaataagccacaaaaaaagcttcaatactccccctaaaatcagtatcatatagacttttagctctgatcacaacacaataaaatcagaaatcaaaactaagggattgctttagtaattccatgatccatgttgctggaaacaataaaacatattattaaaaaaatgagggttttttttggttaaagagaaagacataagaaaaactgtgaaatatttacagtttaataacaatgaaagcttaaaggtcaaattttggaagtaaattagtactaatgaaatttttagttttagagacatttatcagaaactgagatttacataaataagttaagtgattgattactc

SEQ ID NO: 1882336 - DNA, 4001 bp, Homo sapiens
tcagaaaattacaaatagaactaccacatgatccagcagtaccttttctgggtatatactgtgaaagtaaaatatcttgcacccccaaaatcactagctaaaaggaaaattcaagctggaaactgctcagtgcaaacttgcctcccattctattcaaagtcatccctctgctcactgagatagatgcatactctgattgcctcctttggaaaggtttatcagaaactcaaaagtaagacctggcagccccctccctgctttgtccccgcctttctggatggaaccaatgtacttcttacatatattgactgatgtctcatgtgtccctaaaatgtataaaactaagctgtgccccgattaccttgggcacaggtagtcagaactccctgaggctgtgtcacaggggtgtgtcctcaaccttcgcaaaataaactttctaaattaactgaaacgtgtctcaaattttcggtgttcacatccgcaaaggaaatgaaatcaggatctcgaagcaataactgcatgcccatcttcattgaaacattattcacaataactaagatatggaatcgacctaagtggctgtccaccaatgaatggataaagcacatatagtttatacacacaatagaatattattcatccttaataaagaagatcctgctgtttgcaacatggatgaacctcgatgtcattatgctaagtgaaacaagccagacacagcaagaaaaatactgcatgatctcttatgtggattctaaaaaagtcaaatacatagaagcagagtagaacagtggttaccaggggtggagacgtatggaaatggttaagatgttggtcaaaggatacaaagttgcagttctataggatgaataagtctagagatgtaatgcatagcataactatagttaatactgcattgtgcattggaaacttgcggagagtacatttcatgcgctctcaccacttacacaaaatagtaactgtgaagagatgtattatgttaattagcttgactgtagaaatcatttcactgtgtacatgtatcaaaacatcatgttgtacaccttaaatatatagtttttatttttaaaacactgtttgggattaaaagcccagctaattctgccttaatatctcattcttatccacaatgtccacccataagaaagacgcccgatactccgtgtaaacacacactccccatctcccatacaaatttaccttctagagagagcccttttccccaaactctcctctcaaaacactctgaagcacaaggtctttagcctagttagacattttctgaaaaacttagtttaactcagcgtagagacaccatgaatttcagagacccagtcctgggcctgcttcagttgctttagcctagagtttcaactcccaggtcccggggagggatgctccaaggaagaaatagaggccctattccagggctgtttctcgcagactagccacagaaaatgcagcccagcgccacttcctttcagtagcaacacgtttccaacacgtttgttaagcgggaacggaagtgagcggaaaggaatgcgtttggtaaatcccactttaaggatttcgtaatcctcccagggattcccaccacccgcactccactcgcagactgcgggccttcctccgacgctgggagaaggaccctgggagaggcaagggaagggctccggaaccagcgcagcagcgggacgctagcccgcccacacggcggccacttgaaggtcctccagggaacacctgaggcagtgggagcgtctgccctttcctaagtctccttggaaagaagtattcgctttcgtttccgcaaacaaagcatgctccgcgctttcaggaccggtggctcccgtggagaccgcagcggaacccagtccgccttcgcacgcgtccgggggagaagcggccccaggactaagggcgcgcgcccgaggaaccggtgctgtgacgaccagagcaaacacgccggatgttcctgtgtaggctgtgtaaggagtgaccggaagtagaaactgggtgctccagtggcgcaatcggttagcgcgcggtacttatatggcagtatgtgtgcgagtgatgccgaggttgtgagttcgagcctcacctggagcattgttttccaacccaaaatagcattacttgaagtgcctttccccctgtaatccgactccatcgtctttaacgtgtttggaattgtgtacacagtttattgttattggtttccttagcctttttagaaccaagcaacgccaattaccaacaaaatccgttgcgccgcagtgagttagctaccttctatctccactttgttctgcacgtcgatctcaggtaaagaacatcatctctttacatccttctttccactttgttcttaggatcatcgatcatcgttcctcggggagcccctggcacatacttagtgctaagaaactcccatcaggtgataagcattgaactccatttaaggaaactcaaaagtgggaaatagtaaaaggttcctgtctgattaaagctctgattgggaggggtgtggggggactgatttctgacaacagtgtcccctccagtatttttcccccacttaattttaccctgataaaaatcaacagtcatggaagatctagcagcttctatcaactgagaaacagcacctggtgtcctcaggcattcaattacctggacttggaaaaggatgagtgataatagacccagaaacctgaaatctttagaacagcattacaagaataagcatattgttgtggctgaggtgggtaggaagtagatagggattttgactttaaaataggcttcctctccctatgacacctgcagtttgcctggacatagcttttatcatatgcttcccaactcttcagcaagagagggaattgaactgagtaattgggagttgttttcctagctataaagattgccacaaatctgaaagcacatgtgtcccacttgggacacggaggtgagtggaattaagctgagcacagataactctctcttgagatctgtattcctaaatgggtcttgcatgtatctggacattgtccactcacagactctctcctgagaaaggttagcgaggtcccgttcaggaatgcaccagatgataataaagtgaacaccttctcactttgtagctcttgctaagccactggagtaccttaaaagctatcaaagcataatcttcaaatatatatatagtaactaatcaccaaatatttatttaagtcactaatgagaaaaggaggagtatggtaaactgattgcaatggcaatagaaaaggctggtaaaggtatagtcagtgggggaaaaataatgctgacatgagattgcaagtttaagtaaaaaactagctaatgtcctatgaggcagtgaaaactatggcctttgggattatttttatctaaaagacagaaactagttgcatctttactgggtaaaaatcattcaaaacttaatattctacataatgacatttaaccttgtaatctattttctaatcattagtaaatagtgacctccaaaagttccattaacttagaggattacttgccccttcagtgggcttgttagacaatgctctagtattattttgaaagagtactaatatcttttttttttgccttatattaacttttggatattttttctgaatagatttagcaccttaattcaattattttatctctgttcctgatcagttgaaggtattattgagtgtcttcagacagtgtttaaaaaatggtgacctttgccataaagaatttttgtgaactggcttaagccagttttgtgatacacaactttgggtgcttttggtagatgtctgtaggcagcttactttatagtactttatactataccttactttatagtataaagtaagggatagttagctacaacataccaacgagttatagtgatagaagatcttcaacaaaattttgtacatatatagtcatttatt

SEQ ID NO: 1882337 - DNA, 4001 bp, Homo sapiens
ctgacatttaaatgattacatttgggatctacagttgccttggggcatggcagtgatcacttaatagatgagtcttccttttttttttgctttcagagcttaaattagctttcaaatagctacaaggttagagaatatattctttaattaaagagggagacctagcttccttttcctttcccataaagcgtgtgtgtgtgtgtgtgtgtgtgtgtgtgttttactttgcatttttgcatagactttgcaatactgggagctgcagataactataggatttatgtcctctacataaggtgaccacacaataggacagttattttaaatattctgtctttaggatgagtcataattttttattaagcagatgtattcactatgcttaaatgttttggtatcagtacagcacagggcctcacacagaatatttactgaatgaatgactgattttatgaccttatacactctgtgctaataaatataaatacacagaaaatccatttggtaaatatttcctaattctctctggtaaaacaaaaattccagtaacacgtgcatatcttcacacacagtctagcaaggatctcacttgtcagcagaaatgagccatctggttgctgccctgagagcccatcttacacaaatgtcaccgctttccacattcacaacggaccatttccttaccagccaggagaagccaattatatttgtcaaataacaagagcaaagtacatttttgcaagtcagtcgtcttgtctataatcaactcaacttcctaaatattaaatattcagtaatctggctgtagatttctggatcatttaaacaaatgaataatgcttgataaagctcagaaattgtaaatttgataaagctcagaattgtcagctatgtcttcatactgtgaatccagcagactgagaaataacaaaagtgagtttgccaaccctcttaaagatgcatttggaccctgaagtccaaggcaactgttggttttgtgtggcttccccacaccccagctcaggtgtgttcacccacagattgtttagtctgcaactgaagagctgaacataatctcaagcttggttatatctgctgcagattattttgtttttaattttaaaaaatacaatgtgacttagttataaatgagaacaaattaacaatgaacaatatttcaaaagctgaaaaaggtggcacggacactaacagtactgaatacataggcttttatcatcttcagattcagagttttttgtaacttaattatataaagatgaggagtcagttttgcaagctaaaaatatttacttattagaactatatgaatacttcagtaaagtatattaaaaaagataatgagacagatgtgcatttatagaactgcatgccagttagccagttccctgcaaagggaattcccagcatgatctcattaatctgtgaagacccagagcaatccttgtttagatgtatgcattcatctacttgtccagcatggtcagccctccgctccttggtggtttctctctactgtgaatgtgcatgtccagttgtctatttcttagagtagatatttaccttcctcatccaccagcctttgggggaggactggggagatgcagatgattgatttgacctgttttccccagagggtttcctggtggctgtcttccatgatcatatctggaatcagatgtgtttccatagcctcttcttttcttcacatgttgctgaagtagagttttgaaaaacaaaatcacaaacttggctattcttcagaagaaatctgttatcaaagataaactccagggagatggactctgctgtccaacacttgtccatttaagatgtaagccatcctgccccgcttccccacttcggagcaacttgcagattaatttaactggactaatgccagttctcagtttgagcctaagatgattcgaacttgtgttttgaattggggaacagcactgcatgatggcttttcagttctagaagagaagaaaaaatcttttatttatttttattttattttattttattttttttgagacagagtcttgctctgtcgcccaggctggagcgcagtggcgcgatctctgctcactacaacctgtgcttcccgggttcaagcagttctcctgtctcagcctctcaagttacaggcgcgtcccaccttatctgactatttttgtatttttagtagagatggagtttcaccatgttgtccaggctggtttcgaacacctgatctcaggtgatccacccacctcggcctcccaaagtgctggaattacaggcatgagagacaccacgcccggctggaaatctttattttaaacttttttatatgcatttgagagaaaaattaatatgaggaagacttatatcacagataccagttccttgggcaattcctggagaccaggggtctgcaaactatggttcacagggccaaatcaagctcagggcctgtttttgtactgtctgcaagttagtaatagtttttgtactttttaaagtttgtgaagaagaaaaaacaacaaagaataatatgagatagagatgtcgtgtgacctgtaaagcctaaaatatttacaatctgcccctgggcggtttgccaaccctgggctatagactcatgtctgcactctctggagaaaggggttgaatgcagcaggtgaaatcaatgcaaggtcagggatggagaaaaagaatattcttccacttctgtgaggatcatagcatgactctggcagagttaagattctagaaaaaaacaatacttgggatagaaggtttttggtgcctgggaagaccatgctttgggcagagacatcagcctccgcaggacaccagtgatggttatggaggcgtggggtggcctttctgtgacttcacgagcagccagcatcacagtgagagtcagaattcctttccacagagaaacaacctccagggacttgcacatgtaatttgtgaactggggaaggggctgaaccctttcccaaagaggtgggttaaaatccagtgaaactttagcaattaatgctgtagaaagaaaaaaagtgacagcgtccccttgcccaatctttttctatgatgtcactttcagagaacacagaccaaaaatcaaaagcaaattaggctgggtgcagtggctcacacctgtaatcccagcactttgggaggctgaggtgggaggatcacttgaggtcaggatttgtagactagcctggccaatatggcaaaacccccgtctctattaaaaacacaaaaattagccagatgtggtggtgtacacatgtcatcccaactgttcaggaggctgaagcaggagaatcggttgaatgcaggaggcagagagattgtagtgagccgagatcacgccactgcactccagcctgggtgacagagagagactccgtctcaaaaaaataaataaataaaagaaaacaaaaaagggcaaattaatttgagtctttacctgtatctctcgagtgacattcaaatggaaatatggtttataatctccagtccctcttcctccaggctcccactctctcatgccctgtagcttcctcaggatccacctccacccaccattcctgtttcctttccctgccttttctgacacagaccttccacaatgaacctgatctgaaagatgactgtgagttaagatcaggatgggggtgaagtggcacagaacgctgagcaagaagcaccagaattttcctctggggttatgggaagggaaagctgggaatccgtgtgcattcatcattgtcctgatgtattgttcataggaatctagtcattccccaccccgaggctagagaggccaagggaaactttagctataccaaattgtgaaattgaaatttgtatttagttccctagcttcccttttttgcaaattttcccaccattcaatgacttatacgttttaaaaacacttaaggaatgccttctatctgctcgtagttcagaaa

SEQ ID NO: 1882338 - DNA, 4001 bp, Homo sapiens
ggctggtctcaaactcctgaccttgtgacccacccgcctttgcctcccaaagtgctgggattacaggagtgagccaccgcgctcggcctatacttgaaaatcttgaaagcagttatgtcagatatgtgaaccagagaagcccatcttgaatagcggctgggtaaaatgaggttgagacccactgagctgcattcccagacagttaagtcattctaagacacaggataagatagaaggtcagcacaagatacagatcataaagaccttgctgatgaaacagactgcagtaaagaaaccggccaaatcccaccaaaaccaaggtaacaagagagacctctggtcgttctcattgctacactcccactagcgccatggcagtttacaaatgccatggcaatatcacgaagttagcctatatggtctaaaaaggggaggcatgaatccaccccttgtttagcatatcatcaagaaataaccataaaaatgggcaaccagcagccctggtaatagacagccctgctctgcctatggagtagctattcttttgtccttctactttttttttttttttttgagacggagtctcgctctgtcgcccaggctggagtgcaggggcgcgatctcggctcactgcaagctccgcctcccgggttcaagcaattctctgcctcagactaccgatgttcctctactttttaaataaacttgttttcacttgccctgaattctttttgcgcaagatccaagaaccctcttttggggtatggatccggacccctttcccgtaacacttacggacatactctcttattcaacagaaacatagttttattctatagattttacaatctattttctgaccttttaaagttaaggacataaggataagacttctcatattagtatgaacaggccacatagaaatatcttctgcctaaaggaaaaggatgctgagcattggaccgtttcatcacaagaaggcgcgacttgctttcctagggttcctgtggtatttgtttttatctaattgagtttagataaaatctctactgaggcagtaggatggacaatgaaactttttgaggatccaccttttaactgaaagattttagggaggaaatggagtgggcaaagtaatcaaaagaacaggcattctcattaccatcttaccaagcctagaagcaaacagaagagcaaaacctatcacttaatgacttctggagaccatattagacaggcagccctgatttttaatctcctttcttagcatggtggaaaatgagagagagaaaaatgccacttccccatttcttagtgtttgttcatccagcacgagccggagaacagtaaacgcttgttcaatggtttcactgttcacacaaaactggaaaaatgggttgcattagctattccttttataaataagatttcactctttcaaactcctagctgaccagtgaactgagtaaagaaatagctctcacaagggcaaaggagtgaggcagcctcttgctatttctcctgagacggtctgaaatacagctcctcgctttaatcctgaggcaggtgtttgtgtctccggatgaggacacccagctgggaaggctagcgacgcccccagggccacctcatgggtggcagggcgctcttcggagcacggccacctgcccgcaggagccctccgctctccgattccaggcgaggggaggcgcattcggggcctcgacttctgggaacccggggtgccgcggacccgcccagcaaggcccctcgcggggcccggaggacgccaagtgcagggttcagtggtcgtgccccagtcgggtctacactcaatggctgtgcgccagctgtgggcagggggtccacacccgcgctgtgtccccgcgcgttaccacggcgcacctcgcggacagtgggaagggatagccccaccatcagcgcccactccgcggacttcacggaccactaccgggtccgagagaaaggctggtgagcatgcgcgcattgctacggcggccgcgctgacgcacaggaagcgggcgggaccggacttccggctggtctgtggggtttcgggttcggggtttcctggtgggcgtcaggggcaggcaacagagtggcggccgctacggccctgtaacagggccatggagaagctgcggcgagtcctgagcggccaggacgacgaggagcagggcctgactgcgcaggtagcgaacttgcgccctcgtccagtcccggggctgcccgctggccccggccgcactgaggaccggccgagcgggtggggtgggtgcgaggccgggggtctgggactcctctgcccggctggttgatttaggagggctccgcctgcttcctgggtagaatttgagaactttccagttttccatgcggtctacttaaacccactttgaggcccccccccgactctcccatctggccttctgacttaggaatccgctaacgtctgccctcgctttcccaaataatccatcgctcccacgtactatttggttttctgagcctggtgcggggtctggcctcgggctgtgcagcgtaagtagctatgcagggcatttatcctgcaagctgcagtgagccgagaccctaaagcttgttgcatctgtttgtctttggaggtaaaggtggtgttatgtgtgtgtttgctggggggtggtcttttggaaatagggagactggaggaaaaataaacaggacattggtaagtgaaataatattgaattaaaatttttctgttaaggcagtgagccctggtaagagatttttttttttttcttaataaaagcccttgtgtctgcgccttaccagcgagacttgataagggttacttcctccagcaagaaggttaaaagtagcagtggagcaggaactgcggtgtaagtttttttgttattgcatgcgattatattgcacgttattgtgtgctgtcgcagaagttggacgtttaaaattgaattgtatttcataaggatcttctatttgtctctcctgacttccttgtcattatacttactcagcacttggtgtgggtagagttctgggctacagttttgggttcagagagtgtaagacaagtatctgttctcattgcactctgtaactctgtatattaccacagccacatgtggccaatgaattttttttttttttttttttagatggagtcttgctttgtcgctcaggcctggagtgcagtggcgtgatctcgactcgctgcaacctctgcctcccgggttcaagcaattctcctgcctcagcctcctgagtagctgggattacaggcacctgccaccatgccctgctaattattttgtgtttttagtagagatgggggtttcaccatgttggtcaggctggtctcgaactcctgacctcaagtgatccgcccaccttgacctcccaaagtgcttggatgacaggcttgagccactgcgcctggagcaattaaatttaaattaattaaaattaaataaaatttaacattcagttccttagtcacagcaaccacatttcacatgttcagtaggcacatgtggttaaaggctactgtattaaacagcgcagatacagaacatttgcattgcagaaagttctattggacagtgctactctaaactttggagatgcaaaggtaatatcacttatcttgagcccactgtctagaggggagaaagatatgtggagaagtaatcaatcaaagattagagtgactggctgtatagacaagtgctgtgagttcagaggaggtgatcgttcattaacaaatattcaagttcctgcatatgtttgacattgttcaagatgcaggtgttaataacagtgaccagtgcaaatacctctttcacatggaacttaaattttaattggaggaaacagtgaataaacaagtatataatgtgtcagacagccacagaaaaagtcagagcaggttgaggaggttggggttgccatattacttagataaggcctccctg

SEQ ID NO: 1882339 - DNA, 4001 bp, Homo sapiens
ccctttgggactgctgggatgcatgaaacatgggatttcactcacagttgtgctcactatgtgtgatattcctatagattcatgtctctacacacagggatttttgatcattctgaattgttgattcccataaaaaatgaatacatggtgatcactgtatatgctgcattactgaatacatatttacgagagtctccaacacatctttacacgtctgaggagtaaaagaatttcccacagattagcttctggttcccatttcaaacctcatttctgttccacctctggcattgggtgtagtatggctccttagtgctccaggccaaaataagtggcacaggggtaaagtcatttctggtggggggtgggggatttggagaaaaaaagaaaggattgcaggggagtacactgggagggttaggagaaattctggagatacggtccactcaatggaggcacatacaaccaagctgagaaacgacatagtacccaacagagttgggagatgtgaaacccaaacatcaatctccacctgggcatagaggaaatactcgatttccaagcaggttctaggttcagaggagagagcccttggttggaagcgccggtcttgcaggatggggtgggggcgttaatgcaaacttctggtccagcagaggtagaaacagaccagatctaagtagcagctcagaggcagcggacttgagggatgaagacgtgaggcccagagggtggtgcctggcagagaaaacagctgccagacaccaaggccacctcgggttaaagggaacaagttatatccaaaaaaaaaccaacacggtgaaaataggaagaataaggatatcacctggagtgttctcctgagacactccccaagaacctggattctttaacaatccctccagagcagggacactcagcacatacatctcccacaaagtaaagtgtctgaaggcctgggcaaacccttctccctccccttctctctcctccacgggccggcccggaggaggctcagggatgagaactactgtcactgctgttccccacctcaccccaacgagagaggaatctttagaggtctgtatccctccttcaccaccccgcctgagcgcctgctggaaaacacaatcaccgtctcaaatctcaccctgcaactgcatccaagcgctttctccaagcgttcggggagccgccggaactcttcttccaggcaggcgttccgagactccgcacaataggtacctacccttggggttttgagccgcagtgtctgcctctgttcaagtatccaggctcaggtacagacctttcagtgcaggcggcgggaggcgcgaacacggaggaccccctcaggcatactgccgcccgggcggcgcctgacagattgcctccttgggatcggcggacatgccctgggcgctccagctccgcgcgcctcagacacaggctatgattggcctggctgaacgtcaatcagggctcggcgccgtggaggcgggaggaacgctgtaggcagaggccgcttaactccctacggggttattctccgcctcttctagggtaggcaggtgttcccgagtcccttagggggggtccccgcggcggcctgagatgctcggcgccaggttgtcgcgcccttgagctggctgaagtagacattgactctggagagtctgcgtttttcctggtcccagagccgtggtcccgatactgcgcttcccgctcctccagtcccagctcccaggctccgtcttctcccgcttggcgctggagaaacaccggaagagagagtcgcagagtgactgctgtggccctgcgacctgactgccaccttccaggactctagccctggctccttctaaccttcccgcccctcagtgccccagagaggctggtttgcggacaattattcatcagccggaagaaaaggaggtgccagtgttaggcgcagaagagggttggaccagaaaagctggagaggggcaagaggggaaagagggggaagggggaaggcggaaggcggaagaagttgggaggggtaacagctcgagcttttcctctagcgtagtttctcttctctcggtgccgccccatctgcttcttgcctcagttccccactcgcacccgtgcacctctgcggcaggcgtgtgaaaggaatgggagggggggcttttggtcgggatatctggtcctccagaccccacagccttggctgagaacttacttaagcccactccaactgacttgataaatgagaatcttgaccagcccactggtaggtagaaatgagggacgtcatgtatccctgaatggaataacccgaaaccgcaggtcccgtggatgtgggaatccacagcactggctgcgctcctaaggctcctaagtccacttccgaacctcatctaagaccctgaaagccagactagggacacattggattattattattattttttttatttgagacagggtctcgctctgtcgcccaggctggagtgcagtggtgtgatcttgtctcactgcaacctccgcctcccgcgttcaagcgattttcgtgcctcagcctcccgaggagctggatctacaggtgcgcaccaccacgcctggataatttctgtatttttagtagagacggggtttcaccatgtttgccaggcttgtctcgaactgttgacctcaagttatcctcccgcctccacctcttaaagtgctgggattacaggcctgagcctctgcgccagtcctacacgttggatcttttcccagacctcctcctcagacgtggagcgtacaaatgatgctccatcggttactctgatcctgactttgggactgccagataaaactgggagaaaccctacatttactcttactgtaacgtattggcttgaaactgcaggtcagaacccatttatgttgagaccaaaagactttttttccaagtagaatgaaatagaataaaatacaattgaaaatacttgcctgcatcacaggtaatgagagtaactatagtttcatgaaaccgttgtttcagttaaatatgtttttgcgtgtgtgcatgtgtatcgggaggagatatgtatttcatatatatatgtagagaggtggaaatcaacaacaaaactccataatttttcttgttttctaacagttcttgattttgagtaaaaataattctttaagaacaaaattttgagccagctaacgaaagatcagagtcaagcagcctctcattggggcctgaatagaggttcatcttatttggctttttcgtttttttcctatcttgtggactccttttaaggcccagcaaggaattaccctccccaagtttccactctctgcttggttcagccattcagctgtctctcgggctctttgattaataaaaagtccagtagagctattttatcctatgcatgtgtgggaagagggcaatgccagtgattctttcctgatttgacagaaaattcacaaatcacgttaccttctgaagatagagattttaagctcaaacattatcaccagagaactgaattattaagaaagatgagtggtcaaaagtacagatgttttacagattaagggtcattttgtcaggtcctgtccaaaatatttgaagtctaggggtttgaaaaattgttagaaataaccatttatgacaacagttttcatttattgttctctccagcttcaggagcaggggagaacatttttttccttcttaccttgctgagaattttttcaccagggtttcaaggctaagaactgaaattccagcattgacattgaattaaaaagaagcaagcccttttaggaagtcaaattttattatatgagatggaatgtaatattgagattacttattacttaggcatgggataggggggcttttaacaacagaccaaaaaaaaagttggaaggataggaatgaaataaagcaaactttcattattcatagatgatacaattgtctacagagaaaaataatctaaaac

SEQ ID NO: 1882340 - DNA, 4001 bp, Homo sapiens
ccttttgtttctaaactggatacacctacgtggggtggtggctgtgggcagcagctctcaggatgaggaatctacaagactccagaagcccagaacaaaggctcctctcccctccagaaagggcatgccagcccctaggatgatgtatatcaccgtttcagacaatccttctttaacccaataaaccacatcccctaggcctatgccccaggtttggggttctaagagacttactgcacaatgtttacgtaaaatcattcttcttttctgtgctggtgctccatattaagcaacttccctttatctgcacttatgttacaggacctaagaattttctacttacatccacttaggggctttccatgggcaaatctggccatgacccatcacatgctgtttttccagctctttgctgtgtttacttttcatgtaaacttgggttattccaataattgtttttcggtaatttggagagttacaggaatgcaacattgagcccaagaggcaagatcaaaactaaaatttgtgacattaaatatccaagagttctatccaaaatcttctagaaagttaatgagaaccccaggcaaatcaactggaagaaaaatatttaccatttagcactagacagttgcaggtacaaatcttagtctacagaaatgtcgacaagctaatcagtgggttccattcccattcacccaggacacacaataccacattcaagaattccctaatgaatatacagttcttactttctctgtgacccacctcccccacaccaagtccccagatactggagacagggagcttcaagtggagcaccacatattctcctaaatctcttgtataagtcagagtccttcctttacacacaagggctttaaaaactcaaaagccaggaaaatgggcttctatatctctgtcccctgttgactatcccttcactaagacaatgaggacagagtaaccttgctcaaaaaagcaagaagtactttgggaggccgaggcggggggatcacctgaggtcagggattcgagaccagcctggagaacatggcaaaaccctgtctctactaaaaatacaaacattagctgggtgtggtggcacatgcctgtaaccccaaatacttgggaggctgaggcaagagaatcacttgaacctgggagatggaggttgcagtgagtggagaccatgccactgcactccagcctgggcaacagagtgagactctgcctcaaaataaataaataaataaataataaaaacaagaagagaagtaggtgagagggttaagaaagaaatacaggaggaaaaaaactatataatacttcaaaattaatatccaaccataatactaacagttttgaatatatttccatatagcctgttgataaaaaaaatctttctttaaaatatagatatgattacaagcctccaacagtttcatgttccccacaaaggaagtattagaaagatcctcctacatttggaaaatgaagtgctggcaccactgagatatttgtctgggagacctactatttgcatgggcagagaaaacattcacatggaatattcaaccacaaaagcatcagatcctgggaacaaaactaacaatttcccaaacacttccaaaacatagctctgacctctactccatcaaaaattctgatttaatttgaggagattctgctctatttcttaaatcaaatgtccctatctctcttgcaccgtgaatgctctgaatcgaccagtaagacaagaacaacattaaaaccaacagtgagggcagtttcagcatcatcttgctctcctccaagacttcccctggttaccttgctcctttctccctgccagaccttgagttctcttttccaaaacatggcttgagcacctccttgaagaagtcttcctcatgtctcttatcttgttctaatcatcccatggctagcgtaagtagcacagatcccatctgcattccagctatatgtgttcctgttgtttcttcctgtcttctcattagcctataagctctattgtacaaggtctacacactcacatccactgtagtacccataaccatgttgcacaatattctgcatacagagggaacttaataatttttgcagtttgacttttgggtctctattctggctcctgggtaatcatttatcagcaaacaaattagttatcagtgaaacagccatggtttccagagttaatcatttgtatttccactgctggaaaaaacaacacataccactttccttgcagagaggcatgcggtcagaacgtcactggcagatctcgcctgagagttttgacgcttgtaactctgccctggaaaggtgaatcaacttttattttgattcatgtgtttttccaggttcctttagcctaaatgcataaaagtcagagaaagtcatcaccataatactgataacaacaatgacaaagatatacacatacagtcagtggctgaacacccaccagcaagattgctggaaaccaagccgcaccacacctgccggagcatccaggaccatctactcagtgcaggctcagcagccatgcctacctttgtccatcccaggtatggctcccccaggtgccagggctacttctctctcttctagtggctgctcttcctgctggcacgcagcacctgcctcccagctctaagcctgtggggcagccaggagagtcttgcctctggcctccgttggtcccatacttcctggcgagtggctttgcacggcagcccagccctggggaacttttcaagggagagggcttctttccctccctaactcccctaccctcacccaaccccactccatactggccctttaccatcgccagttgttgccttgccaggtactgtggaacacctacatctttccctatcacagggcttggacacacaggcgttggagtcagatacgctgtgtttcaattttcaaccccctacaccaattgcttctcttttctgaacctcaattttgtcatccacaaaatagagatagtataataatacctgccttatggtggtgttgttagaattaagcagtaacgtcactcgtaatgataacagctgtactgaccaagggacttgtacgtgctgggtgccatgcagtgttttgtacctcttcttggagcccagcatggcgtctagcccagaacaagtagtctgcagcttccttccccctcttcttctttcttttctcctccctccttcattccctaaatcaaataggacctgggggtgcagcatctggtcccttatgggggctttttcctctctgcagcatcttcccttcttctacaggccatctgagagaacccagacccctacccccagactctccgcccactagaaacaggagccttttcactctcctgcccaagtcccccacctaacagggtagctccatttctgtttccagccaggtttccaagctccatccccatgttggggctctgcacctggtgttctgttgctccagggaacacagatggccaatagctagagataaggtcagctctgtgtcctcctggaccacagaatgtgcccctaagagccctttccttccacttcagcacacaggcaggccatttgcaccaggaatgctgcaaaacactgactggacacagataatcaatgcttaagcataatggtctccaacggagcaggagaaggtcaggaaccagcagggcatagccatccccctatcctgggggaggcagtcaagaggaagggcccctggggaaagagggagctgcacctcgcatcaggggagggggtgagtggaacaccaagatttactggacttcaggggccatcctattgtgggctagcctctgaagaacctttagtagattttgccacacttggccctggctctggtgcacatgcctccattgcctcagcaaggctgctgagctctccctctccctctgttccattcttgcttacataaggccctgaacagcatctctttgt

SEQ ID NO: 1882341 - DNA, 4001 bp, Homo sapiens
ctgcaacctccgcctcccgggtttaagcaattctcctgcctcagactcctgggtagctgggactacagaggtgtgccaccacacctggctaatttttgtatttttagtagagaaggggtttcacggtgttgtccaggctggtcttgaactcctgacctcgtaatctgcctgcttcagcctcccaaagtgctgggattacaggcgtgagccactgcgcctggccacaaatggaggtttttaatgtgcttttatggtttagtttggcatcttgcggtcctgccatttgccatagaagagcatgttcccagtaagctgttgtctcttcagcctgagtccccaaatgagagctacttgtagccaatgtgaacgtgagttcaccccagctcacctgcactcctgtgtgcaagaaataaatgtttgtcattataagccaatgatattcttaggattgtttgttacacagctttattgcagcagcagctaatgaatacaatggacatttacgtttttgattcttcgctgttgcaacaaagttcacgctcatatacctcaactggtgcacaaatgcatcttcaactttgctagttaatgctgatttgctttccagacttttgtacccacttggttttgtcaggtgtctgctgatctgtgggtgtaaaattccattgcccatctaactcttactcatctttctcttcctctgggcctccttccctaatgcccccatctgaactgggtccatatactcattgcatccatagctccttacacttgcctctctcacagtcctggtattgtatttatctgttaatctgtcaccatacagacagcccctgtcccccagcccaggcacttagcaaataattgttgaatgaaagtttcatgagaaacttcaatcaagctggtcagctcctgtcctagggaatgtatacgctgagacaactaccttatcacaggtacagccttcatatcaaggtgtgtcaaaggacagagactgattgcttttcatgtggttatcacacttgggctttgaatgtgacttgttttttgctgaaaatgtaatcattccaggctgcaattacagtagctagagagatgtgagtgaaagctaaacactaagggtctaagaaggttttgtgggcaaatgccatctttaaaaagcaggttactcacataataaatagcttgcattgctgcacactgctctaagcactttacacatacaagataaatatcagaggaggaaactgagaaaagcaacctgccctgggtgcgcagctggtgaaggcctcactgtagccaccatcccccaccccaaggtaattgcgttagagaacaaagaacttgacacctgccagaactacccccacccccaccaccacctacccccagccccagcaccacctaccccgacccccacccaccaccaccacctacccccaccaccaccacctaccctcacccaccaccacctacccccaccaccaccacctacccccaacccccaacaccacctacccacacccctacccccaccccccaccacctacccctacccccacccccaccaccacctacccccaccccaccaccacctacccccatccccatcaccatctacccccaccccccaccaccacctacctccaacctttggatggcatgagtctggtgcatctaaggtcacatttaaagaacagagttctgaaaaatccatgggaagacgtctttgctgccagtcagcatgatagaaaaacatgggtcttggagccgggaggcaggttttaatccaaacttggccacaatcttaatttagattattttggttgtaaggaaaagaaatcaataactttaataacttcaaaactcccaaaatgaagcggagagatgtgttgtaaggaatgggtggtgctctcgaaggacaatcaagggttggaaccaagaattggaccattgatataaccatgctgtcattctgtccccttcctccctgggctaactatgatcagcatctcatcctagggtcagattcctgggagttaaaatctgattggcccagctttggtcaggtgtgttcctctgatcgaatcagctgtgactgggtaggtgggatcacacaaacctcaggaaagggggcctattgtgagctaggcagatattctctagaaggtgcctaacgcagttactaattcacagtagaccttagggaagataccttccttcccagactcgcagttctcatctgtaaatgagagatttgatctgtgtctggctcatcattacatctactatgcctgtttaataaaggctgagtggactacagtgatccctatattagcttctggttctgaccgtctgtcttttagaattctcatatgtaaagtgtgcgggtacaaggagctggcagcgagggagaagacggggagaaggagggtgtgctgacactggccaggggtgcctggggacttcagcttaagcagtcttttctctggacatctttccagagccaatcttctgtccccaccaagcagcattctggccagaatctgacttctctaataaacactgtccctggagggacagtgccctttataagctattaaattggccttctgacagttgccaacacaatgccatttgagaagcaaagtccaaagtggggggactccggatttgattctggtgtccagaatccagactcttccacttattacgtgacctagtgggtcacggccctctaagcatcacagtcttcgctgcccagacagatatgagaatctgtgttctgccttattcatagaactgtttgagggatattgtgtataaaattatccataataattgaactatatttgtggtgtgctaactagatgccaggcatagcgtcatatgctgaaaagggttattatgtataatcctcacaagagccttatgaagtagctgctactatgatctctgtttcacagatgaagaaactgaggctcagaggttaaataacttgcccaaggtcacacagttgatgaagagcagagtcagatccacgctctgaactaggttctagtacttttgtttgtggtccagttgtagatagacacattattattattacttcccagggcctaagacctctcggataagctgaacattgagacccacagaggtgggaaaccaaaacttggacaccagagaagcaaacttctgggtttattccttcagtctaaaaactacatgaatcaaaaaatctgtgggctgtaaatgaagtaactcagatcaaattagctcactcaaaagagggaatttgttggcctccactctccgaggggcaaaagtgaggctagggcacctggaattcaagtttcaaacaagcacccccagggcagtcttcctcattgtctctcattgctgctgccctgtgctggctgcctgccctctttcatactccatgagcttcttctcaggaagagaacactgttgccagcagttccaggatcacacgtcagctgctctgcaaccaaagctaaggtgggatttcctttcccagctacaggtgaaacaaatctcaggaaaggattcttattggcctagctcagatcatgagtcctcccttctgaactaatcactatggctagggacatgtggttctatgactggctgccccgcttagatcatatgccacccatgtgaacagtgggagtggatctgttataagaaggtggggtggttgggggagatggcaacaccgacgtgaactctgggggactctctgaagcctgggtcacctcaatttgtatcctttccaactggcaagagcaaccttggttttctccttcctcaatctatatctactaagaagtcacctaataggctgttagtttcttactctcgttttcttcagaaaggctcatatggtcttttatacagagggagggggtgagtatcctcttctgcaaacttttccatgtctggaaaattggggcaatggagcctgccttactttcctc

SEQ ID NO: 1882342 - DNA, 4001 bp, Homo sapiens
gtgcaccaccacgcctggctaatttttgtatttttagtagagatggggtttcaccgtgtcacccaggttgttctcgaatgcctgacctcaggtgatctgcctgcctcagcctcccaaagtgctggtatagcttctttttaacagttacttatttctaactgtgttcgaagctttctacaaacttttagcaaagtcgttttcattttatcttcctagcagcatcttaaagaatgttcagtttggcataagccacagatcacaggataatctggtctttttgttgccacactgaatattcaaaaatcatattccgtaactagtagacaaaatctcagtttaggatttgtgtcccccttctgcacacccaccataaagacatcatagctgaggaagggccagagcatacacagcagaatgaattattgaagttttggttactgttagcttagtttgtatttctggcaaagataacatttagagcattgggggaaaatggttaagatgcccaaaggttggaaaaatcttaaaaatgacattcaacaggatgtcaagtagcttatttcatcaaatcttagacactatcaactgaaaagcatgccattattttatagaacaaaaataatagaatattataatttagaatatgttatttaattgattttttttctttccaaaaaaccaatagaatatagcatttcaagacaggcagaagcaatcccataataggtaaaatgctgaagttaagtgctaggtttagaaaagtaaaagtgtcatattcatgagtatattcatggaaagaatatctgaataatctttttttcttttttcttttttctttttgatacagagtctcatgctcttgcccaggctggagtgcagtgaggcaatcttggctcactgcagcctcagcctcctgggttcaagggactcttttgctttggcttcccaagcatctgggattataggcatgcaccaccacacctgactaattttttgtatttttagtagagacagggtttcaccacgttggccaggctggtctcgaactcctgactcaagtgatctccctgcctcggcctcccaaagtgctgggattacaggtgtgagccaccgcaaccggccttcttaataatctttaaatacatgtaagaaaagatcttctgaaattgtcttcttgggaagagctggcacgtcctacaaatggggtatctggtgaattggccttggtgaatgtgtctgcttcccctggaggtgggtgaatgtgaaatcgatgggtctgctgaggagtaggtataatctctgcctcactgagagttgaaggcatttgacagccccttttctgaactttgcggtggcatcttcctggggtgcaatgagaactgctgccctgcctagcccatgcaggcctctgacctgtgcctcctctcccagccatcctgttggcctcccgggagctggtccgcagcaagcgtcttagacagatgctagaggtcatcctagccataggcaacttcatgaacaaagggcagcgtgggggcgcctacgggttccgggtggccagcctcaacaagatcgctgacaccaagtccagcatcgacaggtgaggacctcccttcccggccacttccttggcctctatctcaccctaccctggcctctcacatcctccctctattaggacgggaacatcctaagactcatcacccctttctcttaacactccatcctctgaccctctgaccctcgtgcccagtttcctctgtcacttaccactgacctgactttcatccacagaaacatctctctgctccattacctgatcatgatcctggagaagcattttcctgatattctaaacatgccttcagagctgcaacatcttccagaagctgccaaagtcaagtgagggttctctccaagacttccttctccccatgatgaccctcattcttgtcttactttcctcttttggggtctactctgggcttgatgatggctggtgtgagacctcggttcttgtcttctgagttcaaaagaatttaaacagacacacagcaaagggggtttagcatagaacaatgtattgcaaaagaagatatcttgtgagttaggtgcagaatagacagtacaccctgagagagagaggattcagggtgggctgcttgtaaggatgagacagccaagactggcaccaggaagactcccagtatgggagacttacacgattattcataaagaggtgggaagaggtattgggaagcaggctctgagtggtcctctgggtgcacatgtgtagtagctgtgtgtgctttttcatacatcgcatgtctcattagcaccttaaatctccacctaggggtgtgtttttttactattatatgagcaaagggccagtctgaggataggtaaaatcaaaatgcgcatgctttccagaggggaaagtccctactgcagatagctttgcttgaatgagctcaattacaatgcgaatgctgaggtttattgtgttgactgtatgggcaccaccacagctgctgtgttctgagaagtgctcacttccttgactacctatcctgcctcaggctgagtaggaatgggccatgtctcagggtctgcttctgggaaaaaccaaacaaagacaatttgctcttaaatccttatttcagagatgcttccagaaaataccagtagaagaatggggaagtgagccagagatagaaagaatgccagtaacaaacattattaagccagttaccaatcacaggcaattggtgcttaaccccatgaggaattctgggaaacagtgtggaatagttacttcagttttcccacccaaagggcaaggttgctggggcaatcagagagcatctcctctcagtaattggctgaggggctctgcaggggcagggaataactctctggccacaggtacaggtggaaagagcttggcctcaaaaagagtgtgcgtacagttggaagagttggggccatgccctacaatggatggtccaaggaaatgtgggtggggcaccaacagcatctgctaggcaagatatcagacacgaacatctaggctgatagatgtcatctccaggaaaactagaaacatagtggtaaatggctcactggtatcgaatgctattgcttgcaggatcacataaagagcttataagcattacctggtagtaataaaaataaataggtctaagccagaggccacaggttggaaatcttctgatattgcagcatgacatttctgacctggaaagatctatagaatgcaggcttcaccttgttaatttattgatgcacagacagaggcatgaaggggaggtgctttgtcagggccaacatcaatggccacaccagggctggaacccaggctcaccgactcccaggccactgtgcttggctctgccctctccctgaaccagccttagcacctcaaggcgggagttgatggtcctcattcccttccctctgtgtctccttacagcctagcagaactggagaaggaggtgggcaacctcaggaggggcctgagagcggtggaggtggtgagtaccttgtcagtgcctacctgggtgagggctgctgtcagcaaacactgttcgtcactgcaccctaagctcctacacaggggcaaaaaacaatgggtacagcctctagcacagggtcagccctcccaaaggataactggattactggggcttaagtttgagccttttaaaaggggttacctaagactatacccatgttactgtccaacttggtatctatttggcagtggagtggaatgaaccatacatctgacccatgcctacattggattcaagtgcatgggaaaaagaatcctcatcccttgactgccagctaggggcaggaagcacgcaatgtggcagtgggaccgatgtacccagaaggttcttccttatgtctctctgcctgtttcctgggccagtggaggacccaggtcttttgttcccaccattcccgttctg

SEQ ID NO: 1882343 - DNA, 4001 bp, Homo sapiens
agaagagatggccgctgccagagacaatacttgaagctgagagaagtggggaaaaatacccagcttctccctttctgctctctcttcagggccatccaatggctgaactgacccagaaaccagagggcaaaggaacaaggaaaaagtaattctctgtgatacggaacagggtagagcggggacaggggataaatctaagagcaaaacaggacaagactagcacatggcctcaacttctctgctctccatggcaatgtcttcctcctcttctgtttccaggagtctctaattcctgccacttattgccccaggctcccttgatagctggtttccaggtgggggcacagccaatgggtggcagcagcaggagactgggagataaaaggaaaggttgggttatttttccccattccctccctgctttggagccacctctctggaaggctccctccaccattatagatcctgctggtggtctgtcttccgtggctccaggtctcaccagctctcaccaggtctctctctaggagtggtttccttctattgctggtctctgggtgtctcaacatcccttgctaattcccttaattctgcccacagctatgtcagcagtatctttgttaaagtcccttcatttgaacaatttggcttgagttctgttttctgccagaaccctggctagtatcctgacctactgtgttcttttccaagctcctttcaagtgtcatattttccccactgttgcccagatcagcagtgtggtatagtagaaagaatactggacttactggcagacagacatggttttatttctgattcagtcacttacagagttactggctgggaaagttatttaacctcctgagcttccgttttcttgctggtaaagtggaaaggggataatgatgaatttcagttggatatattagaaatccgtgcctgacccatgtgttccaggcctcatctgccagttgtctttttttttacataccgattatttatggcgtaaatccccttcctactcgactgaaagaaatgaacccccttcaaagtatttccagttatttctagaagtttccaaagaagttcccttgctcaccagtcgttctttcacagttgccatcgtcttctgccctgttattttgcttctgccccagctcccacatgtccagcttctgcttgcagggccacttgctgaggctttgccgaggctgaaacttttccagggtcactgtccatcatgagaacacagcacatgccaagggtgttgcctcttagtgttcccaaagagtctggtccttgggaagcctccatttggcctctgtggtgcagagaggagaatgtccttccctggctcagccccaaatagctgggcttgtgcctagagcctctgagagtctctttgactatttcctcagctaatttcacatgtaaacaaaacaactcacagaggttctgcaacctgcttccaccgtctttctagaaggaggtcagaaagggaacagatgctttgcccttttcccctctcccctccacagctctcccaacccccaaacccatcttcctcttctatttgctaaactaaacattttatacttatcaaccactgtgggatggaagtgggatggtcaaggagggaggtgaggtctagatgacttctgtatatgagccagagtccaatccatttatatatgaatgactcctagtacaatatctgacacaaagtggattctcaatggttgatgaatactattatcacgtaaataggaaaccacatttcctaccatttagatagtataagttcttcaaagttcaatttatgtgtcatttcttaccagaaacctggccctaatcccagtaggatgaggttactctttgcctctgtatttgcttcttagggctatggttataatataccaagaattggcttaaaacaacaaaaatttattctctcacagttctggaggctggaagtttgaaatcaagacattgatagagccatcctctctctgaaggctgtagggagagtccttccttgccccttcccagcttctggtggctcttggcaatccttggtgttccctggcttagagccgcttcactcaaatctctgcttctgatgttgcacagtcatcttctccctgtgtgtctttgtttccacgtggcattctcttcccttataaggccatcagtcacagtggattgaggcccactctagtaacctcatttaacttgattatatctgcaaaggccctgtttccaaatgaagtcacattctgggatcctgagagttgggatttcaaaataccttcttggggggtgcaattccacccacaacaccctgcaataagattttaaaattgaatagcagcaatcttatttctcttttgacatctatcacatctagcttattttatagtaatctatcttttatctccccctacaacactgaacagcccaaggacaaaacctgtttctgattcacttttgtgtccctgacaatacctacatgtcccataataggtttgataggtactaagtgaccgggctgaggcttgcaccctcccctcctgactcatgatcaatccttcagactagagcgtgctgccaccagcctggtacatgtatttgtgagttccttgggtttcaactccttggttgatttattttttgaaaacactatatatcaggaagatgggtttggctagctgaaatagctggttatagcttgccttgggtggttaaatatttatgtcttctgagagtgaacaatgggctttactctaccagggaaataatcttgtttgtccccatttattggctcttttttcctcttttacattttcagcatcctaatgatgtccttagtgatagttgctatggaagtattttagtgttttctgcagtgttgggtggtgcagtacctgaagccctctttagtgtgtatttataatgacaccaagccatgaatttcattttagtggtagctttcttgcttaataactggttgtcgtcgggggagtggtctgcatttattttggcctcctgatttatcgcactgatttttcttctccttttcattgttcctggagtgctcgtcatcacttcaaatactcaacccattatttcacagaatataatgacagagccagccccatcattttatcattgaatacactggtaaacagttgcaacccctctaataccaatgtgatgaggggtgatttaaacttgtaaaagtcaaacgctttttttttttttttttttttgcgatggagcctcactctgttgccaggctggagtgcagtggcacagtcttggctcacggcaacctccccctcctgagttcaagcgattctcctgcctcagcctcctgagtagctgggactacaggtgcgccccaccaagcccagttaatttttgcattttttagtagatatacggtttcaccatcttggccaagatggttccaatctcttgaccttgtgatctgcccactggcagatcttgtttgtccccatttattggctgggattaaaggcgtcaaaaacttttaagaatgtatagtttggagactgagactcagtaatgggtggaggagagaaaactgggatatctagagaattggattgtgatgtcttccgtaaaatagtaatagtagtacatgttctacctacttgataggattgttatgagggtcatgtgattaatgtatgtgaaagcaatttgtaagctgtacagtgctataaaatgtttatatatgttatcattaataacaactagattgttaatagtcctgattgcttttgacctggatgtctatggagaagcagcttaatctctggtgaagacatgacttgacctttttactgaaccatgtgggcaaatgatcaggccattatgcagtattttcaaggccatcaggttgtctgtgttagcctctttcattcgactcttaccttttatttggggaggagaagggacagtatgactttaattat

SEQ ID NO: 1882344 - DNA, 4001 bp, Homo sapiens
ccgggcatggtgacaggcgcctataatcccagctactcgggaggctgagacaggagaatggcttgaacccaggaggcagaggttgcagtgagctgagatgtgccactgcactccagcctgagcgacagagtgagcctctgcctcaatcagtcaatcagtcaataaaaaacaattcatagctgcaagtctttaattttgtttaccacgtggttatcacaggagtaaatgggaagtattgtaagagagtcgatatttattaaacacctactctataataagtactactccagatagtctctcctacatttcacatttgacatgtaaaaatatttcactgacatggtagtcagagaagagccaggtgacatttgagcagtgactggaaaaaaatgaggaagcaagctctgtggacatctgagagggcagtgttccatgcagaaggaacaacagctacaaagcactgatgcttgctgtgcttgggggcaattagaaaagctctgaagtgtagcttggatgtgatccatcaagaataagttcagtcttaaaagtcagggtaagaattttgaactttaatctgagtaaaatggtaaaccgctaaaaggttctgcacagaggagtggcatattcaggttctaatgggatcactccagctgctgaatgcaactatgtagagaaataaagggaatgcagaaagctatgctcacggctactgcaattgtccaggcatgagcagatggtaccttgtaacacctcttgtaccttaagttgttttatactgccatttactttctcatggaaacccctaatttcttcaggacagggagctcatacgcatagtttacgatatgagctatacatatgcccatttaataaatacttgataaataaccaccatataaatggctaacagtagtactaaattcacattatacagtgacgatatggcatcactgaaaggttttgtcatttactatctctttaggaaatttaagttctctaagccttaattccaacattcctaagtgttgctaacaccagcctaacaacgttggcaagtattaaacgaaaatgtctacccagacctttttttctcaccaccaaagtaggtgccttgctttcttacaaaccctcgatcccaatacaagacacaaatgctaccctttctgaagagtgcctgtaaaattttaaaagttgtccataactgactggattctaacatacatattaatccaattcatccctttctggtattcaaggcatgctttcaaaaattgtccatcttcgttacagtaatattttccttaattattctctgaaaacagctcatccccaaaccgtcttggtttttacgttattacatctcagtggtgatggatgaggccctaaacgcggggaaaaccttttacaaaagttttgatggctggtcctcaagctttgagatttaccttccaagaattaagcagcactatcgaaacaatgctggcaacatttttatgaggttgcaaggaccacggttgctgcagctacaggatgagttataacgtcagaagcaacccaagcgttacttcaggcccatcttcaccggagaagcccgtatgaatcaggcaaaaacataaaaacaggttctgtgactttgccgtatctcatttagatcaagtagcacgcagaaggaagacaaggattttaaaatctggctccaacattctccacttggtcgcgttctcaaatctcagcccagggccgctgacgtaaagtcgcctctctcgtgggcaccacgggctcgagggtagccggcagctgaaacccgaggggcttcagaggcttggaggccaggagcaggcagagcgccgatgggataatgagattctccagcagatcggcgctcaccgacctactccatttcagtgggtagaggtaaaggctgaaaggcgaccctcgcaccgcccggcccacctaggcagtgccggcctagcgtctctaccccatagagcatgcgcgggaggtaacggcccgcccgccaccggccacacaggcctgtcgggaggcggggccacgcgtctgcgcacgcgcgcagggacacataggcggaagtggcctgcgggcgccggagttgagagtgctttccggggaggcgaccgccgcggtggaaagtgcaggagtgggcgaggaggaggaggaagaggaggtgatggcgacggaccaggggagggggagatgctccgtctagctcagacgccacgcaggctgccgtcacccttccgggtgacataccggccttggggtacgcgtgccttcggggcctttcctgtgtttgggacccagatctcctctcctccagaaaaccttgacactgcccatcttcctcatccagaaggagcgttcgaggaatggatgaggtcgggatggaagaaacgggtgattcccttttttgaaagagcggaaaccggccgggcggtttccagggaggagcatctgttcctcctcgcccgtttttcgccctcgggctggcgagaactccctcaggtcccaatccgtggactcgcaggggtgaggtgacctcaaggggtcttttacgctgttctcggggtctctggagaactgtcagtcacctggatacctctagactgtatttacagttaactgtttcctcgttccgtgtttattaaataggggcactccaaggtactcttttctccatttggcttgcagtagaatgtgattgttctggctgggctattaagtttatggcataaacttccactagaagttctgcaagtttcctccagtctttgcaactgaattatctctcccgtctttttattatttaaggaatattgaaagtaaaagatggaatgatttggtgcgctaacaaaatcttaagtgttgagtatctgcattttttctacattaggatatcagaagcctagaattgttttttgattaaacgtttttctaagtgaattgagatagtttggaacttggaagagaggcagcatttcaaaataatttagacagcgttatttttacttaattacttaatatataaagtcctagtgttaactttttctcttggaaaaaaaaaagaatagtcttcaaacattagcacagggtttctccacctttgtgtaatgatgtgtgtacaaagaaatgagatggaactttgttttttctgttttataatcgtacaccataggccatgattgattccggagcgcagttaatcaaggcataatggcatggtaagattcttttatttgtaacgttgagtgtggcaaagtatagttaaaatcacgttttttcaggttaatgacaccgtaatgacttttttttcatattctacctttttttggtgtgggacttttgtccttcaggtcggaaaactcaaaaataaactgaaataattgtgacttcaataggtcattgtaactcaacattatcactaattttaatttttaaatatacattgtatgccggaaatgctacctttttattccattttagcagttgaagttgaatatctgtgttgaatttaggaagaggcctcaggcaattatacacacctgtgatttttaaaatatatatatatatattttagtttcactgattactgtgagcttcaaaagcaaagcacaatgttgatcatttagtctgaaaactaattttaattccatgcttcatttttgctccttgcatcacaaggagtttggcccatttttttttttagatgatggttagtatcagtcattaatgtttgaagtggaagggatatggcagacattccccaatgatcacagttattaggtatcagaggtctttatcagtcacactttctcaccagtgatgttcttattaataaaacagcattctaaatgcaaggctttggtgggcaagttttatgagactgatgcctcaggcagaggaaacaaatttattttcatgttcatttcaaatgttttgtggggagtttcagtagcaatgtcggtattttggcatacatgtag

SEQ ID NO: 1882345 - DNA, 4001 bp, Homo sapiens
gatgcatattgtggaagaatacagtagtggaaaatgaaatggagggatatcaagagatctggaaaagcaatttcatccatgtggacctcatctgaaaatgttaagttttagagaagaatctcaggaggtttcaattctgtaaatgtttcagtcaaaatcgaatttctaataaaaaaagagacaagggattaactcattttcctatgaacaaacaaaaataaagaaaaaggaagcagataaatacatcacaatcactcagatcactagaacaaaaacaaaaaattgaaggtaaaatgaccatatatacagagtgctggaatagcagatcagttaaataattatcaaatttagtgggcatgatgatataggcagaaatggggaggaaaaacctgccttatatgtactttcgcaatatgcccatattgtggcatacatttttactaacagaacttagcaaaataaaaggactcaaagccttctccattaactgtgatagattgttttccatttgagcctggggttgaaggtaaacttaacagatcaaaacaaaatatagacctaagtatgtcagtagtgctaagaatttgagcatgaatgtcatgtaagagcaaacccaagcaagtcggttattagaaggcagcaagtattatatcactctaaactctgcctagtaaacatgtgattggctcacatttttgaaacttgtggtcattttgaaaaaaaacatttaactgtaaaatttttttttttttttttgagatggagtttcgttcttgttgcccaggctggagtgcaatggcggatcttggctcactgcaacctccgcctcccgggttcaagtgattctcctgcctcagcctcccgagtagctgggattacaggcgcggccaccacgcccagctaattttgtagttttggtaaagacgggatttcatcatgttggccaggctggtctcgaactcctgacctcaggtgatccacccgcctcggcctcccaaagtgttgggattacaggcgtgagccacagagcccagcttaacggtaaattatgaggaccaagcactctttattttctctttcctcagtttaccttctttaaggcattactgcagactaagcctaaaaaaaagtaatttgttttcaaatgatatgatttactctctggcctggatttcaaagatgtcagtataatatggattgtatatattgtttaaattttacaaataacataacgcctattatagaaattttggaaaatacagaaaagtgcaaagaaacagaaaaaaaaatccttcatccggtcagcagagttaccattttcactttttagttgcgctctatattgtacttctatagtcgctacactactctaatatcctgacttagtcaacttttatatcacgagtattttcttgggtcattaaatagctggcacttttaaagtgtttacggagtatctcattttgtagtaatgctatatgtcctggtttttataacagtaagagaaaaagctacagcctattacaaaacacttcctatatcaatgcgcaaaagagaaaggtggacacagaaaaggggaaatgtaacgtgagaattagcaatagagaaagaataagtgagaatcgcttaattagaggcaagataatagggctaagtcacattattgattcttgactttaggacaaaaggggtacatgtcacgcacctctgttccaagtttgtatttgcaccttgaatggcgatttattagataaagtcgcggttttacaacctaagcaaatactgctaatcctcccccgactcaatccaccttgaggccgccttttaaatgctccgactcccttcagagaaagcctcgaggtaaaaagaaaaacctgtctggcaatccagacctgccgtcgccacgataaccagagtagcaggcaggtgtgtgcttactaaagccacggccaacagagcgaagatgcgcctacaccgcacgcgaagtgtcaccgtagctctaggaccacgcatgcgcgaacgcagattcgcgatccaatggctgagcccgtcacaggacagatgatcagggtgcgtccgccttttcgttcccgcttctatcctcctcccctttcccctccccatgtccctccttcttctccctcctccctctctccctccctctggcgtctccagccgactttcgcttcccgtcagcagcctttggcggaagagtgtcccgcctcttccgctctacagcggaggtggctgtggcggtggcgctggtggctgcggcggcggcggcggcagcggcgctcgagcggttcctgtcagggtcagccggcgggccccctgggtggtccacctgcaaatcgcggagcggcgccccagggatcgatggcgatgaactataacgcgaaggatgaagtggacggtgggcccccgtgtgctccggggggcaccgcgaagactcggagaccggataacacggccttcaaacagcaacggctgccagcttggcagcccatccttacggctggcacggtgctacctattttcttcatcatcggtctcatcttcattcccatcggcattggcatttttgtcacctccaacaacatccgcgagatcgaggtgaggggagggagctgtggtgggagttggcgttgctcgggaggagggtcctacgcgcccactccacttctttcccagcgcccagaatccagttgactggctgacctcgcgccgtccaccacccccttccctctgtttctctgttttttctttctctttctgcgggtttcctgaatttgcaggtttgtcctagctttgtcttgctcgagatttacgaaagagcaaatccacggaatgagctgagacggaatgaatgtttaatgcagaagataggtcaggtggagaacgcttcttcagtgggcggtttgtgtggttccgtgggggattagtgggggttgttcacggaggtaaaaagagaagtgggggcggggggcaattgtaactaggtagatgtaaccctgagtgaattgacagggtcaaagtgccattacctttgtgggaagtatcccaagacacagagatggacaccttggccattgttgggagaagaaccagagtcgtagaggtattgacgattctaatgtaaagaagctgtcgcatgttatcaggtcacatatgaggacttatgacaaatgtgcatagtacttttcattttgagctaattcgatatttttagttgtagggcaagatgtacataaaagataacctgaaacttcaattctggttttgcttttaggctacgtttattaatgtgccctacctttgctgggtttttgttttgtcttgttttgttttgttttttttttttacaaaaagagccagtgaccacactcagggagtaagttgtgcactgtctaccaaacattttactgatattaactttgctgaatgtgtaagacatgacaggaaaacttggggaaacatttctttgtcgaaagcacagtatctttatctgcaggggcgaagacggttgacagtacactgtattaatatatactctataggtgtccagtattaagcatctctcatcttttcttgcatatctgagaatttttttttttctaaatctatttgaaagggcaggaactagtaccaagttctcttgattccttctgttctgtttatacacacacacacacacacacacacacacattttaataaatatactttgtgatttaatgggactttgagagtaattttatttttaactactgaaatagggatggggttccagtttaatttgcagtgttatctctaaaagcaagattgatgtattttgtaattctacagtgcttacttcagtgttgatgacagtaataagaatagtatctatagaataactagttttaaagttttttactaaaaattcattctcaatttaataactagagagttacagtattttttttcagcatgtattttagtttgttttatcaccttaatctc

SEQ ID NO: 1882346 - DNA, 4001 bp, Homo sapiens
atttcatcggcgattatgcaggcatttcgctattgctagatgtgactcccacaccctctctcttttgggtctcatctccaaaaggggtgcttgttatgaggcccctcaacacttactgtgtggctgtgcttattcaaagaacatccagactattacatttaacttttttttttttttttgagatggagtctcattctgtggcccaggctggagtgcagtggcgcaatctcagctcactgcaagttccgccttccgggttcacgccattctcctgcctcagcctcatgagtagctgggactacaggcacccgccaccagcctggctaattttttattttttttttttgtatttttagagacggtgtttcactgtgttagctaggatggtctcgatctcctgacctcgtgatccacccacctcggcctcccaaagtgctgggattacgggcgtgagccacggcgcccggcctacatttaaaaatttttaagcttaccaaagtgacgaattagaagtatttgtatcttaaatgacttttcaatttacaaaagatggatcatctagcaccatataaggaacttccttattacgctttaaatgtaattcaataaacttctcgttcattgccaaagctgtttctatatcatatctatatcctatttattcagtggtgcctgttaagtgcagcaagcttgtgagatgggtagaagagaaggggaaaacatctacattgaacgtcttctgggttctacaaccagctatggtgctacacacacacacacacacacacacacacacacacaaagaggtagatattatctcctgcttacatgtgaggaagctggttcagaggggttaataaaatggcctggcatcacacaatgccagcaaaaaatcagcaatcgcatcccctgctgcctgacagcacagtttctgaagtttcacatccaagctgtttcctaggtaaccaccacacagcctccaggaccgtctgcataaatagggaggaagggggaatccagccagcgcctctcatttcctgcatcaacaatagtgcaggcctttgtcagggcgttaatgtggcgaaaacagccccaaagcttatccgtgggattctagttcaaatgagatatttccactcactgaagggcccgattcattgaggatcttgcctgtcagagcactgagcctgtttctatttttattcactcccctgccttttccttttctcccaggctttttgttctcgcagcaaggagtgagtactcctccttgttcacatgagcctgtgcccctcgagaaacgccaggatctgagcaacccacccactcccctgataggcaaagggctctgcagagtccttgccggtccccggccctgggactggccaggacaaggcccagggccggcatgactctgggtcacaaggtctattcatcttggtgtggcttctttgcttattgtgctccgtcctgtgatggtctctgcagggggccacagagacgtaaagaacttgctctcctttccctgttgcaagagacaggtctaggttgaaggactaagtgagcgagggaaatgagggtcacggcagcccactcccttaccgcctttaacaatttgatctccatccaaccgaagcattgcctctatactttactgagaagctcaaaggcactttgcttttatgagctgctctcttccgaaataaatattaatgacattcaagctcgtgggtgttgctgaaagccatttttctcggcaatattctgtgcaaagaacaggttggaaatgtcagtggccagtcatattatgtatggttgtattagtctgttctgggattgctgtaaataactacctgagactgggtaatttatgaagaaaggaggtttaattgactcacagttccgaaggctgtacgggaagcatggctgggaaggcctcaggaaacttataatcatggcagaaagcaaaggggaaacaggcatgtttcacatgacaggaaaaagaggaagagagccaagggggaggtgctacacactttcaaacaaccagatctcgcgagaactcactcgccaacacaagaacagcaagggggacatctgcccccatgatccagtcaccatctgcccccatgatccagtcacctcccacagggcccctcgtccaacactgaggattacaattcaacaggagattcgggcagggacacaaatccaagccatctcaatgattaacatcttcacttgcccctttcaaatatccatggtcagctgcagcgtggcgtaggtcgccatcaagaggcagccgactacactagctgtggtgctggcccccagggatggggaagggcagacacagatattcatcgggaagacactggatctagcggtttgagctggtgggtgaaggcagcaggctccgtctctggacatgatggtgcaccaagtcacactattagttctggatggggcagggacagggcagggacagggctcagtgcccaagcagcagggcagggctgacataatcccagggtgccacagctagtggctggatatgaggtggccctattgaataccagtgatacatttttcgggtgtggtgctgccactgtggttacatcagagaatgcctttgtccccaggaggtgcgtgctgaaacatttagggtgaagcgtcgtgatgtctgcaatctactttcaaataattcagcaaaaaaaaaaaaaaagcttacacacaaacgtggcaaaatgggcaaaatgttaaaaactactgaaggcagaggaagggtatgcagagactggctgtgctattctttcaacttgtaggttataaggctttttaaaaataaatttttgaagtttttccaaacgggttaatgattgattctaggcttgaaacatgaagcagttttccggttttcttcacaaatggcctagagttcaaaactagaataagtgatacagctagttactactactttgctgacttctcatcctaaatgtagtacagtccagacaggatggaatatggtaaactgctacctttaaattcaacgagttaaacagatatttcataaaacaggctggcgaattctatttttatcttatgttttcttgttctcacattttcaatgcttaattgtttttctcattcgaaagaatgttttatctgacaacccatcctgtggccagaagtgggagcatgtgccatctagagattataccgcaaaaatggacagcaagtcttctagatcctgcatggtcctgcttttgtagccttgagaaagtaatgcaaccaaccaaaacacatatgtggctacttgctcataattagcatgaaaaaaataggtattctgtattttgatgctcgtgaaaatatattatgaatacataactcaaataaataaaggcataaaaattagatgatgatgtctatttctcatcctagactgtaagacccataagggcaggaacagtgtctttatttatatttgcacccctggtgcctagccccataaatatttgttgaataaatgaaagtataaataaattagaaaatagaaatgtgggctgggtgtgatagcttaggcctgtaatcccagcactttgggaggctgaggcaggcagatcacctgaggtcgggagtttgagaccagcctgaccaacagggagaaaccccgtctctactaaaaatacaaaattagctgggcgtggtggcacacacctataatcctggctactcgggaggctgaggtaggagtatcgcttgaacccaggaggtggaggttgcggtgagccgagattatgcccctgcaccccagcctgggcaacaagagtgaaactccatctcaaaaaaaaaagaaaagaaaatagaaacgtgatgatggttgaattccacagtagccaaggaccaaggattacacaaatccactatatatatatatattttttttagcattaggtatatctcctaatgctatccctcccccctcccccgacccc

SEQ ID NO: 1882347 - DNA, 4001 bp, Homo sapiens
gatttcccaaggacctctgaccaaaaattcctgttgaatttttacaaagagatgttggtcagaggatacaaaatttcagttagataggagaaatgttcaagagacctattgtgcaactgatgactatagtcaataacaataggttgtgttattgaaaattaggagagtagattctaagtgttctctccacacacacacgtgaggtaatgcatgtgttaattagctcgatttagtcattccacaatgtatgcatatttcaaaacatgttgcacatgataaatatatataatttttgtcacttaaaaaactagtttagaaaaatttctattggcagagtctcaaaagcaatggtactcatagtgcccaatctcagattactaatggggttttttttgtgatttatttttttaaagaaaataatctcctgtctccttccatgtgtctccttcacttctcccagtcaaaaatgcatttctcagtatctcccttctctgctcattgaaaacagattcaaaatataagcccctgagaaaaaatttcttatgtaaggcatatttttaattctgttgtggcttaacctttggttataacaccagagccctgctaagaactatcagatctaatgtttaaacactattttaagactaatacatatttattacaatgtcccctgggtttctcttctgaatgagagtttaagccaacaatcatttttacaaacagagcaataaccacaaaatactcaacaaattaaatacatggcttaactatctaatctggagagaacacataaacattactatttagataatatatcttatttttttattatccaatttgcctcaacttcattgttttcctttttaaaaaataaggctagtattatcataaactggtatccatggtttccttttcattaagttctctttttctcattgtcttcactcatcttaaaaaaaaatccgatttgggaaagaggaagaaaataaggggaaaaatgatttacaaggcaggagcgagacatttcctctacatgacaccatggctccaaaagcattgggcagattttctacaaaggataaggaaagaactaaacatgttctatttcaaaatattacagactgattattggatgcaagatggattgcacctcagaaagagcacatcctttcgtcaacgcatactggccatagagtctcataaaacattttcaaatagctgagggcaagcccggagatgagaagtcccttcatgctgggtttccaggcagaggtcactttgccagtgagcttgtatgctgctcagctgacgcaggagttaagtaaaagcctccagcagcacagaaatgtgggtctttccctcagtgattcatcactatcagcaatcagacaaactgtctcataaggtctgagcataaattacttcatctccaccaatttaggtttaaagatcattaaactctgaatgcacttggaaaacaccttgttcatttgttacttactattaactctagaatattttatatggttgaccacaagaagacagtgatgataaaatactgcaattacccaaccataactttaagagaaatcctctcatgttcagaactcggtataattcattaataatatccatcaatatctatgaatataagaaaacagaggcacttacccaaatgagtaatttttttaaaagccaccatctacaatatcgtatttcattgaatcctcacaaaaattttgtgatatatggctgagactttaaacccattttgggataagaaactgagatccagaagggttagggcacttgcttaacggtacaccacttgttagtagcagagctgggatttgcaccagggttgttccaaattctagtccagtttcttcctaatatactaggctgtttaactcagatgatggccaggcttactaagaccattatgctcaaaaattttaaataaatataagaatctaggtaacagacaagttcttcctgtgcagttggaaaagtaacttcgtcttagaagcacttatccttttgaaaagatgaccttgtgaattacgtcaatgttgcgtcaattgtgtaggactcatggtcagtaggagagaaaactgatatgtgaacaaacctagtcatgctgggccttctctatttgtttccagctctcctttccatccttcccacctgctctgtgctctaggaggctgacctctattaaatgaattccttcctcactctctggggtttgcttcagccatggaatgtctttgcaggggccagcgagtgggagaggaggttgggttggactgtgtgcttcccctccctgttgcctgctggtccaagagttggcagtcactgcattcttccccagagacagcaatttgtcttcaccttcagcttgctcctgctctgtcccctgcctctccccctcccttttgccccagtagctccacactccctttaccccttctgccaaagaagagcctgagacaaaggcttgggtgcaggtgatctatttgggaactcagcttagagaagaggaatgaggggcaagaagagtgaacaacagggaggttcaaagccgacaaggatgaattactgagttggccattgctgttgtcaatgggtgcttcattcctcagaatcttccgtggaatcttatgaaatacacctcagacagtctgctagggaggaagacaaggaatgtgcaccagttgccttccgcccctcattctttaagagaagcgcaaccccactgattcacccacatttccaggttgcacatgccagaaggccaggcagggtcccataggcataggcatcccagcatcagggagggcctagggcaggacctgaaggcaccatggagcaggccattggcagcagccctgacggtacagctctgacaaggggaagggcagcaggattggggaaaatggagccctgccactgttactggggaaggcttcactgcccctagtttgcttgactttttacttaactctgacactcatggaaacagttccttctttaaactctcctcgagttccccattcgatgggatatctattttgtgttaaatcctgcctgctttactagcattctgtatcttttcaactattccttcaagactcttcctctcttttcctcattattctctatccccaaacaataacacctcatggttttatgcttccctctttaccgggttggggaatgtccccgagaattcatgttctttccaggatctcagaatgttatcttatttgaaaatagagttattgcagatgcaactagttaagatgaggtcatcttggagtaggatgagcctttaataaaatacaaccagtgtccttataagaagagaagacacacagagacagagacacacatggaaaacagctggtgaagacaaaggcagagactggagagcggcctctacaatccaaggaaaaccaaagattgccagcaattcccagaagcaactcccagaggctagaacaaaggcatagaacagactctttcaaaatgtccagaaggaaccaaccctcctacatcttgatttcagacttctggcctctagaactatgaaagaataaatgtctgttgttttaagccacccagtttgcggtcatttgttatgacagctctgggaaccacgtacacctccccatcaaggccctccttccaagtctcacgggagcctgacaaagacccatgtttcattttctctcagtccatcaaaacttatctgtcgtgggtttatccttcagagtcacagcctttgccaggtgacagtgggtgaatagactgtccttgctaatgctttaagcagctaacttgatgactagcaacacaatatacctcttttccttccaaaaactgaactctaagaaaacaacaatgacaatgtatctcttccagttaaactctgcttaaggaggctctttaagaacgcttaatgcccaggtaatggagagtgatttgggcagctcctc

SEQ ID NO: 1882348 - DNA, 4001 bp, Homo sapiens
tcatagacagccccaggacacacacagtggatgcattgtgttctcctgggttgcataactactttgaaagaagttttcttttctgtgtcataaaagaagactttttggctctgccaggatactctaccatttggccccatagacttcaagcatgcctgaagatacgtgccaatggcttgttggtttttgaagatcattctgatctctgctgagttacccaactggactcagaagggtctgacccacgtgccacattccagctgtttgcttgtttgtttttaatctcaacctagtttaatgggaagaaggtgagtcaccttgtgtgtatgtcagctgatatttatgtcatggaaacttaaaggggatagacttgaaattgaaaagataagattgtgattgaatgggccttgtataaactatgttttgtttttgttctcttgcttacttaccttgtaaacagattccttgagtcttaaaccaaggatcttaatctttggtatttacagagcctttcttccatgaagcagagttatttaggatgctgccagcaaatgagctctcaactggatctgtcgtcatcatcatagaacttactatggtctggtagtattcaaagtgcttacttaaattaatttctggaaacaacctcacacatttgactctatgtatttttccacctcatgatgaggaaacagacacaaaaaggccaaatgattttttcaaggacattcagctaggaaagggcaaagacaggcacagatgaagaaataatcacaggcacaaacgaggtatctgttaatagagatcctaggaatctgtgactgtcaatatgaattacaaatatgaaaattatttgttgaatcaacaaagtggaaataaaactattttttcttagctgatttggtaatgactaacagtcaacatacctattaagtggttttggttgaaataatttaatttgttgtcaatactagttcccccctttaaatttaatgatacagttccaatatctagatgaacaaataaagataggagaaagaattctatattttagtcatttctgcttatggcctcaatttcagattccagaaatccatagctaagtagttataaagcaattacagttgttagagtagcccaggatggctggacaaagttgaatatttcatgactaaaaacaacaacagccaggcacagtggttcacacctataatcatagcactttgggtggctggcttaagcctggagttcgagaccagcctggcagtaaactgagaccttgtctctataaaagatacaaaaattagttggtgtggtggtgtctgcttgtagtcccagctactttggaggctgagatgggagaatcacctgagcccaggaggttgaggttgcagtgagctgaaatcgtgccactgcattccgtcgctgcactccagcagcctgggtgacagagcgagaccctatctcaaaacaaaacaaagcaaccaaatcaattctcactaaaaataaacatacctaagacatcatcgtatattttaaattctttctaattaaagcaatgttactaaatatattttaaagaggcttgttataaatgaaatacttacaaggtcattgtactgaattcaaaatttttgttatatggaagttgtagaactttgggattatgaaatactaacacaagtaaaaaatataaagtccaatctttgaaaagaagatactttgtcttagtcagtttgggctgctacaacaaaataccatggatgtggtggcttcaacaacagacatttattttctcacagttctggaggctgggaagtctaagatcaaggtactggccgatatggttcttggtgagggcattcttcctacctgatagatagttacctttttgctgtgtgctcatatgatctttcctcagtacctgagcatggagagagagaaagctcctgtgtttcttcatttcctttgaaagacattaatcccatcacgtagtccccaacctcatgatctcatctaagcctaactacctcccaaaggccccacctccaaataccatcaagatggggattaggacttcaacatatgaatttgggagtaacacagtcagtccatagacacttctaggaaatcttttccatgtagtccagatgcatctagcatgcaaaccacaacaggctacagaagtgacttgagggcaagaagaaagatccttctttcagaccctaaactcatctttcatgggcccaggaaggagcccccagcatggaggatacccaaagactgaacaataatatgaggcttgaggctcacaaataaacctcattaagagagaactgggaaaaatcagagtcagagaaagaaggaaaaaaggtatggcggtgggtaatgggatttgaggtaggaaaggaaatgggaaggagcagagcactaggagggaaggggaggcgaagggggaaggtcaaaggaagagagagggaagaagatgacaagagcgagcatagtttcactttctcagcattaaaatcctgaaatggacactctaaaaataaaaactacaggaggtggggattttacctgtaaataatttaaaaatcactgagcttcctgccatgatagcgcaggctatagattccaacaatctgaagtgattttaaacgtccctctctagagaataagtaataacatccatctcccccatagaacaaaattccctttcttgatggaactgaatggggtcagtggcatttttttcttggaatcttcaccagcccaaactatagacataagccaactttcacagaggctagagattgttaagctgtggcttgtcacctataacccatttttataaaatgtgaatgaaggctactatattgttagtggccacctgtggacataaagaatttataagagaaaagtcaataatgtcttaccatgtaagcacatctgaaatactgatatgatttcagcattaagtaaacactaaagcaaatttggtgactagttgtatgtgtgatacacatatacatatgcatgtatgtataccatttaaaaagaaacaccaaaaaagtttaaaatacactgattttatgacagctgaagagctaattgttgctttccactattaaaacttggtaaataccaataggagaggaattgctcagctttaggaaggggtaattaggtttaatggaaccagttgagaagaggaacattaagcctgttgggaaaaatttcctcccaatgaaaactattagataatggaatcactttccaagagaaatgcctgaaatcctatcactgaggatatttaggattcagctggacattacaagacattccatgtctcagactttatgcccttttatgtccaaaatatgttagtattttatttgatgaaatatattccaatcctttcttcaggactacatatataaagagactgtatatgtgtataaatatgcatatatagtataaatacatacatatatgtactatatttagactgtatatgtacagtccaaatatacacataaatacacatatacatatacatacgtactaaatatacatatacatatgtactatacatatgtagtctaaatatagtacatatgtgtatatgtgtatgtagagagagataggtagataggcaggtaggtagattaattgataaatagataaatagatataagggagagaaacagaaaaagaatcttaagattcaaggttcttttctgtttgtttttaaacttgcaggttacaaatgaaaacactaaaaactgtgattgatgaacaataaagaaatatactcagataacaagcacctccctttttcttgttatactaatttcaccctcaagagtcagaagcaaccaggtttgcatttattttcagttagtactggttgcttctgagaataagcccaactattaatctgaaattccaataaaagcaccaaaaaaaaaaaacctcagatgacaaaaattaaaaatgtt

SEQ ID NO: 1882349 - DNA, 4001 bp, Homo sapiens
gcttgctctcagcacggaatccaaactccttagcacagatacaatgatcttcaagctcaggtggagaatctaccaaaatcacaatggttcccttttgctgcaactggccctcccacccacagggccatggcagccatgtttacaaggcatggtctggacacctcttaacagtttagtaaaccaaatacggacccaagatgaccctctttaggatctaggaatctaaatgtctgtctctttaaccaggaatgtctgtctctttaaccatctcctttctctcaaatgctggatataatggggctttagtaaatgacagctggtagatatgcaaatgatttctccaataggaaaaacattcctcccgaggttatggttttattgctctatgggatattaaccagttttgtttctaactttgcaatctattccagcattctttttttaacattgactatattaaactagtcttttaacttcttctttagcaccctgttggttccctaattaatgagctaagtaaatctttgacacatgctctttctatatttttaaaattatagtttgaaaaagataagctaatttcccacaccccactcttttctgtggtaggtataagcctgagagtagtttgcttgcattgcaaaaggtttcactatcaaaatatgcttaccagtatgagatttaaaaaatatttccatgacagctgtttcatcttctggaaatgaatgagtcttgtattatctgcaatatctgattactgcatttccattacctctgaggttatctaacagccttggagagagtcaaggtctctgagagaggcagctcagcctaccaactaccactttgtaatatatggagaggccaggtgtggtggctcacacctgtaatcccaacactgggaggccgaagcgggtggatcacctgaaatcaggagtttgagaccagtctgaccaacaaggtgaaaccccatctctactaaatacaaaaaattagccgggcctggtggcgcatgcttgtaatcccagctactcgggagcccgagacaggagaatcacttgaacccaggaggtggaggttgcagtgagccgagattgtgccagtgcactccagcctacgcaacaagacggaaactccatctcaaaaaaaaaaaaatctctttgggataagcccaaattgttctatttgacttttggtgttgccccatctacactattacccagatctacctgatgaaacttaatgataaagttacttgagacttggactctgcccacctgcaagcctcctgtctttggggaattcacctgattaatctttctgggtctcagtttccacatcagctcaacagggcaatatgctcaacagggcaatttccacatcagctcaacagggcaatatcattttccttacagggttgtccaaagacttacaattagcctggctcactataggtagtccacaggtgtcagctacataaatctaaaactcctaggcatgcttggatgggacaacttgggcacagaatttagaggggtggttttgtttcgttttgttctgttttgttttttggttctctgggaactggacaaggtgacacagccaaggcccttccaactcttaagaattcttccccaaagaaaatactttgcaaatgcctcagcagaactcaaaaatatccacaaactcttcactgacactaaaaacttgggtactccaaaaatcacttctgacccccaggcgtcctaccaggtctgcaaaccttcgatttggggatgcatgacctagcagcttttaagcatacgccctcaattgttaccccacctcccggctcagggctggccctcgggatgcagcgacccctcctcgccaggctccgcgggactccgggcagggcgctcagtgctccggcagccacagggttcgcagagctgaggtccgcccgagagagcagccgcgcctccagctcgcagttactcggagccaggccggggagcatctgtgccccgccccacgcgccgcgcaagtcctcccgggatcaccctccccgcgccgcgaaccccccgcacttcctccactcccgggtgatacccggcctcgctccggccccgcccccgcatctgagccccgactcctaaccgcctagagctcccgccccgcccacgcaccgacccccccggccccacccccgagcccccgcagccccagaggaggccacgggctagcgatggcgaatgcggcgtggctacgctctcagcctggccccgccccaaccctggccccgcccatgccccaggctcctgcctgggctctgctctcggccccgccccgcacccaagccccggccccacccccgagcccccgcagcccgggagcctaggccccgcccccgagtcccggctccacccccgagacccggccccacccccgagcccccgcagaccgagctaggccccgcccccgagacccggccccacccccgagcccccgcagccctagagccgcccaagggatggcgatggcgtacttggcttggagactggcgcggcgttcgtgtccgaggtaagcttggagtcccggccgttcggcccatggtcgcccgcaggataccgctgtccaggcgaaggtcgccgccgttggaagaccctccttccctattgtctaggtggcaacaggattttgctttgctggttttccggtgaggtagtgctaaaaagtgacgacctcacgcgcgccctcctgcaccgctgggcccggagtggtcaggatgggcgcgtcgggaggtcagggctatggttccctgtcagcagtccccaaggtctccgcctgcctccgcgcacgctcccatcctcctggggccggactccgggcgggtgagccgccccagctgagcacccgggcctgcacttcccagccgggctgcttctggggtgcaaagcgtcgcttgctaaaagcgaggtaaacgcaagccgttatcactcgtgtggacttaacactctgcttcttggagaacacgtatgctataaagtgaaatggccgggtacagagtaacggctaagaagcacgctgcacctccctggggtcccgggaacccgcacgaatctgtgcatagggaacaaaaccgaaacacggtggtggccttgaagtggtagaattatgagtgattttcccgactttatgtattttcttaaatggtcgtgtttttgctatttgtttttaaaactcacgctttatttaaaaataaatttgttccacattttgtggaaacttgtacatttcggctttctgtggatattttaaatttttctttcgttttctacgtggaatttgccatataagatgcagtttttccctttacagaaaatcattttaatgtaaaacttactctaggctgatcttactgaatcagttactaatagtccaaagtttgaacctagagttcattgcaccattttcgagttacataattgtgtttgtgtgttaggtttgggctttgtaacctgtattattttaatcatcttttttgccattaactctattattcagtgtcatcgtcgtgaactccatttttagcttgtggcctgagtcctgtgcattcaagtttgccaccccacccccgctcactatgtgtgcttaaaaacgtgctgatcacccccgcggtggttgctgtttctgctctgttcctggctggctggttaaacatacccatagaaaggggcacgcctgctgagcccccttcactgactcccttccactgcaggtagattccctcccatctgctgagaaggctgtggctctatctggaatgccagcaactgctcgtgtgttcttttgaatatttcttgtatgttcacatccattctcccctccttccacctgtgtgtatgttggaacaccagcttcgccagcaaagaggcaagaattgacctgatatagcttatggcttatcagtgagtgcagaggctgtttcaggactttgggacacttcactaaattctgtg

SEQ ID NO: 1882350 - DNA, 4001 bp, Homo sapiens
tcctctttagaagagataaatacttgtgtgtgagagagaattgtgcagagttcagaactgcgatggtctgaaaagttcccagggtttggtgaacctaccaacctagcagtaaagagggaggcccaggtctgtaaatcagggggagctgggccttggagggaaaagggagagagagtttgggcggtgtgcatacataccttcttcgtccaggactaaggagctgaagctcttttggagggggtagggggtatgacttaactgctcatttctggcagctctgttggtaatgtgtgcttgttcccccactttccctttgcttttgaggctgcttagagtctctgggctggtcaatgttcagatccattccctaaacccccctactcccacccaccacctcccaccaagacgcatctccagctcctgagtcgacctgcagtacagcgttattagtctttttatttgcttattgcatcttgggagcgcgtgggtgggtgaagggagcgaggataggaagtctatggagatttacaccagtttttttttttttttaaacaaaaacacagccagataattattattcttcccttacgtccccccagcccccacctggggcagtcgctctcccggctgcgtcccttttcgtccatgtcctagcagagactacagagcagtacagaggctctcgctgaaaccagtcccaggctccacagagtcagatcacggcttcacaccagtcgttctggtcacttaggcgttcgcgtgagcgctcaaccccttaccgccacctcatcgtcactctacaccattctgagcgcaaaaatgttttgattgagacaaatttagaccaagcaatgaccttgtaaacagagagaggggctcagacatgctgagaaatccttatctctagagaaacgtctttaaatgctaagtaaaagccctagcaagtaaaagccctgaggcactagggtgtcggttaggggtcacaggcggagaggtggggcgcctgggggtttcggtagggagccacccacagataactcagacagccagattctgggggtcgttcaggttgaaagactggtcgaaattacgcgggcatgagtcagcgcatccctacgcgccctccgccccttgagggtgggtcgcttatagggaggggagtagagtagggcaggagaaactgggccaggctgcacttagctcaaggggcctcgaggactctctgcgtctctggagacaagggcactacacgcacttcagaatgaagagttgtaagtcgctgacctggggcggactggagggtggggtggggtgggtgttgaggggcacgcccgggctggcatcagccctccaggccaccctgccactcacccagcacacggcaaaatgcagaggactacctttccctggtccgccccctggccgccccttggggaatgcaaacttcgtgttctgctgcggagccagacgcctgtattgggaagtggggagaatcaaggcggggaaatcggacttttgggtcgctgggggcaacgaagcctggagaggccttctttccattcccagaatatgtttgctgctttttcctctccccactggcctaaatggatcgctccgcctgtttcctccccagcacctagggcgcaatggaatattccattgcccctcctgtcctgggtctgtgttgcggggaacgctcgcgcggttgccagagaaagccccggacgtgacggatttgcgcgaccccaagcagcccgcccttccccctcccatccgtcattcccctgcgctctctttcctcacccttccccccgccaccgtgggttccagacttgggataagtaaacagcgggtggagcgaggcctacggacccaggccaggtgggagtctgcactcttcaaggggcctgggctgctgctcacgggtattaaagaactccgcgttgttcatggctgaggcgatgcattaggaagatcctggacctagagaacaagtcccccgaacgctgagttggaggcgggacttcgggtgcgcgttggtgcgtcaacgtggtgggggggtgtgtttgtagggagagggctggagtaagttaaaagtaggctattttgtgacacggacctggtgtgggagcgagaggaggtggcttgattgccgggcgtctgttccgagggaggagggtgttgccatctccctcacatgcccttatcacccctttctcaggcgggagcatgctggggctctgcgggcagcggctccccgcggcgtgggtcctgcttctgttgcctttcctgccgctgctgctgcttgcagcccccgcgccccaccgcgcgtcctacaagccggtcatcgtggtgcatgggctcttcgacagctcgtacagcttccgccacctgctggaatacatcaatgaggtctggcaggggacacctgggtgcagggcgttagaggcgtctactgtggcaggggagggagagcggggaactgaaagccacccctctgggcctgcccagttcctcagggagctggtgctggcgtgggggagagttgggggacgggatccctggttctagcagggtacaatagacctgtggacgcgggccagggggtggcgtgtgggagcttcttagcctatccccggtggctgcattgcccccttcccacagacacaccccgggactgtggtgacagtgctcgatctcttcgatgggagagagagcttgcgacccctgtgggaacaggtgcaagggttccgagaggctgtggtccccatcatggcaaaggcccctcaaggggtgcatctcatctgctactcgcagggtaggcgactcccctgcccctaactcctaagccctatctgaggcttgatccttatctgagggacacttcctagcgtccctttttctgaaccacattgctccaggcacaaccctggtacctgagcccttcctttctgacttccctcagcacctgggtctcatctctgtcttgaatgggagggaggctccctacactgctgcccttttgcttcctgttacccatggttcttggacataagggctaatggggcaggtaaaaacatcctagaactagaggcaggaggcccagcatctaattcgggctcagtcacttatatgatgtgtgaccttttggcacagggtgtgcctgccttctgtaagcctcagtctcctttgtgtacagtgtgtgtctgtgtgtgtctctgtgtgtgtgtgtgtgtgtgtgtgtgtgtgtgtggtgggggtggggggtgctgctggctttgctgtccttaagtgcctgcccaatgtggtgttctgcttacagggggccttgtgtgccgggctctgctttctgtcatggatgatcacaacgtggattctttcatctccctctcctctccacagatgggacagtatggaggtgagtgggcactagactccatagaatgccctgagttttgggggaacagaggtttatggtcacttagcattgccattcgcttgccagacacggactacttgaagtggctgttccccacctccatgcggtctaacctctatcggatctgctatagcccctggggccaggaattctccatctgcaactactggcatggtgagtggggatgctgaactggggcttccatggatcaggtcagttgcttccacctctgctacaaccaatagcagtgatgacaataaagataacttacatttattgagttatttgaacaggctctgttcagaattttttttttttttgagacggagtcttgttctgttgcccaggctggagtgcagtgcaccatcttggctcactgcaacctccgcctcccaggttcaagtgatcctcctgcctcagtccccctagtagctgggattacaggcaggcgccatcatgcccggctaagttttgtattttaagtagagatggagtttcgccatgttggccaggctggtctcgaactcctgacctcaggtgatccactcgcctcggcctccca

SEQ ID NO: 1882351 - DNA, 4001 bp, Homo sapiens
gcccttctgtcttcacatttttcatagtgtttatccttaagcttagcaaccaaccaaacttcgagtggaatatcaacattcaagagtaaaatgtattattagttttctaattgttccacaagagattgagtttgtgtagtttacatttttgcactttctgttttacttatatcctcaacgcatgaaattttggcctgttcccctttactattcacaaacttccaaacactggtaaaaatgcctttgtgtgtctttaattcacgtaacagatttgtgttatgttaaatgttagtgaatatataaacctaagaatacaaggataattttgttaaagaatcaaaaagtatcaggacattcgtttgtcttatggcagagacaaattgaagttccccaccaagatatacgtattttggatttgggccagacagctaaaaaacctgtttcaacttaaaacccaaaaaggttttaagttgaaaaaataatgctgacttttgctgaaagtaaattttaaacaaaggtttttttttttaatttactccattaaaaatgcatacatttggacagagcgagactctgtctcaaaaaaaaaaaaaaaagcatacatttgtagtcacagaattagtttttgttttgaccttgaaaaggacttgaaagtatttactccaaacttactttacacatactaaaaatatagtttttgaaaaaagaaagttgatgtggcttttcagacaagggaatggtaggtaatgttttgcatcagctccgggtcttgggtgatctccaccaatcagagatccttcagagctcgtagggtctagaaagatcattattttacaccctcattttacagacaaagaacctgagacctgctagagtaagtgacttggttaagatagggagcgctccagagaccaggtccaagatcttcccccgtttcacaattagaaggcggctgtctagaggtcattcccttccttatgatcctcataaagttaatttccagtctcttggagagagaactggacgatcgcctggcttagaagttttcctccctccccgaaccccgttttctcttccatttcttccggtcgcgtgtccccagcgcccacaggtggaaatcaaccgcccgcggggttgcggggcacaaagaggcagctagcggctccgctgaccccttcccgccggcctggacgaagtctgggctcgggagccgcgtgatgcatcccaaagaaggcgcagaacagcacgtgttctccccggtgcccggggctcccacaccaccgcccaatcgctgcggccgcctagtgctcgggccgcgcctgccggccgcggggactccgggcccgggtattcgcgccgccgccgcccgccatgcgcttccgctttggggtggtggtgccacccgccgtggccggcgcccggccggagctgctggtggtggggtcgcggcccgagctggggcgttgggagccgcgcggtgccgtccgcctgaggccggccggcaccgcggcgggcgacggggccctggccctgcaggagccgggcctgtggctcggggaggtggagctggcggccgaggaggcggcgcaggacggggcggagccgggccgcgtggacacgttctggtacaagttcctgaagcgggagccgggaggagagctctcctgggaaggtattgccagcagacgcctgcccccggcgcagagcgggagctccggcccgcacccccaaccggggcctcggcctcgggcaggccccgcaggccccggcggcgcgcgtcccgggctttttgcccgcgtccctgcgcactccccgggcgacctgggctgaccctgctctgccggccacgctgtcgccgccagccgcgcctccggcttcctactgattccctagacccgtatagcgctcccggccgccttcccgcccactctgttgcctgcccctctgacctggtttccgcacatccagtcctcagcttctttccaaccgcgcctgcgtcacgggccagtgcccttcgtctcccgcccggggctcccttcgccctccgagtgcccctcgacctccgagtcccccccttcgcgggtcccttggctgcccggccgcgcgccgctgatggcttcaacagcccaactccgccttggttgggttttgtgtcctcattttcctgctctaattcactaaaaaaaacccaaaacgatccaaccaacgaaactagcgttttcgctaatcctagacagcaatgtgctacttagatttttttcatagatattgagaatgaactaatggaaaaacgttgaatatttccctttttggatttttttttcttttttaatcccagatatatgacaattgagacatgacctgatttcttaaaatactaaaacaatacatgctggttgtaaaataataataaagaaatgtacatagtgaaaacttacagtgtttcctccacacatcttaagcacactgcttgtacacatttatgtatgtgatatatgcatatactttttttttttacaaaaattgtatagtaattctgaatttttgcttttcttgcctaacaatatgttagggacatctttcactgtcactacacgtagatatgtattttacatgtagatgtatattttaaatggcaacaaattattctgcatctaccaatgtgcatttaggttcttttcagttttcctctgtcgtaaacagtagtggcttaattgaaattccttttacagatatctttgaacattcgggagtgtttctgcagagtggattcaaagaagtgaaattattaggtcaaaatgcagtcattttttttaacacttcattaaagactgctaaattatgccctaaaagggtgattatctaatgtcggctcccgccaacagtgtctgaattgagacagctcctttctttaaaggaaatgtgcaaggttgtagactggagtgggtgtgactcaatagttgaagtcaatgaaatgaatgtctctttagaagtttatatgaaaaaaaaaatgggccatttagcctgtaatgatgtagaaacaaagaatcagtaaagaagattagagtggaatgtgtttatatattatccttgttctccttctctacctcactgggcttatggtctggtagcatttattggtctgttattttaccatgacagaattgaaagataccctcttcagtttatcctttctttacagagtattactatttttcatagtattgtagaattattttttaaaataatatctgataattgtaataaaaatggaaatggtgtgaaacaaagatcttccctttccctagttatttagcttttctgatagtcctccctatgccgttaatagtttgcttatgttgctatttcttaaggtaccacaaacttttgtttttaatttttctaatagttaccatataagttatatataattttaaaagttaaaattaggcaatagatattgacacctactggatgctcataaaattaaccatcacacttgttatgaaatatgaggaatttagctcaagttcactctctgtcttccctgctgatttttttttactattattttcagtttttttgataaatatttttctttactatccaagcaggaattattttcagttttgtattaaaaattgactgttgactttctaggaagttactcctataagagaggataagaaaaatattacaatttcttcctgtctcactttggtttattatgacttttacattatcaagttttatataatttatattctattttctaattgttacagtgccttcttgtttaaggtaaatagactgattctaaacatcgtaaattaacagagagctttatgagaagcagggtagccaagtgtttaagagcaaggattctggagccagattgcctgggctcaccaaccagtgtgggatttgaggcgtgtcacctcagctcacaatgaaaggaccaagctgcctaataaatgaactgtattttgtagaataggata

SEQ ID NO: 1882352 - DNA, 4001 bp, Homo sapiens
actgcaggagaaaggactggttaggcaacagcagacatccaaatttgtttaagacagtaatgttaaaaaaaaaaaaaaaaacttcagccaaattaaatttaaaggagtttgagcaacgaacaattcacgcatcaggcagcctcctgagccagagtaggctttgagactccagcgcagccacatggtggaagatgatttaggacagaagaaggaaagcgacatacagaaaacggaactgaggtacagaaacagctggattggttacaggttggggtttgccttatttgaacaaggttcgaacaactggctacatttgattggccaaactcaatgattgacagaagtgtgggctatggtctgtttactcctccacttattatagttcacggtgtacacagaaacctttaggctgaacgtaaaatatgtaaggaggctgctttaggctaaacttgatttaacagtaactagggatgaaggtgaaagaaaaaaaggattttaaataattgtctggacatggaaaattattgagatgaagggacaaagaagacaatgaggtttccaacctgaatgactcaacttcaggcgagtgagggtgacctagtgtcagctaggtgacttagtaaaaggtaaagccccagatctcaataagtataattagagattcacagaattttaaagctggaaagggctctagagataatctattttagatcctttataagaggacagctaaagcaaaacaaaggtctgtgactcaatccaggacagtgagcattgagcggggctatagtgtagcagcacctacatcctctcccactgggccatcctgcctgtttccccatcctgaccatgtagctctctggacagtggctctcaaggtctgaaccgaggaccagagcctgtctacagccaaatcaggcaaaataaggggaacagataatttttcaaaaagttaatcatttaaggaatcaacctttactctgtaatctaagttcctaactcagtttttgttttgttttgtttaatttacggatctgaaaaacccacaggctttctctgtaggatagcaaattatgtgtgagctctctttcccaaagcacaacagcaaggggtaaagatgcagccacaaaaaggatgacaacagtgttttcctggctctgcccccatccccactgccaggattacaaccatctttcctttgttgtaattctcttgcgacggggtgggcaggagtccccgacagaggggtgggggcgggtgagcggctcccaacacccagagctcggaatcactgtccctcggccgtagaccaaggcttggtggtggtagcgggggcgtggacatccatccattctttgatacagccctgtgggatttctttactccccagtcatatgtaaggtacactgcaaaagcggcttcaagtcccctccccagctaattaccttcgcggaatgacgcctcggcccctcacagaagcagaccctggtgggctgtcccgtccgggctccagagaggctccgccgcccgccgggatccagggctgagctctcccggggggaggtaaaacccgacaggggataacgggtcacagcaccgtcctggcactaagtcacgggacttgggcacgctgagttagccggcgggaaggcctgtggcggcaatcaccaaaggtcgagcaagggcgcacccatttcctccaaaaatgagctaaagggaaagcagtgccccagagtcaagggatcggggctgctgctccttcgactagcggcgcgaacaagtcatgctacttgggcctgtttcctcaactgtaaaatgaggggtctaggattccctctgggaatgtacgattctaaaatcgaacagggtttggtagcaccgccggggcggagccttacggggcgccgcgggaatccaacgacaggactcgccacagtgggagctctctccagaccctactctagccacgacgctgcggggtcagagggcggcgtgcgcgtccccgccgggactgcgtgcgcgtccccgcccagctgtcggcagaagccgggccgggtgggcggggcgcagcggggcggggcgcgcgaggagggtggctgcctctggagcaggccgggagaagagaaaaggcggcggcccggctggggaagaggggcggaggaggcggttcggacggctgtgtggggtacggagcgtcgccgggacagagcggagcagctgggcacggcgtccagggcagctagggcctgggccgcggttcggccgcgccggccggtgagtgacgggaggcccgcaggggaggccggcgccgtccgcgctgcggcggggacgaaggcagcggccgggcagtttgaggccgcggccgggaccgaggcgctggcgctggcggccgtggggttgacgggcccggcctggagcagaggaaaggcggctgaccccggtccatgcgcgtcccgggtcggccgtccgggcgccctgagagggcgtccgccgcgctcgtgtcctcgccgggccgcatgccgggccagccgttgaggtcagcaaatggcgacttaagcctcgagggcaccgacctccgtgtcccccccagtttgtgtgtctttgtattgggaagggacgaaggaggagttaaacttagggaaccctaagcttctcgttccgtctggtttttagaaacttgggttatttggggacaaatggcttaaagtaagactggggaggcatcatccactgtctgcacgggatgagcaaagttggtaactttgccattcatggaagtgagaggatcttagccttagcctcggtccttattaaaggggaacttccttattttgcagacctgaggttatttgtgttgttccaagacctgcgccttggaactcctttgcttggaaggggtttatagagcgcgtgctgaattcaaagtaatctgccagtatgtttttaacgggtatatttgggagtatagaggcaaagaggcaaaacagtatgtgtttaccaatgtcctagtactccatttccctctccctttctcttgtttttcttattgagccctgttgtaagtcccagataaaagatgcttgggaacgaattgaccttttattccatgattacttcgttgactctgatccaagatgaagttatttatgggcattctgatatcggtgtagattaatttaaaatcttttaatacaaaatcccaaactttttaaattttaatttccatttgctaaatttcaatactgtttgttctttagagacctatggaaattatattaacaggttttgcatttgctcatactaaggttttccaaagcagtccaattgttgacatggcaaaaggaaaagagtagcataaaataaacctttaggatttttcagagggttagatttcaatatgcggtttccgctgaatcactcttcttcatgcttagtcactgtttctcatcacaaaagtttaattggggataacatggtgttttgctgactttttaaattgccaatttgtttttacctagcactttaatgccgtgacgtaacttttttttttttttttaattctggaaatggtggagtttcgtgaatgctgtaagagaactgaagtttcgaatataggcaaactttaatgtataccaagtgtactaggtatttaatttcaatccagtatttctcccggtctagcattgggagacttcttctaaaaagtgtcctaatatatcattaaaaagcaatattatataagtaatgctaacgtgtatagagaggtactttaaggtcaccaaaataggcattggttaatgcttactgtttgatataacatgtttctaagatgtgaatattttaatggataagcgctatgctattctgtatgattttggataaatattttaattcagttcctaagactgcttatttgatagaaggagttagtacatattatggaatgtcattgtatttgtagaattttttgacataaaacaattgagtcaaaggctgtataa

SEQ ID NO: 1882353 - DNA, 4001 bp, Homo sapiens
aaagtacaccaccaagagtggatctgtaaactacggactttggttgataatgttgtgttcatgtagctttattcattgtattactcctgtgtcagactttgatagtcagggagactatgcatatgtgggggcaggcagtatatgggagttttctgttctttctgctcaactttcctgtgaacctaaaagtttatatttataatgtcacatacaaccattgagaggcagtctagtctagtggggactccaaagccaggttgtctaggtgtgaattcagctttccacttgttagcttcagcaagtcatttatttaatctttctgtgctttctttactataggttaattatagtacctatctaatagagttgccatgaaagtgaaatgaattaatgtataaaaattcattggcttggagcgtggcatatactaaatgctcaataaatgttagcaaaccaaaattctgatcttatttaccaccatccttaacattagctaccctttagcctcactcctgctctccaaaatcctcttcaagctcagaccccatcccataaactctttttctctctgtattttcttcttgccattaacatttgttttgctagtaacattttgttcttctcaaggtaaacaacatgaggctgtttgtcacttttcatttttttcctcatttattatgcttccttcttcacacaaactgacaaacacagaatttctcttagcagtagaaggaggaatatgtggctatgagaactcagaaacagcatctagaaaagtaacaatatctatatttggtgttaggaaaatggctatgttgattttggtaacagctaacatatattgagtatcactgtgtgccaggcactgtgcttaggtgttttacatgtattacctcatttagttctcagattaaatcctgtgtttttccaacttttcaaaatttctgcaatgaatatattgcttctataagctgaaaattttatttgtaaatgtatattcacaaaataataaatagtccctgttaagatgaaagtcatcagtttgacgaagattctaggaagtactcactaataataagtgagattttgtttaaagggttggggatgctttacttggaaagaaaggggatcctggagtgcattagacatgctagctatttttacatattttaaagatagttagaagaggaatttgacttggtttctttggcttcaaaaagtaagggagaactaatgattaaagggaggcaagtttttgctcaacttaagaatgccctttcagacaattctaacccaaatggcaattatctaaatcaacgactaattacagatttatgcatccaggggaaggctgaacgaggggaagcctaaggtcattttcaattctgaaattgtgtttatgttaatgcagattaatcagagagaagagccaacgtctcgtctacctttttttgttgaaaacaaacaaaacgtgattgtatgtcaactttggaaaaaaacaacgtagtgtgggtaagtgaagaatgattgtgaatggactgcttcagtgcaatcgtaatattgttatcagaaaatcaaaaggcataaaaagcaaaaagaaaacggcttatttatgcagcaattcgaaagatgacagaacacaaacctgatttaaatgttattcactccctccctcagattggtctgcacacctccttcctttaatttcccgcactctcctatgatcttttgcataattcacattctcttgccatgagactcagtcctgttcctatctgtgccacccgtaagccacaggcttccttacccatttgagttgctttattccgtaaagcagagacttctactggggttaactttgttgagcaacagatctaccctagattgcgattcaccttcagtcccgtttgctgtaggataccaacctcccactcactgtgtcatggctctcacacaataggattccttgcagcccgaacccttctgtcctcaggtctgatggctgcaaatcctggcaaagctgtgaagcccgcgcagggcaccctcagcggcctgggctgggccgggcgcagggctccagccagagggcgccagcgcccaccaagcgcagaagcccgggaggaccatccaggggctccccgacatttcctcagttagccagagtcggggggctcagacatctggtaagaagagtctttctcccagtactcccccaccacagtttgcttctctgaccatttcttctgggctgtcgctgccccctcaccctcagcttagtatgggaccccgaggagcctcttcccgctgaggccgggactcctgcagccaggctcccacgccaggtgcccggaggctcctgcgccctcccgggcacctgaagtggaaaggagggggtgcggggctgagggcagggtgagagccccggaggtgcggtgggtaggggactggggagggcgccgggtcaggagggaggagatgagaagaggccagacaggggctttcggtttccctgggtctgattggaggttggcccgatgagtcggagctggggacgcgcccatctccgccggctcctgcgagagccgccggctcagcccctccctggagccgctttgtcccgggtgacggcggcggaggttgcggggaggagcgggcagcaggcagaatcccactgacccacggcggcagagagagggaggcggggcgcgccgcgccgcgtacggccccacgcaaaggcccgcgggcaccgcgccgcccccacgcgctcgcaccggcgggcaggtgagcaggcagcgccgcgcgctagcagctggcccccgtagacgccccagccgccgcctccgcctccgcctccgccggcgcatcgcggacgcccagcaggtcggttatgtaaccgcgccggccaggctcgcccaggcaccccgtcccgccggggctgacagcagccccggggtcgtgccgggggtccgcggcggggatctggtctccgggccgggtctgggtgcagggcgggggcgggggcgggggcgggggcggtggcgggggtgggggcagtggcgggggtggggtttgtctccagatctgtggtcagtcccggctgcggccgtggggacggagatctcccgcgacccccctctagggggcgcgggtccaaaggagccccttccccactgcccgtggcccgggggtttgccttcctggaagcagcagcaggtgcataagtgaaggagcgaggatgacgcctgtgatccccgggactgaggcttagagagggtctagaagagactaactggatgcagagagcaaagaagatcgagagatcccttcttcccaatgcagaggctggggagggggtaggtgcactgaggtgcagcgggctgagaattgtcctgcttgggattagcggccttgggtcatctaaaaataacttcaagtttgaaaagtgaaatggagcggagcgcagtgtgccgggttcgtcctgcctgtgggatgcttcgctccagaagtcaccagagggaacaggcaaatcccagccgcctgatccctcggccgcctccaggtctcgctggtttccagggtgcctcggtttgccttttagttaatgatttattcttcgaggtacttctgcctatttcttatcccaaaatgaattatagcagaatgcatgctttgaatctttcctgtttcttacaatgggatagaggtgttcaactgccaaatgaagtttttttaagtctcagtttagtaaaaacaaaagtttctggggttcctttaatatgcattcccacagttttccacaattggagatgaagggatgtcacagcattccagctcacacttctctctcccttcagccagaatttcactcaacttatcatgcagaggggaggctttaggaaatgtaggacaactttaacagtgcaactcaagtttcacacctttgttatcctttattacatcacttcaaaacgaagaacaaatgtaccacaaggtaccacgca

SEQ ID NO: 1882354 - DNA, 4001 bp, Homo sapiens
ggaatctggatgaagggtatataggaattctttgtattactctatttttgccacttttctctaaatcttgaaattatatcaaaatacaaagttaaagtaaattactttaaatggtaataaaagaattcctgtctccagagtccttttgggggctaagatacttgtctgcatttcatggatgtcttaggtgacatcttttgttcaaagaagagggaatggatagaaatgggcaagaggtatcctgaagattatcaggtaattattattattttataatgagggaaaattaattgtgactttcaagctaggagattcccctaaacaggttttctgatagagctaagttacctcttaaagcgcctccgtctttaaacatctaatgtcaagtcaggttcatctaagtcagaatagtgacctgaagagctacagctacttttagtactttgtctcggagaatgcagtttccctctttttagatccttttatcataaggtggggtgagggcatgggaggagtagctactgaagaagacagaaatagattaaatattcaattgagtaaaaccctttaaagcactcccttccccatgaccacccacaccctgccccatctatgcctccctctggcataaataaaaaatatttaggtggtgaaagggggtgcaggaactgttccttctttatagaccaaaaaaaattaagtaaaattaaaacctactttctataaaaaaaaaaagttttaaaaagtgaagtcaatgaatgtttatgggcacaaaatttattgtctacttcgaagaaagtgatttatttttacattgttcttcatgatccattgatagggcaaccacccaccccaactggcccaggacagttcttctgggtactagtcctcctaccataattatcaacaccttcttttacactgaaatgtgtcttagtttgaatatttagttctatagtcatctacctatagaaaaagccatttctcctcctatgagaaaataatttttaccaagaatggtattttacccagatcactgggcttcctaataggaaaattaacaagatcaggtaaatagccatgtggaaatctgagcccatttgtgatagaacagagatggatgtacaaatagaaaaccaacacgttccacaaatgaaacaatgaaagacttgagaacagacaatcaaaggggacagttttgctgtttcttttttcctcaaccaccattctaaattacttttttgatagaacaaaacaatgttttattcttgcccttgcaggcagaggctgcattgccagcatgcatttgtcttccatttccacataaaggccggatagtactgatggtatctgcttaagaacttaataaaactcacacctagtttcaggggaagtcaacccaggcatctgtttggaggctgccactcacctctagccctgtctagctcacaaaatgacatacatgtttgctgctctgttcaacctatctgggaagcaaaggctccatcaagaggaaataaactgtagctgatacatggccaagaggatgatttaatgcagtccagagagctttcagagcaatttcaactcccatgcttgagtgttgaaaaagtgtgactgcagtttaaagtccttatgtacgagcttatgggacagcttctttcaaatacagacaggtttttgtatttaaaatattccccaaagtagcattttgtgggaaagactgtgtataacccttcagatctgaaacagggacagtttgatggtgactagattagagtttaaacacgttctttatgttttggccagtgcagattgacaggtctcatggatgcctcttttgatggtgggatatttaaatcataggaccacagagctcctagttgtggccataccttacatactcctggacacagttgctgtttcttgtggtgggggcttgtctctcctcagagcttgtgtcgtggcaaagtatactctatgatgggcactgctgctgatgcccataattgaaggcagatattccgaggaaacctctcatgatgtaataatatccactagaattctacacaccaaccctgcatagttggtttttgttttgttttgtttttagacagagtctcactctgtcactcaggctggagtgcagtggcacaatcttggcttactcagctcaatgcaacctccacctcctaggttcaagtgattcttctgcttcagcctcccgagtagctggcactacaggtgcacaccaccatgcctggctaatttttgtagttttagtagagatggggtttcaccatattggccaagctggtctcgaactcctgacatcgtgatccaccccccttggcctcccaaagtgctgggattacaggtgtgagccaccacgcctagcccaaatattcttcatttgggaaaagaacccacctcactaaaatggtgatgacctcatagtggatgttcctttactgttgttgcatttgtggaacatcttccatactttaagaaactttctggtcgcatctgataatttttatgtggcatttgcactgatagagcatgagaaattaaccaagctctaagacggaatagtggagaagagcctgtgtctcaatagctgtgtagcaaaataaaggtcttagctctgtggccgtgctacaagcactttgtcatcactagcctctgacaatcaaatagcttttctttctcaagaataaaaaactaggtgatgcttataccaagccaacaaaaaagattttatgatttttagtgtccaaccattaaaagaacaatgactttgggtgccatctgagtggcttagaggaggtctctatttgagagaagatggtggagccaagtccagtgttggcaaactcaccaactgttttgcattgtgattgcattctcatcatgagctttagtggggcatagaggctacagacttcaaaggcaattggctcagggaaacaaaagcaataataccctttattttttgtagcaaaaataatatctactgtaaaaccctagtctgctgatcataagaatataatcttagccacctcagggttttctcagtcaattcagaccactcccaaacagatgctgaatttaaaacacttacacatgattcctgatcaactgtggaaaaaaaaaaaaggtgatgattgcaccactgtactccagcctgggcaacagagtgagacctgtctcgaaaaataaataataaataaaatgaaacccttatacattgtcaaaatgttgagatatggttgttaagagtgacagtgaccttgtttaaatttagccaatcagtatccgccactatattctcagcctgctggttccagtcatctgcatatattcctcatggcaggaagtgcccatgtttccatttgctcccctgttaagaggccacgtggttaccctccatcttccttgtcctggccaaagggtctccttgggtatcctgctctctcagcctacctctgtacccctcttggaaaaattcagaaagtacttggtggttcttccattacactctagaactatgggaaatccactggggctgtctcgggacctctctgcctagatgtccacacaaccatgtctgctctactgttaacataggacatgggagagggattctggaggctggctgctttcctggtcactcctccctctccaggtggtgaggcacaggtgctgtctgtttcagatttctcaactcacttggatcccagaattttaccaccctttgaaggttgtgaccaagatggggcggggggatgcagagcccatactcagagacctacatcagcatacaaccttattgctcccttctctaactctcctacttttccctagtccagagaatttttatcttctctttgatggaacaactgtttctgcaaatatacctccaaatattttgtgctagcagctgtaccttagcttttgaacccaaggccaagaatctgaccttttgttttctgcttcca

SEQ ID NO: 1882355 - DNA, 4001 bp, Homo sapiens
ttttcaaaatgcttgatcttaccttcaggattttgtttcacgacttcatgtactttcttcctctttccatttttggttctttcattgtttgacctaggttatctttgtcttttctttatttctttcatgacttggggaatatatatggtgtgtctcctcttccaaaccccagtgtgcagagtacaacctgtacactcatacacaatagccttcctatttaaatagagaagggaaacatttaagcttcttgtgaattcacatagtcagtgcagagctctggctatccaaggcaggtggggtaaaagccagggcctgaggtgatctcagcaatggggttagctttgcctctgttccagcatttcttagtgctcctggctgcagcaatgccttctctctatgtcacatctgccctcctagtgatggccctggcaaagccccttcatctgcctggtggtgaaggctggtcaggggataagctgacctcctagagatcttggtggaatgtgaaatccatcttcttggaagctcctacaactcacctcaaaggaccccacttttctttggtagatctacccttcaaggtataatgtcttcatgcaacccaaaggctgaagactcccattggaaaagtgcacttgagcctgcctgatcagtttatactgccctaagctgccacccagtttccatgactgaccttctgccatcttaagtgacacatgtatgcaacatctggtgatgggcttggtatttgaaattgtgaaaaaatatgcctaacataaaatttaacatcttgaaaccatttttaggcatacagtttattagtattaagtatattcacattattgtacaataaattttcataattttttcattttgcaaaactcaaactctatacccatttgtcaataactcctcatttccttctctactgacagctgctggttactactattctaatttctgtctattaatttggtgattctagataactcctgtaggtggaatcatatagtatttgtctttttgtggctgacttatttcacttagcatattatcctcaaggtttatctatgttgtagcctgtgtcagcacttcccctctttttaaggccgaataatatcctattgtacatatgtctatgttttgtttgtccactcatccatccacggacatgagttgcttccacctcttggccattgtgaataatgtgcctatgaacgtgaatatacacatgtggggtaaagggcttttaaagggtgatgatgtagctcagtgcttctcaagctttcatgtaagcatggatctgcccagagaccttcttcaaatgcagattttagctcaggatgcttgggtgggtcccaggatgctggttttcagacatgctgccctggatcctgctccagtgaccatcttagagttacaggctatatatgctcaactttgatgtcaggtctgagtggaagcccagctctgactctcattagctttggaaactgtcaactttcttcgtttccctgagtctgtttcctctacatgagaataaatcatatctccttcatctgttcgttgtgaggcttcaatgttctacatgcaacccacagcacagtgactagcacagagcccaagtgcttatgaatttgtagctatttttaatattctagtattaggttggtgcaaaagtaattgcagcttttgcaattacttttgatacaaataaacccctctgaatatgcttatgtgaggagacattgctagaggattcttgctcagacagttttcgaacacagaagcaaagatgttaaattggaagtttcaggtcaagaaaaagaggcatgtgtggcagggctcgggtgagtagggttaagatttgggaaagcaggagcctttgcttaccttctcgtttgccatcctgttccctgggaattttcttcttcatgaataaaaagccacctctcattcctgactgactacccacccccactccaggccaccctgccccaccaccactacaattatttgtgaagtcatcatgtccgacaggtggggcacttcctggaattggtgaccttgtcttttccggctgaagctttgccttcaggaaattccctctggacagctctgtccactgtggctcagacagtcccctggggacctctacacagatggagcaggcaggggaggtccaattggaagctctgttttcttgtctgaagtaaatacactgccgagcactgggagccctggcaaacctgtgctcccttgtgagatctacccagcacccaaagtgtaagaggaaaggcaagtgctggagtcccacagttccccaaactgcgataacatgaggactcaggatggtaaggctggtccccagtgagccccatgccggcaggatacacgacactcaccactaccagagactgcactgagcacctgacatgcctcagcacttattatttttcataatgtaagaaacagaggattcgagggagtgaatgacatctcctaaaaatctgaaactgtgggattcacttcttggtgtgaccatttgctctattcaaatcaggtccggtgacttggcagccagatctttgtaactccttgaatctggggatggccaagagcatttacccatctccatcccaactcctcagaggcttcattgccatcaatgtgcttttccctccattatctccaatgattgtagggcttaaaatagtaagtaggctgctcccactggacaacgaagaggctgtaggtgacagagctgtggaagcggcacttgcaaagatgtggcctgaaagttccagatgatcaccataaagattccggaaatcttcagaaagtagtgtttccaaaagatggcctcatgtcaatggatgcgctgcttgaaaaggcagttttctgcacctcaccccagacctactgaatcacactgggggcaggggagaccaatgatcctgattcttacaaagagttgaaatatgctgcattagataattgaaatatatcttgattttaacatgtaactgacaagacaagaggcaagacctcaatgctttagtcctattggaaagcagagagaatgaaaactcgacctgggagaactgcccaaaggtgaccattggcggtcaagttctcctgtgttgtctgagtcccctaactgttgccttgaagtgtggacagagaaagctcccagtggccactccctcctccccaccaggccccagagaggatggaggcaggaaagcacgaagaaccttccttttgcctgggcagaaagccaaagcattctccaagggaagctgggctggaaacagtcctatacattgactttgcaccttcagttcctgcatattcaagtacatctaaaataacttcactgcaaataaagcagcaactgggcttttgaaattccaatcatcatccatcattcccctatttatttcttcaagaacgtttatgaactatcaagtacacagtcgctccccatttcctattgactttaatacattcctcaaccagtacctcctaagggcatcagcgaggggaacaggtaaaccttacatggagtggtaaattgcggacatctgatcttttcctaaaaatgtaacttagtaagaggagggagaccagccaagggaactgttcactggaaaggaggagggaataggaagaggttatacagacaccgagagaaacggctctgggtaaagagagacccgctccctgagacaaagccagtttcccaggactctgctgataagatgatgcagtgcctgcgtggacaagtgcagactctggagctggctgggtttgaatcctgctctgcctttaaagtctgtgtgatcctgggcaagttactggacctctctctgcctgtgctttcttattagtgaaatgtggataataacagcatctacccttgtcttggcacagggtgttaaatacatcttaggaagtattatgtttgtcattgtgatgatgtgagataactagaaaat

SEQ ID NO: 1882356 - DNA, 4001 bp, Homo sapiens
gacaaactcctcacttttaaatttttttttctttccttggcactattgagcttccactcaccctctccctatttcctcatcctccctttaaaatgcccagtcattctgtatgaatctaagttgacttaagttcacattggatttttttccctactgcaatagttattaccaactaaagtatttttctcaacaatttacctaatgtttggctgtgtttatcattgacaccccttagttccatttttattcatttggtttctcaagaagccacaaaatcaatctcatttttaagttacatttgtaatgtatgtaaataataaaaacaacagcttctgcctcttttccaatagaggaattcccataaaatttaccattttatcattttttagttatgtagcattagtgatcaggaacataaagtacattgatactattttgcaaccatctcactatctacagagctttttcatcttcctaaactggaactatgcacattaaacaataactgctcattttccctttcctaagctcctggagacctttttgtttctatcaatttgttttttttttctatttcactttttgtttttaacaatttgactactctaggtacctcatataagtgtactcatatagtgcttgtccttttgtaactgacttatttccctcagcataatatcttcaatccgtgttcatccatgttttaatgtgttggaaagtcatttattctgaaggctgaataatattccattgtgtgtatatagcacgtttggtttatacattcagctgtcaatgaacgtttgggttgttttcacctttggctatcgcaaattatgctgctatgaacataagggtataaatacaagcataccttgttttactgcacttcactttattgtgttatacagatactgcttttttttttttaacaaattaaagattttggtagtcctgcatcaaataagtctcttaggaccatttccaaacagtatgtgctcccttcacatctctgtgccacattctcacaacactgtaattctcaaaatattttcaactgtttcattattattgtacttgttacagtgaccagtgatccctgatgtcactattgtaatagttttgaggtgccatggaccacacccatataagatgcaaacttaattaatatatgttatgtgtgttgtgactgctccaacaataggcagttcccatatatcttcttctccttggacctccctatttccacagaacaatattgaaattaggccaagtcacaacactacaatattctctaagtattcaaacacaaggaagagttacaagtctctcactttatatcaaaaggctaaaatgagtaagcttagtgaggaaggcaggttgacagctgagataggtcaaaagttaggcctcttgtgccagttagcaagttgtgaatgcaaacgaaaagttcttgaaggaaattaaaagtgctactctaatgaacacatgaataataaaaaagcaaaacagccttatagctaatatggaaaaagttttagtagtctgcatagatcaaaccagccacatttccttaagcaaagcctaatccagagcacggccctaaccctcttcgattttatgaaggctgagagagaggaggaagttgcagaagaaaagtttgaaggtagcagaagttgctccaggaggtttaaggaaagaagccatcttcataaaacaaaagtacaaagtgaaagagcaaatgttgatggagaagctgcagcaagttatccagatctaagataattaatgctggcaggccgtggtggctcacacctataatcccagcacttttggaagctggggtgggcagactgcttgaggcaaggagttcaagatcagcctggacaacatggcaaagccccatctctactgaaaatacaaaaattatccaggtgtggtggtacacacctgtaatctcagcttcttaggaggctgagacacaagaattgcctgaatccgggaggcagaagttgcagtgagccgagatttcaacgttgcactccagcctgagtgacagcacaagaatctgtctcaaaaaaagaaaaaaaaaaagataattaatacagggggctacactaatcaacagatttttctttcattttattttattttagattcggagggtacatgtgcaggtttcttacatggttatattgcatgatattgagttttgagcttctaatgatcccatcgcccaagtagtgagaataacatctgataggcagttgttcaaccatgccctctcccaccttcccttttctgggatccccagtgtttattgttcccacctttgagtttgtgtgtatccaattgaacaacagattttcaatatacacaacacaactttgtattggaagaatatgccatctaggaatttcatagctacagaggagaagtcaatgtctggcttcaaagcctcggagaacaagctgactcctttgttaggggctcatacacatagtgactttaagtttcaacttcagtcattgctcattgaccattccaaaaatcctaaggcccttaaaaattataataaatctaatctgcctgtatcatataaatgaaataacaaagcctggatggcagaacattttttttcttcaacttttattttaagttccagggtacatgtgcaggatgtgcaggtttgtaacataggtaaacatgtgccatggtagtttgctgcatagatgaacccatcacctaggtattaaggccagtatctattagctattcttcttgatgctctcactcctctcaccgcccccaacaagacctcagtgtgtgttgctccccttcatgtgtccatgtgttctcatcattcaggtcccacttataagtgagaatatgtggtgtttggttttctgttcatgcattagtttgctgaggataacagcttccagctccatccatgtctctgcaaaagacatgatctcattccttttgtggctgcatagtattccatgctatatatgtaccacattttctttctccaagctatcatcgatgggcatttgggttgattccatgtctttgctattgtgaatagtgctgtaagaaacatatgtgtgcaagtatctttatgacagaatgacatatattcctttgggtatataccaagtagtgggattgctgggacaaatggtaattctgcttctaaatcactgaggaattgccacactgtcttacacaatggtttcactaatttacactcccaccaacagtgtaaaagcattcctttttctctgcaatctcaccagcatctgttgtttcttcactttttaataatcaccattctgactggtgtgacatggtatttcattgtggtttgaatttgcatttctctaaggatgattgatgttgggcttttcttatatatgtttgttggccacatgaatatcttcttttgagaagtatctgttcatgtcctttgctcactatttaatggggttgtttgtctttttcttttgcatttgtctaacttccttgtagactctgaatattagacgtttgttagatggataaattgcaaaaagtttcccccattctataagttgtctgctcactctaattatagtttattttcctgtgcagaagctctttagtttaattagatcccacgtgtcaatttttgcttttgtcgcaattgtttttagcattttcatcataaaatctttgcccatgcctatgttctgaatgatgtaaatgaaatagatttttttctaggatttttatagttttgggttttacatttaagtctttaaatcatcttgagttaatttttgcataaggtgtaaggaagggatctagtttcaatttcctgcatatggctatcctgttctcccagcaccatttattaaatagggaattatttccctattgcttaattttgtcaggtttgttaaaaatcagatggtagtagatgtgcagtcttatttctgagttctctattctgttccatt

SEQ ID NO: 1882357 - DNA, 4001 bp, Homo sapiens
cactgcagaatttataccttccaaaaggaaatagaagaatgtgactaaaacaaattcgattttcataaaacacacctttctttattcatcacagttatgctatatcctctagagatctgcgtaatgtaaaatagattttctcattaaataactgcacatgattgaataatgtttaatgtctttaaaatgtaccctctgtaatacatcatgcgatatcttttactgccatacaggatacaggcgggggaggagagatttgtagtctgtatggggtctagctctagcaaagaaaaggaaatataatatgtgtttttagttccagcattaagtaggggaactgaggaaagttagatagaactaaggaagatagaactgaggagagttagatagagattagatagaactgtgtaaagggacacggatcattgattctcataaccttaatagaaatatcccttaagaatatacgcattccagaaaatggccagacatcactaatttccttataaggtggaaatttaagtaagacatactaattttctcaacttcctctacccctagagatgacagaaattagacctgaattttaatacagcctttttttcaattataaaaattgatgtgcccaagtatgtttaattattttgttttcttgaggggcacaagtaaatagcctcattaggagatgtccaaagttcatggggaaaagataggctgctgtacaggatttttgttgaactatctatcttgcactcattcctgttgagatcaagccagtgattgagattaggatggatgtaactggggtagcagtggggaggggaatgaactttgatgaaacaagtgctggccaggtctggaatttaggtctaagaagtccaaaaaataaaatgtcaaacaaaaggaaacatcaaaaaaataaaagatggcaaaagaaacttgtaccttgatcatgagacgggtgtcctggaaatagatttagagcatctgctgctcttactttggcaattgtagagtaattttagaacactgctggaggcatgctgaagtgggaagccaaaaacctagaacaacaaatatatttaagtctggcagcctctatgccttgacaattaaaatagttgtagcagagaaggaagaaattatgaatacagcagcagagaggttaccttgtgagaaggaataattgtccatttgcaggaacagagaaaagggaggaagagaccattaactgcaacataaagcgtctcacgtcttgtgactttcttcaactcaacctaaagcagaaaaaaaaataaataaataaagtgagaagtcttgtctgatgccttcagatatgccaacaaagccaagaaatatattgattcaaaaatatttaatcttatgagaggaagataacagtggaaaatcatatactaaaagaaactgaactatttaaaaaatcaatacaaattgtaaaaagcacaaaggttgtcaaagaaataaacataatggaaatctaaatagtgatcaagctactataaaacataactgcttagcgatattggaaatgaaataaaaaagagttaaaataaaaactcaaaaggataggttgcatagttcatcagttatataaataggtaaagaaagagtgagtgagttgaagcaaggaggtgcaatgctttcagaatgcatcgaaaagggacaaagagagagaatgataacaaagtcaagatatgtgaaaactaaaagaaattatcaagatccaccagtgatagtcataaaaagagagaaagtataaataaatgtgacaaagtatttgagaaaatgattatgtatcatgaaaagtaacataagatctcacataaaaagaggattatgccaggaatggtggtgcactcctatagtcccagatactcaggaggctgaggcaggagtaatactggagcccgggagttcaaggctctagtgcactatgatcgtgcctgtaagtagtcactgcactccggcctgggtaacacagcaggaccctcacctctgaaaaacagagggagagagagagagagaaagagacagagagagagagagaggatcatgcattatgcaaaacagctaagatttaagacacatacctagaaacatcacaatgaatttaaataacacagcaagaaggaaaattgtttaaagttttcagaaaggaaaaataagtcacatataagagaaaagacctagatggatgtctagttttcaaaatactcctgggtattttaaacaactttgttaagtaattgcagctatattttatactttgaatgattgcagtcatgacaggcatgttacaatggcttctttgtacataatatacattactttttatatttgtttagcagctccttttatcaggtttaataatttcacttccattcttaatatattaggaaatatcaagagattagtccaattaaaatttattagccagtatgaatgaagaacacgttaaaactctattaaacagattttttaaaaaatctggaaaaataactgacatacatgttcatgggtgagatggtctggcaatgaaagaagcaaatttttctcaaacaatctataaataaatacaaagacaatcataatccataggatttttagagggtggatagatgaacatattgtaagttttaaatgggaaaataagaactttttaatagggaaatttaagaaagataataaaagaagcccctcaccctatcagatattaagacaaatatgaagcttgaatattgaaatcacagagaaaaaggcatagaatgattattctatgaactagagattattatgttaagtgaaataatccaggcacagaaagataaacatcacatgttctcacatttgtgggatctaaaaatcatagcaattgaaccaatggacatagataatagaaggatggttaccagaggctgcgtagggtagttgggggttggggagcaggtaggggtggttaatgggtacaaaaatagctagaaagaatgaataagtcctactgtttgatagcacaatagagtgactatagtcaataataattgtacattttaagataatttaaaagagtgtaattggattgtttgtaactcaaaggataaatgcttgaggagatgaataccccattctccatgatgtgcttatttgacattgcatgtctgtatcaaaacatcttatgtaccccataaatatagacacctactatatatacacaaaacataaaaatcaaataaataaataaatgaaaagagaaaatagtttatagggtaaataatatttgataaattatcttactgtaaggggaaaagtagaaaaatagatcctcagctaacctaaattatttttaaaaatattataatatatgaaatatgttgtaggaaagaattcaggagcaaagaaaactgcaggtccaggagtttctacgagtacatgctcatgtaaaggggtttatggaagaaaagttaagacatttttaacaaacagatgaagactactaaaggaggtgaaaacctgaaagatgaatattaatatacaattaatagcaaatgggtaacttatgaccatatttaaaaaaagctcaaattacttgtatttgttcaaaacaaaatggtttgtgcattaaacagatattattagatattgcttgttgaaaatattaccatggttcagattatactggagaaatcctttgttgtttctttgtggcattgttttatcttttaagttatcttttccaatagactgtgtccatatttatattagtggtaccatcaataaatacgctaccttcagcattttagaattttctgaaggcaactgaaaagcaggagcttgactcgcgaatgatcacatactgtaggtgcttcttcttcgtatatttgcaatttttatacagtatagatgctgaactataacattccatataagtagtttgcaaatgcgcttgacagagtaataattgttttaaagaaaataacaaagat

SEQ ID NO: 1882358 - DNA, 4001 bp, Homo sapiens
tcacacctgtaatcccagcactttgggaggccgaagtggacagatcacctgaggtcaggagtttgataccagcctagccaatgtggtgaaaccccgtctctactaaaaatacagaaaaaattagctgggtgtggtggcacatgcctgtagtcacagctactcgggaggctgagactggagaattgcttgaaaccaggaggtggagggcgcagtgggccaagatcatgccactgcattccagcctgggtgacagagcgagactccatctcaaaaaaataaaaaaaatagataaataaaaatacaacaaattaggaggacaatgatggaagttgtttgcagatgatatgcttttttaagaataacttaaaagattcaaccattaactaccatgatttataaatattttgaataactcactcaaatataatgtcagtccaaaaaattgtataggtcaatggtatatatttagaaaaaaaataaagaaatgtacaatagagaccaaaggatatactgccttgaaaaaagtcttaaccagtgttatgttgaacctatataaaaataaactataatttattaaatagtataaagagaagacttgaatacatagggaattatagtatgtttccaattagattgactattattgcaaatgcctcagtttttctcaaataaatgggattaatgcaattccaatcattctttgcaatgttgaatagcataagatggattccaaagttcatcagaaaatatagactaatgatacaaagccaattttctaaaataaatagattttatgatagtggaaatgggtagccctatcagggaaataatatttatgtcactattcttaagataatgtgattctgttacaagaatatatgggcacattagtggaaatagccccaattaggtagatatagatatcatatataggtaatagatacaggaatgaaatatataataaaagagaaaataaaagtaaatataaaggaaaacagtttataaaaggtttagcaaatttgactatttagaacatttatcagtctcgattcacattttataaaatattacaaaggaaattccagatggattaatgagttaaattaggtttactaaaacatatccatttctagagtatcacaaaaacaataaaatgcagattacttatgatataatgtgcaactacagacattttcctttttatttttctctaatttttatgcctcctcaattgtcatacattgcttattaagaagaaataatatttttcacataaaggaacaaattctctagagaagatagaagcattagtatttaattatggcatatacattccctgatatgtgggcaggactattgcccattattgacaaatgagaaaccaagatggttgattcttgttgttggttgatctgtttttcatccttctgcttcagatcctgtttaggctcaaaagtccaggctttctgtactgaatccagatcatccaatactgaatgttgcacatggaactaggctcaaaaaatatgaacagggtagggggaggtagagagagagaggggagattcattgttaatattcttattgcaaaagaagccagtgactagtacccacacaaattttaaaagtcaaaggcacagtgcatatttgctgctcaagaaagttttggaagttggaagaggctaaggatagctggaaaagctgtagctgactgtgggtggacccgaaagaacccagaaccagtgagtcctcctttccatagagaagagatataggttccccatattgtatcccattttccctaaaacttgatcaaatccaccagtgggattctaagaggcatggaggaacagtttaaaatcccatcttttcattttaatgggaactcatcaacaaggcagaggtggaaaggaggcatgacaattcatatgttttgatactcactatccttccttccctaaaacccaaacattcagctgaatgccttaggacacgtatctgctataaattcattttttatctaatttgtctgagatctaagcttcctgtggaggtccaagatcaaaggatttgattccttctgatgtcggcgctgacacataatgtgtgctgacttagttctgtctataacctcatagtaggaggtggccagcctctctgggcacctttacacagtgaactttcatttcggctggggagtctgtcaggtatgttgctgattggagctgccatgtaaataattcatgggagatttttaaatgttttggggtctgcaaaggaaagctatgcttgtgttagtctttcatgaatagatgcggacttaaagaacaagggggaaaagatttccaatgaaggtctctcaaaaacaagataacagtatcttcaatgggttgaaaataggcgacttgcagtgtttgattcctcttgtatgaagcactattggttttaccaagggattaaaattcaaagccttttttgtctttttaaagtttgcttctacctgataatttattattcttgttctttggttatttgctgatcctgataaactatgtcttttccacctggtgggagcagtaattatggagatgatgcccagctcagtgcttggcagaggactgggcataatgagggagcaaggttgacggcacacaaacatttcttccttgaaggaactcaaattcctaagaggaagatgagactgttacataaggaaaggtgactaataatagaagcaactgtgcaggtcaaatgagaaactccagacaagtattgaggcataaatcaatgtagtttgagctgtgaagaaacacttctggaaggagctgcaggttccttaggaaaactagggtaacctgaaagttcttatagctctaagcaagagaatcatcccatagtttgatggctgtagaagatacatgctagacaaatggactgtggaacaggagacagaaaatgtgaataacatgggcttatcataatattagtagatgtgtcatggaaataataggaacaacatgattatctttttttactgctctaaatcaaaagcattatatatatatatatacatatatatatatgtatatataatgttattactttctctcatccttacctcattttccagattaaattgaagtgggaaattggtattgtctatcccaatactgtctcttatagtatgaatcagacaggattactatctcctaacacaaaccaagacagctctcaatgaactcaggaaaaaaataacaaaaagcttaataagttaaggatcttcaatacatacaaatgcgtggttaatgtatttggtggtgagatgtgagaaaagcagggacagtaaacgtagtaaaagtagatgacagtattaccatctaccccccagggtttaggacaagttcaacctttttctcactgtaaggcatatgaatagtgacctttgcatgcatggtatactcccatgcatgtatcccactgaacattcttaactttccattgcagtctttatctttacacagtattatatggtgcctagatcatctgtttatgtatattgtactcttctgagttgatgtttaggtctgtttaatagaaaaataagagacaaataaaatgtcaaagaggaaatcaattaaaacaacattgttaaaataaatatattttagtaaattttgaagtagcacctgagaataaattaaattatgcaactaaagcccagagaggctgaaaggatgaaagtcatgaagccagatagcaggagaaggggaacttgggcctaattttgtgacttgagtgtaatgtgccatctctctttctactgttatgcaaccatacatgtacacactcatatacatagatgtttatgtgattatttctgcaaatatttatattcatgtttttataataccaaagatatttacattgtgaacttggtataagagcctaagtattagataggactggtttttatagttcatatctcttaacacaggtgtgag

SEQ ID NO: 1882359 - DNA, 4001 bp, Homo sapiens
tgacatgtttataaactgtgtttgaatactgaaatacttgtatattgataattctaaaataatacaactattagcctttgaaatttgtagttaatagtaggaaatacatttatttttattacttatgcacagttttcttaccatttttaaaagtaaattgtagatataagtgaatacttctatatatgctttagttataaaatttaaggaactgctatttgattatcttcatatcacctggaataagccatgagcattactgatttttacagataaaatatcttttgttttgtgaaggatttttctgtatttcccaattaactgtttctatatatacaataaaaattatcttctcaccattcagtgtgtctgttttaaggttaatattgtaccaaatatggactaatcctcatttctaaagcttatgtaaccacatagtgttttatgtccaataaaatgttatttatgtactcggtttacaacatatctaatttttcatagaggaaatggacattttggcaacgtttaatggtgacaaaatgaaacagaatctttttttttagaaaaataaaatatgtactttctaccttttggatatgaattttcacttgttttctactgacagttacttctcaaatagtgtacattacaaataaagttatcataattagtgggaaagaatattgatcaaaatattttatattccatctttacctctgttcaaaaacttcacgtaaaattgtatatgtacatttcaaaatgtaaaagtaatgtttgtaaggatcttcacaattatcaaagcattaaatgtaccatttattttttatttactgaataaaagggaagtttattaaatggtacaaatatcacattttctctgttttgatacttgtttgttacagtttatagtttatgctatctgaatccaggattttttttttttttttaatagagatggggtctccttatgtttcctgggttggtttccaactcctggcctcaagtgatcctcctgaatagttggtattatcggcatgcatcacaccaactggccctttttaaattattgttattattttaattttattttttaaactaaaaaaatttttttgaactaaaagtagatctgccatttgatccagcaatcccactagtaggtgggaaaagaagtcattatatgaaaaagatacttgcacatgcatgtttatagcagcacaatttgcaattgcaaaaaatatggaaccaacccaaatgcccatcaatcaacaagtggattaagaaaatggaatactactcagccataaaaaggaacgaaataatggcattcgcagcagcctggatggaattggagactattattctaagtgaagtaactcaggaatggaaaaccaaacaccgtatgttctcacttataagtgggagctaagcaatgaggacacaaaggcataagaatgatataatggactttggggacttggaggaaagggtgggatggggtgggagggataaaagactacacaatgggtacagtgcacactgcttggatgacgggtgcatcaaaatctcagaaatcaccactaaagaacttattaatgtaaccaaccaccacctattccccaaaaacctactgaaatttgtaaaagaatcaaatacaatacaataaaatatgtaaaattaaaaaaatttttaaatagggatggggtctcactatgttgcccaggctggtctcaaactcctggtctcaagcgatcctccaacctcagcctcccgaagtgctgggattacaggcgtgagccaccatggccggccagatgctgactggagtttaaattcaggatttcttttatgatcattgtttattattaatgttaggagtaaatttttttttcaaaaaagtcttatttaaatcgatggcacaacttacaattaatggcattttagaattggcatcatatggcatgatttatattttgtcagcagcaagccttgatttcatccacctggagtagaaaatgaaatactattaaattttaatgtccagctttccatggttcttctccccaggctgtgatcccttgaactctccctcatcctccactttctcacgattctcgttcggtatttctgggagtcctggacggcgtgccttacaccaggtttataacccgctcctcccctggaggtacctgctgctagctctcccgctctgttcctggccacgcccactgcacttccggtggcctgaaggaggatcacatgagacatcccggggtctggctgcatgcagtccccagaggctgtcccctcagcactgtttagtagtcgggttctcggcgacttcagtctagtccccaaggcttgctctccttcgtccaggagcagctctgctcaaagccaaagggtctccaggtgtctcagggaagcttctgtcacaaacttactgcaacctttgctttccagccttccacacacacacaagtctccatggaatcacagggcagttgcaactcccctttcaacaggaaaactgcaacagcctcccttctacccaaaaggcatcacgtcatttaaaagaaggatgaggcagggcagtcagtaataacaatggcaaccacaataggtgtcactccattttgatgttaggaaactcaacagagaaaatcagagaggttgaatgagttgctcaaggtcacagacctaagaaaaccatgctcaggatttgaaccaaggactgcctctctccaaacacacctatgccatctcccataaaaggactggatttttttctgtcccatggctgtttttacctcttgctgagcctatcagctgaggtacgtagggtaaggtgtggggaagcacaaactcctccatgtgcaatgggttgaaacacctattccacattactgctgttgttgcagcagggataaaggggggggtcgtgacctaccaaaaggcccctgaatttatttttcagcttttagcttatatttttgtttctattgtaccatttgatgcatgcacttaagtgcctttaaaaaggaaactccaaacagctgagaaagaaacgttataaaattgatgacatctttttttttttttttttttttttttttgagacagagtcttgctctgtcgcccaggctggagtgcagtggcatggtcttgggccactgcaatctccctctcctggcctcaagcaattctcctgcctcagcctcctgagtagctgggactacagccacctgccaccacacccagctaagttttgtatttttagtagagacggggtttcaccatgttggccaggctggtctcaaactcctgaactcaggtaatctgcccgcctcagcctcccaaagtgctgggattacaggcatgagccaccgcacccggcttgatgacatcttttatgaaatcctttttatgttttcaagtgaatttgggtattttgttttatgttttcaagtgaatttggtcagttttctcccttgaaagaaccaatgcaatgcaatttattcattcagactttcttttcctttctctttccctcccttccttctctctgtctttcccccatttatcatctaggagacacctgcattacagtgtttgaagcagttctaagcattatgggatacagagatgaatataactgatacctgtcctaggatattacactgtaaagaactggatctttagagcagaaggcaaatacagaaaaattctaataccaattataaaaggataaatacttaagcaaatctgataagtgtgatgttttttgttttgtacatagattactctccactgagagagaagagagcagggcactagggaaagcatcttgaggagatggtgtacggggtagatttggaaggatgggtaagaagttgttatgcagatatggagcatgggcagagtttagggcagtagaaccatcagaaactgtatgatgggatcaatgaagaataggctatacatggtgaaatgaatggaatgct

SEQ ID NO: 1882360 - DNA, 4001 bp, Homo sapiens
tttaataggaatgctatcaaaaaagtctgatgttcccaaagcaaatggtggcccagggaagggcatcatttagatagcagccacctacattaaataagccctaaagatgcaaaaattttgcatatatgatatgcataattatgcaatatgataaatgattagaactactactcagatctctagagaagtagttttatgatacacataatattgctttatatgacaaaaaagggacagtttctaaaatgtgtgtattggtctacatattaccatatatttccataccagttacctattttcaggatcatccttagtatgacaacgggataatgcatttggagagagtcattaaaccttggaacagttgaataaggcaacttgtttcctaaggacactaaaatgattgtgatgctacatgaagaatacagatgaggttggagatcctgagcttcggtgtttcccaatctgaaataccaagattggaagatttcttccaaaagcccaggtataaggacagattgtgggttggaagatttgtgacctgaatgtcaggcacagatctggttcctgctcactgagagtccatggtgtgtgggctgatacgccaccaggcaagtcaggaagtgttaatatattctagccacatctggccatccacattttcagtcttccccttaggcactcacccagaggcaaacatgctttctacttccgttagcacttcctctactcctattagcttgtatagattggcaagaagagcctaaaggtcaacacatggctaagaccagatgctcttatgcctccccatatggagcaaatatgatgcgtttcaggatagcaaaaagagtggtaattgctgaaaaccttctatgtgctctgtcatctaattctctagaaagtcttgaagtaagtattattcccattttacagacgagttcactaagacttggggaaattaagaaaaacctctcaaggtcacaacattaagtaagtgccatagctggatttaaatctgcttaactccaaagctcctgctccttccagcacactagagcagtggttctctaagtatgttccctgaaccagtagcagcagcagcacctcagaacatgttagaggtgcaaattcttaggccccaccccagacctatggaatcagactctgagagtggggtccagcaatctgctttaacactgccaccagggggttctgatgcatgctcaagtttggaaactactgcacaatacagccttcaagaaaaagatactacagtaggttccaggtctacacatcatgcagtgatgttgtaggttccaggttacatgacagtgagcaagacagggtcagccacactgagcagccctggacaaacctaaggagctaaggatagagacagctcttctctacctgtatgcctgactgagcaacatcactgcatgatgtggtttttctgcccccaacattgtaccagttctttaaagagcaagtagctatgataccggaaaagaaccatatcagagcttcacatttggttgtcaacatcatttcttctaacaacctaactgctacatggatttgctgtccttgagatgtggaatgaaaaggttaggtaatttaccaagggtcaagtgaccacaggtgacaaaccctgggtttcccaaggactgctgctacccaggtcccaggggcacaccccctttacctgctggcaggcatcaagacgaagacaggcagccattgttggggagggagtcgacatcaagctggtatctcatctagctcgtgacttttctatactgagcaccttccaggtgtccaggtgagaacacaacatggataaggcttactttacatctgtcagagccctggcaaatgccttcccgagtgcctctggcattctctgtgagaaagagagccacagcctgacaactcccatagccatcaatggcaacgctcctgaccctcaagacattccaaaaggattaaaaccaagagcaaccccaacctaacagacccagcccatagcgtcttctcgaaacttcccaaactcacaccgaaacttgccccacccattccgcctctgggccaatgggcaggaccaaaattcaggaagaacattcaatgcccagacaagtaaccatgttgttttgtttttccaagcagtgctgagcgaggtttaaacaaacaagcactcacacctgcagccaaggaagggcaagaagcagcagccaggtgtgggaacatgaacgccagacactcgggatccagacagtctcccaggagagcccatttccagtgaatactttcttcaggtgctcagtgaagcgcagtcccatggggagcctgggcaactgttggcaagctacttttttaaagcagtaagacttcatttatgacttaccttgagaaagcatcaaaagagaggcatttgcagactctgcatttacagggcatcaggtgtggggtgtcactctattacaccctgttacaagcctggtttcttgctatgggaagactccataggaccttctgttcctatcaccagggtggtggagccagtttcaaataaaattaaacattgcttagtcacacaagttttctattcttcctgttttctgcttctttgattaaattagtccctaaaggagcaatcattatttgtcaaatctttcacaacaacacattataaaaggaggactttaaataataaattatgactcatcttcctcatttcccccaaatggcacaaaggtcaagttgcagcaccatagatttcccagtgttcattatctgtcttttctccaagggtaggctattaaaggtagtgagtattaaaagtcattcctaactaattagctcactctggagctacctgccaattttcagaatatgctgaagctttctcagagagccaattaccaaactgtcactccagttaatgttaaaaacgttatcaattttttttttcccactagccaaatactttatctcacaagtttcttaggatttgcacatagtttgagatggtagaacaaagaccccatgaacatttccacagcccttagcccaggacaacatacaagaagtgagtgaaggtggtgggagggttagagcagctgttccaaatctttttggcaccagggaccagtttcatggaaaatgatttttccatggaccagtgagggagggtggcttcaggatgatttaagtgcattacacttatcatgcactttatttctattgttattacattataatatgtaataaaacaattatacaagtcatcataatgtagaatcagtgggaaccctgagcttgttttcctgcaacttgatggcctcatctgggggtgatgggagacagtgacagatcatcaggcattagattctcataataagcgtgcaacctagatccctcgcatgtgcagttcacaatagggtttgcactcctatgaaaatctaatgctgccgctgatctgccaggaggaggagctcaggcggtaatgcttgcttgcccactgctcacctcctgctgtgtggcccatttccgaacaggccaagaactggtacctggccctggggtacaggttggggacccctgggttagagaatgcagaatcacagtgtttgcaatcactaggcttaaatgaaggcccaattctgcatcaatttcattaaatttcactcagttccatgccagtcttagtctataacttatagcctatgtaattttgacaaaaacagaaccatcaccattatgacaaatacaactctaaatgtaattacaggttacagtgctttggctggggaaggggagcaaagtaaaataaaggggtgattgaaatgtcaacggagatgtgaatttgaattctgactttgtcccttactgtttgatcgtgggcacattcctaaaactatttgagtcttaattatctgctttgcacaaaggaaatcgcgtcacctacctcatggtggtgttctggaaagctgaggctgtgt

SEQ ID NO: 1882361 - DNA, 4001 bp, Homo sapiens
taatttagacacaaggagatgtaatcgctgtgtaacatcagagaaagctatatggattatcgtcagaagtaaatgtttctaacattgacaaagatgcttatcttttcattacatcattcactcattaattcattcaatcacaaaatattgagtacccaccatgtgccagcaactgttctaagcacttggaatataccagtaagcaaaacaaagcccttacccctctgtggagcacatattggtggagaggaggggattgtacaatgttagtaagcaaggcaataaaactgcatatctgatggtgatacgtgtaacgacggaaaataaagaagggaagggaataaatagtgcagggacagggagttggggggaggcttgctatttttaatagggttgtcagaaaagatctcactgataggtaaacttgagcaaagacctgaagaaggtgagggaatgaggatgaaaatacatatcgggaagagagttccaggtggaggaggttaaggtccagacaggagcttagtatattcaaggaaaagcaagaagactagtatggctgacaggatgagctaggagagtaataggaaatgaacttactgaggtttttctaatgacctgggcttttactttgaggtaaggagccagtgaaggtttctgagaataaatggtatgatctgccttatttaggattgctgtagttgctgcactgagataacatgtacatgagaggcaagagtagaagcagggagaccagagaggaaggtattgtagtattccaggtgcaaactcaccaggtagcttgaaccagaatggtggcggtagaattgggaagaatctggatatattctgaaggcaaaattgatggggtttactaatggtgtggatctaggataagagagaaaaagagttcaggatgattctaaagtcacttgatagactttcaaaccactcacaaaatgtgttttgttttcgtttgtgtcatgataaagttatttttaataaggtcaaataatcccctaccccaagagttaattaggatttaaaatgagttcagagggaattgggatccagccttaagggcttcaactctgttcaagtatttaaatggctttgatctctgattaaaggtggtggctcagctttaaactattattatctatcattttctgtgccctgtacattgtcatccttgcaatgagaggcatagagctatcaggagaggggactaaagcctaactttttaagtagactaatctttgtatcctcagctctattccgtcttttaccgacagctggtgcctgacctagaggcctactgcatcttttttgttaacaggatttttaaaagttgaggactttttaatgccaattatttcactcagaatatttatttatttatttatttttttgagacaaggtctcgctctatcgcccaggctggagtgcagtggcgagatctcggctcgctcaacaggaataattttaatagcaaaaatttaaaaccccttcattaagccaggcgtggtggttcacatctgtaatcccagcactttgggaggctgaggtgggaggaccgcttgaacccgggaggtcgaggctgcagtaagtcgtgatcgcgccactacactccaacgtgggcgacagttagaccccatctcaaaaacaaaagaaaattagaatggtaaaaatgaagtaaattcactttgcttcccacatctagctagacagggaaagatggagtagctttttcttttttacttcatagcttcagtgttgtccgggctttcattactctcatctcagtataaagtggtaacaggaaggtcaggtgagtgtgggctgcctacgagctgtacttactgccttctgtttcacaaaaggacgttttctccccataatgtcgttgttcttgctttgaattatgggtgctgggagaaactaaacgaagccgtcactgagcaatacacccacagcccgtcgaccgataggaaccttcgcgtggggggagttggttacttttaggttgcatgaagaggcggggcctcgcggggcggagctgggggtggtctgtgggtccgcgcgggcttcgggtagttcctgggtccggggagcagacgatccgctagccacattaggcgctcggtctctgcgtccgcccctcccgtgcctcagagacttgcgctccccaggcccgagcccctgtcggcccatcctcgagcccgtgtggctcgcgaacctctaactccagccgctgcagccccctcccaggcccggcgtccccgagccccgcgggcgccgcgcctgcccttctttggctacgctgcagccgcggtgtcggcgagtcctcccgggttgcccccgcgggcgtcagagggagggcgggcgcccgcgtggtgacggcgacgcctgcagcccaaggagcgctccactcgctgccgccggaggggccggtgacctcttggctaccccgcgtcggaggcttagatggctcaggcgaagatcaacgctaaagccaacgaggggcgcttctgccgctcctcctccatggctgaccgctccagccgcctgctggagagcctggaccagctggagctcaggtgagctccgggcgggcggtctcgggcgttctgctcgccgcgcgggcggttcgcgggcggttagcggacggaggccgcgtgtggcgggccggggcctggggcacagtgaggctgcggcaaccgaagttgcttgttgagatttgttgtggatggacgtggtgtagttttgtttgtttcttggattatctcccctagtccgagagaaaacgcattcgatttaagctaaacctgtgagggcgttatcggtggccacactttgattaatttacctaggtgttagggagcggaaaaaaatcagaggagataaaagttacagtgagattccatgcgattaaggactgtggcagcttgggtctgcagaacttctagaaccttctgtgtggccccaaacgttttaacttactcttctcgttatgcattttttaagggaggcagcagtttacagtggccctccacgtgaagttaagtttccttgcttcagaacaaaaatgaataaaacaaaaccaacccagcaatccattgagagcaaagattagacaggagtgaggggtaggcagtaagttaccgggtgcttcgtgcagcagagacgttgccgcttctgtttctcccctaacctcgcggacgggattcagcggttccgttcgtctctcggtatttattgggcacctccctacatagaagactaagtgctagttactggcctgaaagcatgaaaagatagttttccccttttcttgcttaagaatttatttggtaatacagtagtagacttgtatagaatttctaaacaatttaatgttaatagatttttggaaagactttaacggtgtattgaaaagttttatctacttcctgtgaacgtttgtctcaagttactgtgtaaattttgtgagcaggtgtagttaaaagaaaatcttgttaggcacctgcaattccgtgaaactgtacacaggagttggttacatagttttgtctaggttgtgcatgagcaaagaagcatgtgagccaaaaagtttaggaaacactgcatgtgtgtctttatcttcctacattaatacacccaaacatgaagtatctgtttgctgagaaaatacttcaataaccacggtatctcttaacaagtgaggcattattattgttactattgggagaaaagagccagagagtgagagattctccactcaaaataatttcttggattattaagccctacaccaggttctggggttccactcagaatgaggcaagtggaagagagaagtaatgcttcctcatggattttcacaatactggcaaacctgaccgttccactcccagaaaaagtagagcgaaagtagaaattggtggcctcagttacttgaagtccctctaactggtaatgtttctttttagggagccacataa

SEQ ID NO: 1882362 - DNA, 4001 bp, Homo sapiens
ttttaaaaaaatcacttaaagatttcaagttacttattaaactttagaaatgatactgtgacatgttttctgaaacctagtatacatttttaaagtattgctaatgggctgggtaatccattaaagttacataattatgacagaacaaccgtagcatcgttaaagaaaaactgacaactccaaactgacaagtgtaagaaattccaaagttgcagtgacaattcggatctacttcctttcatgcccagatttacttaatatctcatttgattttcaaaccttccctcagaagcaattggaacaaaaccatgagcaagctcaatctccatttgggcatgtaacccttttacaaacacaattacagccaaacactattgtaacctgatttgcatttgcactaactaagttacaaagcacattgaggatgcctgctatgcatactacagacttgttaggaggatatattgcagggcttctgtgaacactaattaaaaaggttttatctttcccctctggtccactgaaattgttcaaatgccttgcctgctacaactttgttcaaaaacagttttcaaacatgtgatcagagctaggcaactatttcaggtggcatgattctgtttccacggtggacaaggccctagagacaaagtttcagtccaaactttgagcttcctttcctttgttattttgtgttgcaaccttaatattatccaactgtggacttttatctctgaatatctaaatcctgtcttgtggaaaactaattactgaaccactgagagcttcataatgtcctgcatttaagtcctgagcatcatacataatgcataggcagcagtctctgcactctgattacagaacactgtcattaagtgagcaaattaaagatgtgaataattcactggctgagcttattgtcagtgctgcattgtgaaattagaatttctaataagtactgcaatttttttaacccaattaacacagagaacatcttgagactgattagtacaataaaaattattaccttattcttttgcttcacaacagccaaattaaatactgtacttaattatgcagcattcatccttctctgctaaaaaaaaaaccctatcattttaataagagttctaatatttgtatgtgagctaaaaatacagcacatgcatctgtagctcactgtctttttacaaagtttttttaagagtctgaacatcagtattatcaccagtggtggattaggatgacactagtctattcttaaaccaaatatttttcctacaaaacaaacagcatacatagaattgacaaagtaactaacctccccaaattgacttgaatctattatgcctctggtttttcttggctttttagatacacattaacacagatttgcccccactatgctgtttgtggttgaggctgaaacatatatttaagaaaattaatcgattaggaaaaaagcaagtatctgaaacagtgggtcttacctcagatgttcatttagcacgcagggatctgtgtgactcctgccaggcaagtgggaaagtccagtttatgctcggcatgatgatcctacgcagagagtgtctgctgccatgttaaataaagaaaatgatcatttaaaccggggcttttgtctcccaatatttcctcctgctgcccctttctcatcaaagcccagaaaggcaggcacatctggcggcagtccctgcccctgaccgcagctgcctctggagagctccccccttcttttccagctcctctgcatcccttgctgggcaacttcagccccctaaaatgggggaaagaaacgatgacattgcaggcagaatatgagattgttcagcctctgcagccacctccttcctgtctagatattttatgagaagggaacgagaagggggaaacagcgaaggtgctctgaaaatcagtcagacacaatgcaatagggagatggagaggagggaaaggagaatgagaaagagagagtgtgtgtgtgtaaggggggtggctgtcagtgcagataaatctgcatatggaaattagggttatcctgggtacagttttatttaactatgatctactgtttttttaattagaccaaattttagcaaaggaaaggaagaaagagtcttgaaaccagagagcaacttctaattcaatggacaaaatttcagagcaactgcaaatagcagatccaaaagttgtagaataaagaaaagcaacaaaaaaaggacatttctccccttgttttgtttaataaacaaggagaaagattccatcctcacaaccaaaaattaataaataaattaaataaaaggaaattacgatgagaatgggaaggaatttaaagaaaggaaaaaaaactctttcatgatctgcataaaatttcatcttaaaatgctacaacaatcaagataaagggattttcagaagaatatatatatacacacatatatacatatatatatataaaattggggttacatgtgaaaattagtaacaatacattctgacattttaatattagagatgtagcatatttttcccttccttagagaactcctgttttgtagctctaacccatggcaacatattatgatcacataccataatcatttgaggaagtcataataccagcctactagccttacgggatgctgagagtaaaacaatgagacagagtgactaaaagactcctggaggttggttggtgtgtctagcaatgagtcctctaccagaggtgctgccaggatagtgatctgaccggaaggaacttgaattaattccataagctgtaagtggtgaatttgatgacatagattaatattaattcacttgttgaacatttattgaacacctatcactgcaaacattgtgctagaaagcagacataagatgaacactgcaagattcctgctctcgagaacccagaattcaatgggaaaaaaataaatttaaaatgaagtggtattgcaggtttgtaaacaaagaaagtagttgagatagtcttgactcaagcagtgtgggcacatgtcagcacccttgtaactttccatccacatgcacagctggaactttcaagaccagctcaagcaccctaagcaagttactttgtccctttgaaccttagtttcttcagctgtaaactgacaataatatctgctttttaaggttggaattataagaaataattaaagtaaaacattaccttatgtctggcttgtgataattgctcaataaaactgagaattgcaaatcaattctcagttcaaatggcacctcctctggcaaacctcctctgcagcaatatctgctgacaggttcagaagcttcttctggaatgctcccactggcctccatcatattatcttaatgtaattttcagcaggtctatctctatagcagtggttctcaacttggggccattttgccttccaggagacacttaacaatgtctggaaacatcattgattttcatgactacaggagaaaggttgctactggcatgcaataagcagaggccaaggatactgttatacaccctacaaattttggcttctaataaaaggaacttgggggtccttagacgaaaggctgactctaggactggggctgaaaatatacaaagtgggcctggagtatcttgcagtgctaggaaataggaagtgctcagaaaacaaaacaaaacccacattgttaggggtatgtcaaagggacacaggaaccatcagaaagagctctcgatgtctaaaactagaactagttaaacaacaaaataaacaaagtagtattgggttataactcaaagtataatataaataccatgagtctatattaatgtaagtaaattattgaaaaataatcagaggagaagaaacaaatcttccttgccaaataattccaaatgatttatataaataacctctcttaatgagagggagtataattctccactcctaaagtgtgggctgattactgacttccacagtagaagg

SEQ ID NO: 1882363 - DNA, 4001 bp, Homo sapiens
accatgttggccaggctggtcttgaactcctgacctcaagtgatctgcccgcctcggcctcccaaagtgctgggattacaggcgggagccaccaagcccggcccatacagtgattttttaaaatcagactgtccagtagtcttatttgtgctaagtggaaattagggaaagggtcagagaaatagggatttccttttgccttcagtagtatcctcatgaacctgcgtcatggtgttgttaggtgtaattaatgaaggtttctcacaagataaaatgttattttgaggaccacgtccgtggattggaggaaaggcagatggttagctagtgacgactttattataatgctaattcaggagtatctgggtctctagtgctgaggaaaactgaattttcatgcaaagggcatctatattttcacatctgtatctttatccatctagctgtgctcttactattttgtttctacggtaatttgctatttcttttgcacgacaattgcccaatgaaataattcagatacttcgtgcactttgtcacgcagaagttttcatgttactctctggaaaggcacttcccaagatgtagctaataaacactgtatctttggaacatttttgttttccttttaacttgtagctcctagcctggaaattgatacttttgacacttgaacgttgttcatataaaaacactgtgaaatcaacatactgtctttgaggaatggcattgcatgcgtccttttgagaagccatcttgtagttgaaggaaagcagcaggacggaaaccagacttcccccccacggttccctaaaagtcacggataaagaatgaaaaaccgggactagttaagccaaggagagaagagcaagtgttcccggaagggggcgcgatgtgttgaggttaacaaagagaaagacagctgcggggtcagctaaggtctccgctttcgctaccgacccagactgctcaccttcacaaactcacgttttcctcaagcggcaccctcggcagcgctcaagtgagagtattccatccttggaatactccgagaaggttcgagccagaagttggattgcctgaaatgccgcttccagcgcactaagtaacttgaactgcgctaagcaactggccagaattggtttggtttggtttgaccctggggttcctccgtagtctgtaagtggagttgcgaactcaaccccttctccaaggcgggagtgtttctaggagggaacatacttccccttaaaggaagatcacgttgctaaagtaaaaaatttgaaggcgccctatgtgtagaacacttacgttcttggctttctggccactataaagatgggtcgggaatggcgccagctacgttaaaaagtaacgtgcaggaatggttcagttgcccggtgttgaccagagtagagatggttttgcccacaaaaaaaatggcgccgaaacatgtcaatccgcacaatcacgtgttcacaaacctggatgagagatggtatggcttcagatgacaaacggatgttattattctttacttccgggtgagacaaatcgggcgccatcttgtcttgttcccgaagaagtagaagcatcgaaagcgttggagaggtgttaccggaacggcggcgacaagggtgttcccgaactagagtgggtaagtgatggagaacaattatacgtgggcacttgccggaccattacaacgttcttggtttctgtggcgaaggtagcataacttaaaataggctgcgtacgctgcttggcgcgaccgctggaacctcattcctttaaagcgctgcggtccgccagacttggtaaatcagagcgctgctttcgctgaaaaggaaatgtccttgttaaagagagtgctcacggtcccatcttctcacagagtttcctctcggacgagaagggactaattgttgggttcctgaccggccgttaaacactgcgcgtgcgcagtgggaacccccttgtgggaagggggttcatgggggcggaggaggcgggggctcgcgacctggagcttataccctttgaggctctgactacgcaggcgcagttccttagtttgtgtttttcgtgtgttcttacccaatgatggatattatgtgttaagcttcgctaaaggtagtatccaatatttcagttttttaccctgtggtggatagtatcgtcatctgaacaaattgagcattagacaaatttgtttgtgggttgttaaattaacattctagcttaagattttaattcaacattaatcttttacatctttttacttccccctgcccccaagtaaaacaaaataaacttagaattcctcatttgagtgcagcagggcgaaaacaacagcaaccagactactaaagattttacttgtggaatttttttgtaaagtggcaaagggcttatagagaaaacagttctttaaagatgttcttgagagtttttttttttaacttactaatagactttatgttttagaacagtttttgtttacgttgagcacatacgacgtccccactacacacacagtttatcttcttattaatagatgttagtatggtacatttgttgcaactaatgaaccaataatgataaattattaactaaggtccatagtttattcctacttcctcacattttacctaaagtcctttttctgttccaggatgccagctaggatatcacattacatttagttgttgtatattcttaggctgtatattcttggctgtgacagtttctcaggcttaactagtttttgatgactgttaagggctgacttgtgcccctctaaaattcgtatcttgaagtcctaacctcagtaccccagaacgtgactgtatttggagagagggtctttaaagaagatgaggtcactagggtggaccttagcccaatatattaataactgctgtccttataagaagagagtaggatacagagggatgatcatgtgaagacatagggagaagacaaccatccacaagccaaggagagaggccttagaatgaaatcaaccccatagagcttacactatacgcctccagaacagtgaggaaataaatttctgttgcttaagccacccagtctttggtactttgttatggcaagcataccaaactaatacagtgaccttgacattttttgaggagtatggtcaggtatattgtagggtgccctgctattggaatttgccagacgattttctcatgattaaaatggccttacggactatatcaggggaagatcacagaggtaagatgcccttttcaacacatgctatcaaggatacatactatcaaggtgacttatcacattattactgaccttgatcatccttctggagtagcgtttgttagatttatccactgtaaagttacttcccccacccctttttatactgttctctttggaaggaagtcactttgcagagcccacgcttactgaatggacagttgtgctcttcctcagttagggtggaatatttacataatttatttggaattctctgtgggagatttgtgtcttccctcacatttatttgttagtttattttatcatatccttatgggcttgtggatgtttattacataacttatattataatccagtacttctttattttgttgctcaaattgtaccagctttggccattggcagctcttcgagttgtctactgttctcctttgacatgttcctatcaatttttttttttttagcactttattgcttcctggcagtatacatgccccagactcatcttttatatttcctgtcgcagtcctagagtcagctatttctttaaagatctctgattccttttattgaagaatggtattaaaaccaagttctcgtgcctaggtgtgcttgttgctactagggtgtcattttgggcgctctcgctacatttatttttaaattattattgggggggtatttataaccgactctccaattctccagtttttttttttttttttttttttgagaca

SEQ ID NO: 1882364 - DNA, 4001 bp, Homo sapiens
tagctgggactacaggtgcccagtacgcctgactaatttttgtatttttaggagagacagggtttcaccatgttggccaggctggtctcgaactcctgacctcaagtgatccaaccgtctcggcctcccaaagtgctggaattacaggcatgagccaccatgcctggccaacttttaattcaatattttgaaatatggaaaatagtgtgtcaggctctgtactgccacattgtatttcttaggtatccagggacactcgattgatcagtatcaatatcttcactctcttttttagcaaaaaggtgcacactacctcagcaagtgccaagtatcctacaaagatgagtaaaacacagacgaaacaagcacactaataatgcaatacaactaatttcttatgttacaaaaactcttcaaggatatagaaggaacattcactcctggtggaacattcccaggtgacttcatgggcaaggtggcatttgagttgaatctttgagattgaggaaaagaatacaagctgaggggacaggatgagtaaataaaaagacacagagtttcttctggaaagggaagtagtctcagtttgttgggctgaaccacagggatccatcaaagacttcatagcagaagaaagagaaacacagtgagaatcatgatttgtcaacattaatcgggaaacagtctcctggctagattgggcaataggtggcagagagcctggaatcaggataacccatgtcgtgcattggtaaccatccaggagggcctaaggaggcctggatttggatgctagctgtggtctggaaaggagagaacagatgctgggatcatcgccaaggttctgtcaagatggtttgtcatatgtttgaagagtaaggatgaaggagaagtcaaagttgctgctgatgtgtgtagaaatgtattaaatcatgggagagaagtctctgcagagacctttcaacataaaacctactaaatcagtggctctcagactgaggctccatggaaatgcctgagggttcaagtcctccggagcagcgggaggttgctccctacctccttcaatcacagcagcctcttttttatctgttttatagatgaatttcacatgaaattttactggtttttaaaaaagggattctctgctctaaaatatttgagaaccactatgctggggcctcccaagctgatattctacatcaagactagtctccaaaatgttactcaaaatcttattcaaatcagtgcctcctaggcagtttcccagcagtacacacgtctgccttgggccagtacttgtcactggttgcattgagcagctgatgctcagagcacccctgtaatagctccaaacatgagctagaaatctttaaacaattggtgctctcctgagagatatttttatgcttcctgttccctgtctgacggtatttttggcccttttcaaggaaattaggaaattccacttttgtctcggtcattaacctgggagtactgaggacaacaacaaaggagcttcggagagaggataggatggtagtgggtagaccagataaccactatcatttgatcttcataggaaggaccagatgttcattcagtttttattcttctaaaccaattattccatcgcaatgaatatcatcttattctgaaacataaaccacagtttcttacctgcaccctgagctaaaaagatagctctcaagtcttactctctcctttctcgatacagtagttcaccccatttgtggtccagaagctgtttccagtgatctccaaaggggaaaagtacttccatgatgaacattatgtctataaaaatcaagaaaataagcatcaaaaactttagttttccatgcgaattaaaaaagcagcaacctaagcatttcatagtgtcatgaaggcaaactgcagcttgttttaatttgccttataacatatctgcagtatacctggggagaactgatgttctaatgaattaggaaagcttcttttatctccttctacctgtagcttgaagacctcagcttttaaaaagctgttgatattgaacaactgttaaattggcagttattcacaactgccaaatattggaatttccaatgactactgactcaggtagaaaatagtgttgatacttattaagctttcatgatttacaaagtgttttcctatatatttccacctttaatcttcacaaccatcttacaaaccaggcagtccggaggttattcatctaatttatgaaagcatggaaatgttaaatgataagcccaaagtctcctagcgtggaaacttgttgagacagcaggaagtttcacagagttctagactgttagaatgtgaagagcctggaaatcatcatgctgctaacatcattgaagaggaagaaaccagagctagaagttgagtcacttccccaagttcccacacagggtttctagaactggaaccacaaccaagtttcctggctctgaggtcagttgtctttctctactgcatcacagagcagggacgccgtcacgggggtgttgagacattaagtgagctggatcagacaagaatatatccatgtttaccttcgccttataacttatgtagtcatctgtgtcctggaactaagtaattcaattgctaaaacgttgaaagttctcttcgcctttggtcattatatttatctcaattttgaatttaatttataaccaaatcatgcatcccatttctttcatttcaagcattttttgccttggccccatatgctatcaaccccttaaaccatgctctcagcacctatacttagaaagtaagcattcaagtgcattaaaatttcagaatttccggctagagttttctggtggtcacataaaaataaacaaaacatccttgatcttaaaaggaagaaagaaagatctatttcaaaaatgaacaataacatttttgttttaaaagtttaagaattaatttttaaaattcctagaccatatcatgtctggtattcctcctgtacacagtgatcggtcaggtttccacatgaccttaagaaacttccctatcatgtaccaaaacaattgaaatgtgagaaattaatgaagaaaatgaaacgttgatagcaccaaagtggtccactctggcacttgtacccctccatgaccttgtcaacctgatttataacaattctgagtttcagcagctccatttttatatgtagaatttttctactgttaatgtcacagggaaatcaccctagtcttctaacagcaaaaaaatatatataatacctgtttctcgagaaaatctgccaattcccagcagaactacagaactttatgatataatccagggactttgctatgaacagcatctgctgagatatgccctgaacctaatagaggacaaggaaaaaggggtatttcaggggtttggggcagccccacatggtctgcaaaataggaaggtttttgggaggcaggacagttctaaccctgcccattccatggtccattttcaaaatggtgggcactttcacgcctcattctcaccctagtctttgatgtcaggaggatcctcagtatggtgagaataatactgtatttaagatgaagctgatgtctgtgtaaggtcagagtaatcatctttatgagtattatccgaagatatttggatatccgaagatatttggatatccaaagatatttgtaaggttctccaaacttctaggtttttattaaagggctgggctcttcctggtctcaaacagtatttgtggttactttggcagatgaagcacatttttcctgtgccctatgtttttggacatgcagtatatcaaagtgttcggtggaaataagcattctgttatttttttcttagcacattttttgtcttctcttccattcagttatgttgaaagctacgtgttggatctgttttttagttatgacattagatcttcatctgagattatctaaactacgttggttttcttttgattacaa

SEQ ID NO: 1882365 - DNA, 4001 bp, Homo sapiens
tgcctcagcctcccaagtagctgggattacaggtgccctccaccacacccagctaactttttgtatttttagtagagacgggtttaagccatgttggccaggctggtctcaacctcctgacctcatgatccgcctgccttggcctcccaaagtgctgggattacaggcatgagccaccgcgcctggcccatccctggccaatatcttgatttaagccttgtgagagcttgagcagaggatcggctaatccatgcccatactcctgatttgcagaaactgtgagccagacaatgatgttattttaagttgcttaatctgagcgtgcagcaatagaaaattaatatttgcctttgcatgatggagcccagtttactcctcaaattcaaactgcaagagctttgggagaattacattgttagctttccatactctaaaattcaataagacaagtcagaagtggttgttgtttatattaagtgagtcaatccctagtgtcgtccacccactttttttgaaaattattttccaaaatatcttttacagcctatatgataggctaaaagatgtcatttcattttttgtttgtgtaaaatggcaaagatcaacctgtcctgtgaatgagtattcaagaaaaagtaattaacattgctatcagcaatttccttgtatgcatcaaccagttgggtgaactcatataaatattcctgctgatttctctattaaaaaatgcttagagaatagacaatttaggagattactgctactccaggagtggccactttagcaggactgttgacatggagactttccatgaccttacacacatgttgataagaatgcctgtggcctctggttctcatcagtattgagtagattgataatattctcagtggtcttctcatagcgagtccagcaaaccatcaacaaagtaaagctaataagagagggattttttaaaatctttcagcagagaagcattagggcaagttatatttatctgatcatgtactactatttctcccagggagtgtgagaggatggggagccgatagtgttccatgaaagtagaaaagttttctgattcaccacaaagatgaatttgttttccacataatgaatgtgtagtatttgattctccccacactaaagtggttcggtttatttttacatcaagtaaattttagccatctcccttgctttattaatactctctaacccaatttcctttcatttcaaaaccaccaatggtgaggaagggtaaacaataagaacgacatgtaagaaattgtggtatccaaaaacaaaacgaaaagccctatttgctttacctcatgtcgtaatttcccagacttgttcctcttggcagtgttgagctccgcgttttctcccagggagcagagcaacttcttacaaaaccttacttcgtgggttttcccaggtgcctgttatttcctgagcagcacatagtagcagtcccttaatctttacagttctgaaagttggcaaagtgccttcagaaagtcttgtcttatttcaattgattcctttgcaacaacccaataggagtcaggacatgtatcattatttccagtttataaacagcagaaacttccatttctagaggtacataactggcttacactatgataagccacgacatggagatcagaacccaagtctttggagtgtaaatgaggcagtctttccccaggactcctgtcctcttaccaatacatcagtgaatggctggaaataaaaatttaataggcaatgacttcctgctgttctctagtcttgcctacccaaatcctcttcacactcagaaaatgcacatgagacactattgacaaaactaagtacaagtttcgaagcattgacctttgaataggaaggaaaaagaaaaaagaaatttgcaagcataaatttgtatactgcttacctcataagttttaccctttttcctccagaccaaccatttcttatagtctgttcctaactcctcctggcttctgcctagacttgctgctgacagccttttttgtctgagtaagttgtatttgcccctgcagactctgctcagacttttcccaggctggtcaggagagtcctcttctgatccagtctatttctcttcttatcaaattattaaaatttctgctaaagtgtacataaccctctataggatatgagcccatttacgtttcttatttatcttgcgtcctctgtatttaactcagtgcagggaatttcagcactgaaatgtctgtggaattaggatttaataagcaatggttttattggctaggaaatagcggcaaacaaaggtgagcctccagaggtgtaacttccctatccaaactttctctgtggggactgagaacctaggaagggaatgagtcacctccttttacacgttgccatgagttggtctagagaggggagtagaacagacggagtgaggccaagggtcctaggatataagggtacacctgtgggtactgtggtgaccatggaggtgccccattcaaatcttccttccagaggacccgcagcagagaagagagctgactaacagccttctgatgccccacctttaagctggttgcagcgttcaaaccagatgctactttccacgggctgctcccagataatggcatagtgcagtggggataataggaccaggccacctctgcctgacacagaactcctctaatgagaagcttcaggtcttggagccgggggatcctcactggcctggcagagacattcttagagctgcactgtggtctgaggctcctcccaactccgtccttccttcttgctctcctttctcagacccgcatcaggggctgaaggccatccccgacacctcatgctccctgcccgtttttcctaataaatctcttgctcatctaatcccattttgactgggtcctttttagaggacccagactgacagagatacttcaagatttagggctaaaagtgtattttttaaatgccactcaaaatctgtagaccactatccagaatttaacaatgccctacttagtcttgagctgtgtagtagtttagagttagagcttaaaatacaagatagaaaaataggttctgcttctgcacatctgaggtacacacaggcaaagtggaggggcaaaggagcccaggctggcctgccactggtgcaagaaggatcaggctgctgtggaatcctgtgacaactggactgtggccaagtcatcggggtaccacatgggttgaggagcacggagcaggcctctgacagccacagaatataaataacacagctgcctccgccactagccagctgaggagagccacagagaagaggagagggcaagaattaacttgcgcatcagcccctgaaatggactaacacttccattgttaccttgtttttaaaattttaatttggtattttggccgggtgtggtggctcatgcctgtaatcctagcactttgggaggccaagctggcagatcacctgaggtcagggattcgagaccagcctggccaacattgcgaaaccctgtctctactaaaaattcagaaattagcctggtgtggtggcacatgcctgtaatcccagctacttgggaggctgaggcaggagaatcacctgaacccaggaggcggaggttgccgtgagccaagatcacaccactgaactccagcctgggggacagagcgagaatccatctcgaaaaaaaaaatatatatatatatatatatatttttttttttttaattgggtatttcaaaccactttatacgtttgttgtgtttgtggatattcataccagaaatgtatgtaaatatgagggttgtgacttggaagcattttattgtatggggaaatctttgagatgccaaacagcaaatagttaattaaccctttaaaaaacctccttcacataaagaccccaagctccatgagaacaaaacctctagttccttaaaaatagagcactcagtcaccc

SEQ ID NO: 1882366 - DNA, 4001 bp, Homo sapiens
tcacatctatcctgacgatggttacacgactctaatccactaaacaacattgaattgcaccctttaagtcggtaaaggcatatggtatgcaagttatatctcaacaaagctgttattaaagaaaggaaaagctgagtcctgccacacctcatgtcatgtcacctcttcatttaacaggtcactgggcctgttctcatagtctttaaagaaaagagtggcaatatatactttagtcccacccatgattgtgaatgtttgggtaagttcaactggaaatgtgacacaccttcaggaaatctgtggcaggacccatacgagaaaaacatttggactagcaagtagaactcagggtccacctcattcctcaagagtgatggccgagggcacaccccagggacaaggtcagtggttgatacgaggaggcatatttagagttcctctactcagcatcccgggatgtgtgtcccagcgggcttgcctcctggggctggggttgtacacagaaaagacgaaatctccatgcacatgttgctgggcaaccttgtctattttattcatcattgtatttcccggcacagcagatgctccataaatgctgaatgaataagtgaataaaaagcttatgtgttttttccttacccctcatcaccttagcatttgtcctgaaatatgaggcacagccatctggaaaatgggcttcctgcatgtccaaggaggaagctggtctccctgcacagctgtattttccatcttgctcttacccataacaggtattttaactcagaaggagagatgtgattgttgctaaatgcatagtgggcgctgggctcagttcccgattgcaagtgtgtaggaaacataacttccttgttctgtaggtgagctgacctcgatgagaagccccattctgcactgacagagatgctctgcaccaacctggggtccctgtgattccacaggagacaggaggatcgcctgggggtgggtggagcctcacggtccactcatgcagggtgctgtggagacaccctgctggccctctggttgggatacaggcaggtcctggctgcccctcacacctctcccctgccacaaccatgcagcccttgggtgtccaggaaacgtttgatggctccaggacagaaacctccgcaaggctcccaacctggtcctccagacacacccgcagacctctcctctgtccctgctccacgctgggcactctgaagtcagcccccagcctcacctccaccaccagcccagggcatgaggggcagaatacagggtccctggggagggccaccactctcgcggcccacttcccctccagctgtccagcttcccactcaagaaatactttctggggcccattgtgagttctgtgccagggtccagacttttcagattcaaaaaccaagaaatcagctagtgtgttatctgtgttctgctatgttttacctgaggaggacattccctggaaataaaggcagagtgggccagtgcccagtgagggatggtcgaagtaacaggaaatacccaggagaccactcagtggccttgtcctgaagattccactgtagaattttacaaaagttaagaagcatgttgagtgcaaccacatcaggcaagcaagaggagaggaggggagcctgttgctgctgtacaaggcagatcttcggccacagacccaccagctccagatgcagcccagcttccaccaaagacaaggcgaaatgggagtgggtgggcagatacctggtcctcaaagttggaagatgaaatcctcgcagacttctgcttcatatcttctaccatgacccttttggaaggtgtcagggcagatggccctactgcagaatttaggtcctggaggtagagggagggctctgctctgctgtccccgggtgggcctggctctagagacttcccctgtggggcacgctgggaaagaaggagtctcaaacccatgtcatgtcacaaacagctgacacacgccaagagcttctagtccaagctggagaaaggaggtgctggaaaggctgggaccaacccaggttgccttcaaatatcccgaggctgtcagagaacaaaagaatgaggaggaagttacagggaggtggggtttattcaaataagaaagatcaggtagtttctgtgagagttagcacctcgtccctaagtgcgtccgggccgagtttgactagcaaggcaggactgtcatgaaagaggttttccattaaacagtttcatccaaatggtctctgaagtcacagctgactgttaagagtctatgactacagtgtccaggtcaaggttggctgatattggatattgaagcaaatatcaaaccaaagagccaaatgatccatcttttagaatagattcacatttttttttttttgagacagagtttcgctctgtcgcccaggctggagtgcagtggcgcgatctcgactcactgcaagctccgcctcccgggttcacgccattctcctgcctcagcctcccatgtagctgggactacaggcgcgcgccaccacacccggctatttttttgtatttttagtagagacagggtttcaccgtgttagccaggatggtctcgatctcctgacctcgtgatccgcccgtctcggcctcccaaagtgctgggattacaggcgtgagccaccgcgcccggcctagattcacattttttaaaatcccatttctgtttattatgaagtcacttttatctaattgttcataaaaatgaatcttaaaaatctacacttagttgaaagttcataaaacatgtaattagggcattgcacgtccaccacacatctggatttatgagttcattgaaagctgacaacaatcactgagatcactcgtgagtcctggccgcctgtcagaggccaaaggctgcagctatcctttaacagcctggtctttgcactggccaaagagacagtcaatgtcagtcagcatttgctgttaatagtggatgtggccaggtgtggtggcttacgcctgtaatcccagcactttgggaggccagggagggcagatcacctgaggtcgggagttcgagaccagcctgaccaacatggagaaaccccatctctactaaaaatactaaattagccgggcgtggcggtgcatgcctgtaatcccaactacttgggaggctgaggcaggagaattgcttgaacccaggaggtggaggttgcagtgagccaaggtcatgccgccattgcactccagcctgggcaacaagagcaaaactccatgtcaaaaaaaaaaatagatgtgatatgaaacttttactaagcattttatctctgcaaatataaatttgtctaacacaagcagatctgcaaattttcaattttctgacagtaagtcacacactttaagattatatttaattacaaaaaaaaaaaaagccttcttttgggggtagaggagtttgcgccaggcagaaggtctgttttcagatctgtaaatgggagtgataagggaacgtggaggtctctaaggaaacactctactataaagattatgagtctaaacccgctccttgtcgatggggccagctgcaagagttcttccctgtttttctggaatttaagtgtctagtcatagttcatcagctcatttgcattactaagtggcctctttacgtatagtctcttgagataagtatcaaaaattctaaaatctgagttcagaggttttccttttcataccagctgccttttacctctctcccttccccacacacttatttcatctggctttattttgggcaccaaaggagaaaaatgtcacacacacaaaagtcaacctgtcttttatttctatttggaggggaaaatatgccctatttgttattttcgaaacagatgattttgggggtggggaacatagtattttcaggaagtagccagccaggtaccagcaaactcgaactgaaaccctgcagccggtcccggcccgttctgtggccgccaaat

SEQ ID NO: 1882367 - DNA, 4001 bp, Homo sapiens
ctctctgttttaatttagaggttgataatatccagtattggtgagcatacgagaaaacaggcatccttaccttgtgtgtgggaatgtggattaagggtttttggaaggaagtgggcagccttttcattttaaatggacattctttttgggccagcatctcacttttagatgtctgatctacataagtatttgcatacatgcttagatatgctaaggttttccctgtagtattttcaaaggcatttttgcagggtaatttaaaaaatcgtggtaaagaaaaacaaaatttaccatcttaagcatttctaagtgtacagttagcattgttgaatagcaaaaaaggaaagaaaaaggaaggaaggaaagaaggtagagagggagggagggaaaaaacaaagaaaatgaagtgtaattaattcaattttaattttgccttcaataggagaagaatttaatttatagtatgaactactatgcagaattttaaaatatcacaataggttcaaatgcacttcttgtaaaacactatgaaaacaaattaagtgaaaaatgtaactggcaatgcaatgtgtataatatgatctcatttatgtgaacgaaaccctgtgtatgtaaatttatgtatacaaatctatggggagaggtttaaaaggtgacacttttcattgctaacagaggttgtctctgagataggtttggggaaggagatgtgggaaaaaaccttccattttttgccttctatatttctgtaatatttaaaattttaacaaggaaaatctaattctgtagcctgcacataatctaaagaaagaagaactccattatacaaccatatatctaatattaagtgacatggtattgaaattgaaataaaatccatataaatggtttttgaaaatatctgtttatccttggtttttataaaagtttttaatgagaatggcatttgaacattgacttccccttttcatgaataaagtctatttctgccttttcttatgtttaagagctgtttttatttcctgttctgtgaattggcttcatatacttcacccatatttttcttcaggagtgtaggcctagtatgcatggatgagtagaagcattttttatactcaaggaattaagccgagcacagtggcacgtacctgtagtcccagctgcttgggaggctggggcggaagaactgcttgagcccaggaggctgtagtgtgctatgattgtgcttgttaatagccaatgcccttcagcctgggcaatgcagtgaggcccccatctcttaaaaaaaaatggtaagaaagagattagccttttgtctatgaaatgaatcataaatatatccctagattgttatttgtattttatcttgtttacagtattttcaccatgtgaaattagagtttttatgtagtcaaatttatgaatcttttagcttccaggttttgtgactgtttattccttcctcagccaactccaatctggtttgtgctccaccattacacgaaataaatggtcaccaacaccctccttgttcctaagttcaatagaaacctgactttttggcaatattctacccttttggagacttcttccttaagaaacactttttgctttgggtcctgatcttccttctagcttcctggcctctcttgcttagtctcattgtcctgccctttccctggcccatgctttaaatattgctatcccttgcggggctggcctgagtcttctttcatccactttctcccaaattggtctggccctcatcaatgacctgactgccagcccagagctcagatctctctcctgagctccagacccaaatctctacttgctcatcctatccttccatttggacacacaagtatctctacctcaatgtatccaaagccaagattattacccaccttcccaacacaccttcttggattcaccagagcagggatcaagttcacttcatcagctctgcatactggacacctcactcagtgtcttctgctccttatgaattatcagttgcattaaactgaaaggcaagacaatccgtgctgttacccaagctggacaatgagacaccttcttcccccgtcactctgtcatgcaaatttaaatagcaccttttgatactgcctacaggttgcctatagcaatcactcagttgattccaacacatgtattctcacttgtcttccttcctcttcttgcctcctccaacccattctccacattccttgcagagaagtctttcctaaaagtaaatctaggtaatcctagctgctacaacataaacctgcagtctcaatagtgtaacacaatggaaatctatttcttgctcacataaaataaaaaataaaaaatgaggtgtccagtatgcagagctgatgtatatatatatatatatctcacagtttctttacccattcattgactgatgggcatttgggttggttccaggatttttgcaattgtgaattgtgctactataaacatgcatgtacaagtatcttttttgaataatgagttcttttcctctgagtagagggaatcccattacccagtagtgggattgctggatcaaatggtagttctaccttaagttatttaaggaatctccacactgttttccatagcggatgtactagtttacattcccatcagcagtgtagaagtgttcgctgatcactgcagtgttccctgatcaccgcatccatgccaacatctaatgtctttttgattttttgattatggccattcttgcaggaataaggtggtatcacattgtggttttgatttgcattttcctgatcattagtgatcttgaacattttttctttcttttttttttttttttttttgagatggagttttgctctgtcacccagattggagtgcagtggcgcgatctccactcattgcaacatccgcctcccaggttcaagcgattctcctgcctcagcctcctgagtagctgggattacaagcacatgccaccacacacggctaatttttgtatttttaatagagacggggtttcaccatgttggtcaggctggtctcggactcctgacctcatgatctgcctgccttgccctcccaaagtgctgggattacaggcatgagccactgcgattggccttgagaaatgtctattcatgccagcccaatttttgatgggactgtttctttttttcttgctaatttgtttgagtttcttctagattctggatattagtcccttgtcagatgtatggattgtgaagattttctcccactctgtgtgttgtctgtttactctgttgactgttccttttgctgtgcaaaagctctttagtttaattaggtcccagctatttatgtttgtttttattgcatttgcttctgggttcttggtcatgaaatccttgcctaagccaatgtgttgaaggatttttccaatatcatcttctagaatttttatagtttcaggtcttaggtttaagtccttaatccatcttgagttgatttttgtataaggtgagagatgaggatccaatttcattctcctacatgtggctagccaattatcccagcaccatttgttgaaaagggtgtcctttcccccactttatgtttttgtttgctttgtcgaatatcagttggctgtaagtatttgagtttatttctgggttctctattctgtccattggtctatgtgcctatttttataccagtaccatgctgttttgttgactacagccttatagtatagtttgaaatcaggtaatgtgatgcctccagatttgttctttttgcttagtcttgctttggctatgtgggctcttttttggttccatatgaattttagaattgttttttctaactctgtgaagaatgatggtggtattttgatggggattgcattgaatttgtagattgcttttggcagtatggtcattttcacaatattgattctacccatctatgagcatgggatgtgtttctatttgtttgtgtcatctatg

SEQ ID NO: 1882368 - DNA, 4001 bp, Homo sapiens
ccttacacctcatacccattacgagtcaaaataataataataataataaataagtgaacaaacgacaaacgagaaaactaggctaccaggcactggggcgatgggccacagcccggcggggtagtgggcccggaaggggcgcgggagtgggctctccccgccgggctcgcggcacgtggtcggcttgggcgggagcttcgcgacagtgggggaggggagcagcgtgggacgccgaggaggggtccagaccgccaaggctacgaggcgccgactgcgcaggctcggggacaggcgcaaccactgcgcgcagacctgagggggagaacgtccacccggctgcacgctccctggatctacttgcgcagcgaaagcttgtcttcttcctcattttaacactgtgtatggcgccgccttgcgcaggttgttcaccctaacagggcctctaacctcgagcccgaaacggcctccttctccagccgtgccccttcctcccccgtggaggccgcagtggatgcgctcacctccctgcggcctcctgaggtggtttggtggccccctcctcgcgagttggtgccgctgccacctccgattccgagctttcggcacctctgccgggtggtaccgagccttcccggcgccccctcctctcctcccaccggcctgcccttccccgcgggactatcgcccccacgtttccctcagcccttttctctcccggccgagccgcggcggcagcagcagcagcagcagcagcaggaggaggagcccggtggcggcggtggccggggagcccatggcgtacagtcaaggaggcggcaaaaaaaaagtctgctactactacgacggtgagcggccgggccggtgtcggggtgggcgcgcggggccgggcgctgggttccgcggctgccgtcgcgagtgggcgccggggctgaggggtgggaaggaggagggaccgacatttggccgcatcttaacccgttcccggcccggcacagttagaacgagaccctcttcctggcgcagcccccgcggttcctgcgggcgggaatcagggggcccgcccgtcttgtctcctgcctctcccccttcggccgtgcagtccgcagcctcgaaggtggccgccgctggggacggcgccggcctaccccgccttggtggtggcggcggcgaagggggcggcccattctctcccttctcccgcccaccattcgtggcaacgcaggtttggggtgccccgcgtcggcctcctaccccctcgacccgtcccccgcgaggcaaaatttctatcccggccttgactctacacaaagccccgcggccgcgagagctccgcccctcccgtccccttccctcctcctcgcctgctcgcctcccctaccctgcgttcggtctggccggagcgtcttctccttcctcggcttaccctttccccggacccctcctcccggtgggcgctggagagtagttactgagggtgggggctcaggtcgcgtgtggctttatcacacccatgttttgcgtgggctccaaccctctcctttgttcgctgggttctttgagcgcgtctttctcaggattcaaatggaagggcttcacttcctcaataatagttcgggttttccagtttcaggcagaaagacttcgtaggaaataagaggtggtagggagatgtggaactgctactgcttgtgttgtagatcagactccatgggtcctggcttgcctcagagaggtggttaccacccacttctttgttgctctttgttcgatcaggaaatagaccctgctttggggatttagagagcattggtatcttgcaaaggctgttcctaggtggtggggaatcctggtatgggaaaactttgagaagtgggagaagtgcagaagtactaaatattctaatgaggtaaatttgaggtcaccgtgtagtgaattataaaagtcagataatttaattatcttaagcattctataatttggagtatgagcagtaacattaaatcttcgaatcctgtttcctgtgttttcttgctcaatggagtagtaacctgttatacagatttcacaaaggcttggtaaatagtttatagtaggttactcttgagagaagggattccaaaatttaacagagaatctatcctaggctccttctcctgaaagtcctgtctgatttgtaggaagcaatacaaattttggaagctgtttcctacatgtggtgtattgtaaatcacaaaattttagagaagtaagaccccagagcaccagctcagaataaatctactttaacttgtaaatgaccgtactgtctctttttagttaaaaaggattaatcttttaatgactgatacatataaaataaccacctgtgtcatttggggaaaatctgaaatcttacagaacaaatctaaattgatctgcgatagctaggacagaataataacagccctacttttaaaaatgatttttcagaggactagatatgcattatataagttgatttgaaattatgccatcgtggaggggtggagatggaaatacattttaatttcaacatgatttacattgcatattttgggttattcttgccctgcattccctgatcaaattggaaaggaagtaaccctgcgtataagttaatttgtaaaattacattgtttctaaagtttagagatttatccttgtcagggcttggagtaaagaggaaaattttggttagggaaagtggtactgaggtccttctcgaagctgtcagttggtgttggtagtgatgggctctgaggaagtaagctgcttgtaatttgttgtcaccacaatggaaccctagaaccaggagggtacacttgagtagcagtttctgaacagcgctcttgtcctgggcccatttatgataaccttcgttgtgggaatgggagcaggcacgggtacccgggaaaggatgcaagcttgataagtagggtggaaatatttgtcttgtgattgtgacttaatatgatactttattgtagcccattcacctgcttacgtgatggccagcaacaagtgaatagctgatagtttggaaatctctggtgggttattttgtcttttgtctgtgactcgtttgttaaagtggagttcctagttgcttatgtttcacatactcttttaatttttgtgggagggaattaaaatattttgcagagattattaatgtttatattatgctaattattaatatgtgatagtgtgctgacctcatccaaaaacttatatttttattaccagagaacattgttttgtcagcttacaaaagtagcaatactaattctttttttattgtgagaagagaatgcaaggaaaggagcttctgtatcaaagaatcgtgactttaaggtatataacatggattggattgggaatgggttatatctgtagtaatagggtctgaattatctgctagcctaggttagatggttttaacttcttggtaaaggaagtagaaggaagaaagtgagtgaaaaagaaaaggacggaagtagcaaattctataaccataggaatcctacctttaggcttcctggggctgttaggcacacggagcctcttggccacacagaatgtctgccactgaggctgtttgcatcttaatgaaagaacttttaaatatatacatattgttctctgcacgttatgtaatcttcaggtaaccctttaggtcactgaaacgttggtcccaagggaaccttcagacattgatggattaggtatccttaaacctttgaagaaaagtaagagaagttattacttctctgactgtagctattgatccatgcctccaaattcccaaaaacatacttctgaatcatgttccttctttatacactagaagatcatcaagaatctgtaaaatgatacagctaattagatagtcactaagatcccttctgggccttaaaacgatgtgatttttctctacttaaatataattagcagctaagctgtgttaggctctagttatacca

SEQ ID NO: 1882369 - DNA, 4001 bp, Homo sapiens
catcctgggagctaggggacctgctactaggaggaaactctaggaggaaagcaagcaaatgtctggggagagacgccaggatctgcatgtgagtgtgtcagatggacatgtggctagaatccttttgcttaagtttgcaattcaaagaaatacaggggccggacgcagtggctcacgcctgtaatcccagcactttgggaggccaaggcgggcggatcacctgaggtcaggagttcaagaccaacatggtgaaaccccgcctctactaaaaacacacaaaaaattagccgggcgtagtggcgggcacctgtagtcccagctattcgggaggctgaggcaggagaacggcgtgaacccgggaggcggagcctgcagtgagctgagatcgcaccactgccctccagcctgggcgactgagcgagactccgtttcaaaaaaaaaggaaaaaagaaatacagaagatagagcctgtttgtgcctgcacacctgagagcaggccacgggaacatgagattgatgtctttaatcttgtcagaacggatagacattggggcaaagaaatgagtacggtagagaaatgtggcaacatagtcggcatggggggtggggtggggtctgcagaatacgtggccaaatctcaatgggacactggtgtctagggagcttccttaacaagcatcatgtagctgcataaactacagcaatgggcagtgaggaagaagactgtaggcttccctgatcatggcctttcgcctctccttctttgtccatcatcagaggagctaccgcagaggagacctggagagaaagaagtgtgtgaagggtgtgcctggtgcccagccctcagttcttcaggctgcactgccaaagggaggaaaattgcactgcgaaagggagatggacatgagattcaacttttaaagtaaagttaaatgagtcttagaaaccaaaatgagactagttgaaaaagtgacaatgttagaaaaattaagtcacatagccaagacgtgaacagatgtttcccagggggaaaaagaggctttagcgaacaaagaataggtaggtattacaaaaacgcaactgtttacacacacacacgtgtgtaaatatgtgtgtatacgtgtgtatgtgtacagttgcatttttgtaatacctccctaatctttatatatatacttatataaatataaatgcaaataatataaatattattgttgcacacacacatatatatgatgatagaggatgtagcatgtaggataaaccttgagaaatgggttggaatgtcggcaataccaagtcgggaatcaggaattcaggagaagagcttgaacaaaaagggcaaagacagtacagacttaccgcggggaagtacaaaaccattctagaggaccacgtcgaagtccacatggacagaaacattagggtgttaaaggggatgataaggcttggatgggcagtttgcttcaaatagtggcggtcattgaagtcaggcacaatttctattttttttccccactgtaaacctaacccacggcggttggtcaaagtcttgccgaataaaaaaaaaaaaaaaaaaaaagaattaagtgactggactgccaagctgtagagcctctattaagcaatgtacagccaggaaaggataccttagatgagaatgacatgggtagaggggtgtttcaggaacatggctaaagagcctcgctcccagcctcagccgggaggctgaataaaggacagtagcaggatcactccagcctttgaggacacttttggaaaccctggtggattcccagcatcaacacttactgagggctgctttccatccctaggttctttccggcatttgtaatttccaatccacttaggacacttctactcctcagaaaccgtttctgtcggggccgtgagaggagacagtataagacttcctggacccaagggacgccgggtcccctggaagcgcccatcgcattgaagaccacgtgtgccttgctggggtcccattcagacaagtcccgggtcgttcgctcatcgccctccacgcgaccagggggcgcccgcggtatcggcccggctagttcgcaggcgtgcgccttccctcactgcgccggaacgggccacgttctcggacccagaagccgcgtcagaattccacgctggccaatcggaactgtccatgtactactgggggcggggctgccaagggaggaggaagatggcggcgggggcgaggtgaggtgttggcagtggaaaggggttcgggctcggggggcggggggacgcggagcgatggcccgcgccggccgcaggggcggataaaaagccgtcgcgctgcgggagtgggcgggagggagagggggtgtctgagggccacaagagtatgacggggctgtacgagctggtgtggcgggtgctgcacgcgctgctctgtctgcaccgcacgctcacctcctggctccgcgttcggttcggcacctggaactggatctggcggcgctgctgccgcgccgcctctgccgcggtcctagcgccgctcggcttcacgctccgcaagcccccggcagtcggcaggaaccgccgtcaccaccggcacccgcgcggggggtcgtgcctggcagccgcacaccaccggatgcgctggcgcgcggacggtcgttccttggagaagctgcctgtgcatatgggcctggtgatcaccgaggtggagcaggaacccagcttctcggacatcgcgagcctcgtggtgtggtgtatggccgtgggcatctcctacattagcgtctacgaccaccaaggtgaggcccggtgcggtggtggggggtggccgaggcgtcttggaccgctagaccgctggtctggcgggtggtgcccatggcacgagttgccgcggcctctctgcaaatcacagcgctagcgctttcgaggaagggagatcagctttattgaacacctactaattctctggatttgactcagtagctttttaacattttaaaaatatcccttggccgggcgcggtggctcatgcctgtaatcccagcactttgggaggccgaggcggacggatcacctgaggtcgggagttcgagaccagcctgactaacatggagaaaccccgtttctactaaaaatacaagtttagtcgggcgtggtggcatatgcctgtaatcccagctactagggaggctgaggcaggagaatcgctggaacccgggaggcggaggttgtggtgagccgagatcgcgccactgcactccagcctgggcaacaagagcgaaactctgtctcaaataagtaaataaataaataaaaataaataaaaaatctcttattcgttataatactgcagtaatgtagatggtatttgtatacccttgccaaggtttaaaaacattaactgatttgcccaaggccacaagatcgtaatggggccacaaagatcggaatgaggatattggaattttagccattctgtgctttttcacaatctttgcctttggttacaccacactgtttctttaagagagcttccaggcgctgttcttaagtcgcagtgaggctatagaggacttaggcatgggctgtgtgataggtactgcaaatgggagcggtgggggtcaggtggtatttgaactgggtttatgaaaaatatgtgagagattggataggcagaaaagaaaatggtccctttctgtcttggaaggctgggatggtttgtgatccttcatcatcagtgcccaacacagtacttgatagaattgtcctctcatatgttttgattgagggaatgaatttcaccatagggagtttttgtaagtacaaaaattcagtacttattgggtagctacaaacctaaagcactgtgctaggcatattccttggaatcttgcatttaattccatggactctcaggcttgttaggaggtaggcacacactcacatatttgacatggttaataacaagaagtgttgagagtaaaattactattgtgaga

SEQ ID NO: 1882370 - DNA, 4001 bp, Homo sapiens
tgcaaaatgatctaaatattttactttattttcagaaaaccctcaccagatctgccccctcaccactaatcctggagcagcctgatgacttatggggaatccattgcttagctttgatgtagggagggagagatgaacgactgcctcccaaagcgtggctgctgagcaggatattaatgggcaaggcggctaatgcgtttgcattgttctgcagaagttttgcactgctttggggaatcatttatccttagcagttgcaaggtggcctgttttcaagtaaacctagagtaaaaatctggttatctattgccatgtaacaaactgcctcaaaactttgtgacataaagcactgattttattgtgctcacgtgtccttgtctccattctgtgatgctggggccttgtctgggaagactcgaagactgggagtgactgcttggctaggctgggatgaggcatctttacttacacatctggcactggacgctggctggctgctgggacttgctggggtgatggctggagaacatttcacctctccaagcggcctggccttccttactgcagtgtcttctgaattgttagcttccttatatggtagcaagtgtgcaagtcagcaggtggaagctccgctatctttgtcacctagcctcagaagtcacatagcatcatttccaccgccctctactagcgggagcagtcataaaagcccacccattttcaaggcaagaggtcatagcctgcgcctctcaaagggaggattgtcaaagccgcactggaagatcatgtaagttggatgatagcattgctgctgtatttgagagattgtgctgtgctctatgtagaggtttctgtaggaaataaacaagttgagttctctggtgaaaacacatctgaaaacatgttaataggaatatagctaatccttagcatttcttatagtagctaaggtcagtgtatgctaggcctggtacctgagcagcagtcttgatgctaagttaacaacaggtagccaacaggagtgttttctagctatttggaaattgaaattcaaccaaaaaagctactgccactctgaatcagttacatcatgataccttagatctaggctaccttttttcctgaataatagaaggttacattgattagaaattatggggaaagtagattccttcatataagaattggttaaagtttgactctgttctctgttaaagtaagcagctttttaaataattgagttctttggaggagtttttatattttatatattttttacctatttagccatgataaatagaatcagataagagaccgagtgtgaatattcagcacgaccttcaaccaggtgtatatatttctctctatgttctaaaggactcagcaatgtgtagtgcctatgagttctcatttgaaaaaggaggaatcctatatggaatgccatgtaacggccaggtgcagtggctcatacctataatcccagccctttggaggcctaggcaggaggattgcttcaggccgggagtttgagatcagcctggcaacatagtgagaaccccccacacctctacaaaaaaaaaaaaaattagccaaacttgctggcacgcacctgtagtcctggccattggggaggctaaggtgtgaggatcgtttgagccctggaagagttcgaggccgcagtgagctatgctcacactattgcactacagcctgggtgatagagcaagaccccatctctaaaagaaaaaaacagatatatataaatgccatgtaagcttttacacttgtatttcttgtctcaattctggttttttcttgagcaatttcttcttttcattctcatgaaagttaaggtgatgacgctgtgcttacccacaaactgtgtatccacgtagccttcactgccatttgtcctgagccttttcaagaagcataaatcccagaatgatcgaaacatctcttagatcccagagtgacttaagatccatgctaggaattaatcctgcttcctaggaagttacacaacagcagcatttgtggcagtgccacagcaagccagggactggcccacgggcggtacgctgtcattcccagtgctttctctgccttccagagaaacaggaatttgccacatgtctgtgactcatttgctggagctgttaagtggtgatggtgtttaaaatctcagggaagtaaagccaccatttactgaacacttcctgtgtgccgtgcactcagttgtaaccacattattttacttggtcttgacgagaagcctttaaaggcacttttattatcccaattttacagatgaggaaattgaagttctgggaggatgagtaacttgtagaaggtcacaccatatataagtaatggacccagcctctccaactactctcagctgattatagagattaaattagaagcagttcttcctttcttggaaaagtaaacctaatggggaactcagaagccataaaggaaaagagtgattaatttagccacgtaaacatttaaggcttctgctcaacaaaccgcaccaaaaaattggatcaggaatgtataacaaactagtgggtggggaaggagactgccaggctgtgataaaaggccaattttttaaaacataacaaaaaactcttcaacagtcggtgagcacgagacatacagactgctgtgaacatgggacaggatgctcagcctcactcatgattagagaaatacaaattatttgctgcaaatgacattttcagctgtaggtttgacaaagattttagaagtggataatgttcagtgctgtcaagcgtgcaggacaacaggtaccctccatctacattgtctgtggacatgcaaatcggtacaactctatattaaaactgaaaatacacactctttgactcagcatttatttattccacaaatattttaatataggtattcaaagatacgggtactgcaatattcattgcaatgccagaaacttcatcaatagaagactgattaaataaattgtagaatgtttgtactagcaaacactagtagccattattattttttatttgaatcttgttttatattttagcactttatacagcttgtctcattaagtatcacccagctaagattttttttatagggcatggcacatatattttgttttgtttccttatatttttgctctggatctcatgtgtagccagtagagatatgaaattaaatattccacaataggtatggcccctcaagtagccattataaagtattctatacaccattaagtaaagaaaacaaagatgtattgaaagaactaaggtataaaatattctataaattattccattttttgtttgtatgaacatgtaaacctttgtgcataggaaatatctataaagatagaaaggaaatcattaacaattatctactgaggactggaattgagggtattatctactttgcagttcatatgcatacaatttaaattttttactatgaacatacatcatttttataataaaatgctcatttctaaaaatacaatgtggaagacattcatttattagggccctgtttgcaagaagcagcataagtaaatcatcccatgttgacagataaaacttatccaaccatggagaacagatatcagtgacttaataagcagtaaagataataaaagttttagcaaaaccagctagaacctcttgggagtgagtttctctagctaggtgagttcttcagcctagcagaaataggagaaaatagtttttttggaaagatactttctgaagtcttatccaattccatgtatacgttaataccttttttttttctatttacaaagtgacacattgattgtcaaaatttggaaaataccggtaagctcacatgggctttatttttaacaggctacaaatttaaatacagataacaattgcaagattatgtctaagcaaagagagcaaattgatggccgaactgatgattgattagaatgacttttgtct

SEQ ID NO: 1882371 - DNA, 4001 bp, Homo sapiens
cacattagcgtgcatctgtagtccagctacttggagggctgaggcaggaggattgcttgagcctggaggtcgaggctgcagtgagctgtgattgtgccactgcattccagcctgggtgacagagcaagaccctgtctcaaaaaaaaacaaaaagcaaaaaataaacaaatatttattgtatgcctactatgtgccaggtactctcccaggtgcttgagatacagcagagtacaaacaaagccgtgttcttgtcctcctacagcttgcattcacgcagcatttgaagggcttactatttagtcccaatttatgaaaggttctgtgtgattaaaggctgtggctggagaatatgttgaataaagagatgggcagggttggccaggcacggtggctcacgcctgtaatcccaacactttgggaggccgaggcaggcggatcacgaggtcaggagttcgaggccagcctggccaacatggtgaaaccccacctctactaaaagcacaaaaaattaaccaggcttggtggtgcgtgcctgtaagctcagcctcatgaggctgaggcaggagaattgcttgaacctgggaggcggaggttgcagtgagccgagatggcattattgcactccagcctgggcaacacagcgagactccatctcaaaaaaaaaaaaaaaaaagagatgggcagggtcattagcaggcaggattgaaaagattggaaagtgaggctccatcttaccttggctggtgaaaatggctccctcagggcattgctcatgacccccaaaccgtccacagaaggaaaggatattcctgtccctagccctgtccagctaccaaaacaacagcagggaaagggaggccgagggtagcccacttacctcgccttggtaagggtctcccctgctgttggatttagcttccagttgtgtcatttcaaatgcccgtgatcctctactgtgtgcaagacaaaagtacgaatacttgcttgtccagccaggccccgagccaccctcctccctttcccctacatatgtccacgtcagtgggcaagctggcagcccggtgtctccagcacatggggtgcaccctgtctcatctgcaggccattgtgtgtgtgttcacagttcagaagctgactcactatctctgcctgccaacatcctccaccacacccacctcccacccctatggtcagggggcatgggtattgaatggcagtgccatcagagcttgccagcaccctgtcacccaattctcggccactgggatcagagattatttcttcctccctgaatctctcagtccctgctgcaccatccacagctgcgggggaagggctggccgacgtttttgatcttgttttccgtgcctatcacaatgcctgtcacataccagatcccctgaaattgtttgttgagcagactgttatcataatctcctgtgatatttaccacattttaccttttgacatggttatttgagaatatttttaaactttctaggtctgagctctttgatagcagggcctgtgttttatttattttttaatctcctaaagcacctggttcttggactccatgaatatttaatagcctgaaataaacagaatttaattcctggatagttgaatttgagaggtggaaataaacatagggtttttatttctgtttctctcaggggaaactgagtcaaagaaaaataagtaactcacaagctgatgtgtcaaccaaggctataaatccagggagaaattcagcaatagaagagcattgtaatattagaaagcttccagatctccccactcaggagtatttcctacctgtaacacacagatccgtcgtacaaattatgctttgtttgctgaaaagcctcctgaagctgaatgggtttactttggcatcagcggaggccatgattgagggcggagatgagacattggatcgctcttgtgtggcttccgcatggccgtcgtggttcctctgcccagccctctcctgcgagggactcgatcagctccagggcgcagcttgtgtgtctgctcccatggccaagtccccttggctcccttccccttggctctggtttggcttgactctgccttctgctcctcaggtctgtctaggtttagtcctgtgtaatcatttgcagcaaagcctgcccatgactggaaatgcagtcctggcttggcaggaaaggggtttgtgcaagagctggctgtacctgtgtctgaaacacctgaggcccttccagggctagggatgcaagaagcctaggctggcaaagctggccttcctgccagggctgaggagcactggagccctagaaggggactgctgtccagccccttggccagccagagcaagggccactgtagtcaaacatgaattcacaaatgggaagagcaggaggtgactcagatccacctcccccataactgctaatcatagtgaattattaagagcataaaatcaggatcttgtttcccacatagagatcaggcccatcagccctgagcagttatataatccacctcatacacgtggataatattgagactggcacttccaagcagaagcctgctaaataaggacatgtttgttgtttcttctacctcatcaaaatgtctgtttcttattcctaagaatggcagggagtaaaggattatttatttcccttgatatttttcatttcaagaatcaacatgggcaggtttacagtgttcacaaacatgctggtagcaatttgattgcaggaagaatgaaattttgccaggcaagtgcagatttgtctgttgtggtgagaagggccatccatgactgtacaaatggtgccattctaccctgaagatacattttaacaaggatggtggtagtagtttttattcttttgttctctcagatgcattccattaaaattaaagcatgaaatatattaatttgatgaaatggatttgtttccacttgatgtgttgctttgtgaaacgttaacattgtctcttaatgttcaacagaactgatgacactggtccatgtggccagcatggagggaaacatgattcctctgagagcagtctaataatccgtgtcttggacctgcattacttctaagaaaaacaaattagtttaacatatttctagaaatggaaactcttggatacatcagaaacaaatttgaatttaggcaatctaattaacctttagctaaaaatgttggtattttcacaactcttttggacagagttcgttgttagtggttgcttcaaactttttttccagatcttttatctctaaaaagcaatttatgattttttttttgaccctagtatactgggatgtcttttcgatttgattttcttatattattctggctccacttttgtgggaacttctttcctttcctcttttgtgctgttggctcagtgacccagccacctttgtgggcggtggtggaatgtgctccggttgcctgctgcccatgtcggtgtgcccagagcgggagggacatcattttgaccacagcactttggccttagaatgatgcagagactccatgtcactgcctgttcctcttgctttactctttttaaaaaaagacttctattctttccattaaagtttactccctttctagcttaaggagtcaaatcattctgcaaagtttagtgccaagccccagcagtctcctgtatgcctttcccttttccccacctccctccaccttcctatttcttcctccttagaggctgccagtttcaactgtttgacatctgagtctttggaatcattctctgtatctctaagtaacatgttcgtattgctgctccttgatttctttccgctttaaatattctcctttgaccatgcaacgtgaaatatgaggacttagccatgtcttccctaccctaacaccaaaccaaccaaaaggcagccttttcattcatctaacttctctgcagttagagcgtgttttgggatagatcggtgctctgcattaggttatttt

SEQ ID NO: 1882372 - DNA, 4001 bp, Homo sapiens
agaagctaataacatatttgtggctcagagctgctcattgtagggaagatttctttcccaaccacactcttctgtgatccctgccagaatacagccatcatttcagggcttattatacttttgtcagggaaaggtaatattctgatactttcacatcctgtagatacatttaatttttaatcttctgaacatcaatgggcttaaatgctctaattcttctctagctgttacaaacaaaatggcaaaccaatgagaaagagatggaagaggaaattttttatgtgtgttcaaagtcaggtagacagaaagggaagagtactcttggctgttgaggaagaaaaagtcaggggcaaggaagttttcataaaagaaacatgggttatttttatatccaagtaggatataatcaaattgttatgtttttataagtgaaaaatttaattccattgctaccaaatcacctatataacagagacaatagtgcttgaggaaatgtagaatcttgagaagttgacattttaaatgaaattcagcatgaataaagtaagtctcataatgacagcttaaaggtctaattcataaaaatgttattaaaggacattaatctgcattttgtggacttctgctcttattcatgactctcacagtgtatgactgtaatcacaagcagagtgtataataggagcattaattcaatttggacgaagacaagaatactgtatcaccacaataaaattccagctatattaatttgaagggtagaatttgttgcacaagagcattgtctaaaagaaaattgaaaaataaatgaatgccttccatattctgggttcaaatatctactttctttgtgaagttcggtgtaagattgactaattggcacaagctttttaatgaaatatttattcatcaaccttatgaaacttggagacttggatactgagttctgatcttatggttagtatggcattagtgtttagcttgagcttagaaatatttacaagtcatttgtattttaattaacccctttgctgatacatgacatcagaggtgatgcttagcaaatggctattcaattgtctggcatatacatttatttagagaagatgtaaaattcactactacataaaatttctcccagagaagctgaaagtagtgatacttgaaagtatcttcattcagaattttaaatatgatctacatgtttaatatgcataaacctttagaaaagaagaagtggaaatcaattggtttatttctatctctgaaactatcaaaatttgacttcttgactttctacttctgattggatgagctgtaatagtatgctgtagacacttttagacaaagtgtgaatacatttttccctgagacattagattatctctagaaatcatgaaaggggttctttataaattatatgtctaacattgaaagaaagtgttgtctttgatcttgtaggtaaaaaagctctatacctatgggaatgagttaattcctctatttaataagatgcagtcattagtagacaacttaaggattcattctagaactacatattgaatttctttagcataataatgatcttataatagttctgggtaacggaagtctttgaatgtacctgtacctgagatgagagacaactgacaaagagaaaggaatttcaaatataaggtaaatagcactgctaattgaagataaaaatcagtacatttacaacattaaccgtagctattattgtcccaaatctaaaaccactgaacattcaatttcaacaactatgtattagtacaggactttgttatctaaaatgattatgcttaccagaaaagtgtccagggatgtccacctgctatgtggctatgcctgggcagcacgtgaattctctgtctttgctccctcagaccaaggctgtctcagatttatgaaacagggctcttccacgaagtttagaagtaccacaaacagtttgatgtggcatccagacttactgcaacctctgggtgcaaagattgaacagctttgttgatacaaccactcagaaaggaccgtggaagttatgtttccaacacactgccagacacttgtcatcaggcttaaatgcctgttggcaagagccagatatgaaaaacagctacatcaaaagatacctttttaatggtctaatatattatttctaatgaaattaaatgtataaaagaaaacaaatattaattcttctagtttatctgcagtatattttccaagaaatatattttaattttatatatcaatacttttaggcactagataaacaattgtttggttcagaaagttcaaactatcacattcattatttgtaaacagtattagcagtctacaacgttacacatttactgtgagccaggcactttacacagtgttttgtaaacattaactttgagggaggtattattatttgataaatgaggaaaataagacttagtgggattaaattacttgctcagtcacaaagctagctggaggcagaactgacttaacaaaaatccttcatttcaaccttggttttgctttcatactaaatttccctaaaggaaatattttaaatgtattctctagaaaaagaaggggaaaagaagaaggctgagaagaaagttacttctgaaacaaaaaagaaaggtaggaaatttaaaagccatgtaccacataaatcaattagtgtccatgcataatactactggtaaatctattattttctaggaaagaaattcccttaataaatgcattgtcattgttattagtgaacactcttaacatgtctagatattccaaataaaattaaaattgtcaatttttaaaaagagaattcaatcctaaacactttttgaaaattactactgtgattattttttctttcttaagagcagctgcttaattctctctaattcactactttactttaactatatatgtgaatatgatggttactatttaactaattcagtctaattttaaaagtcattttatgtagagggcagaaaatacttgattggtttgttttacacatatatatatattttaattggttgttttcaaataatttatctgatgtcccaagtgaacttcagagatttcagaacttttgacatggttctggtgacctcatagctcagagaacattcaatatattcttttcaatatatgttaggaaagctgttaaataataccataattaataatgccatttaatgttttcactgttattaaataatttttgcctttggcaaaaaaaaaaaagttctgtttcctgaagagaaattatacctaagccactagtctgttatgaaggtgctaccttattcatatttgacatgacttatggctgatttaagatttctctatacaagataaattagatgcctcactggtagtcatgcatgccctgaaatatttgcaagttaaacaggtaaaggcttataactttcttattttaccagcagaaaaagaagatatcaaaaagaaaagtgagaaggaaactgccattgatgtggaaaaaaaaggtattgcactttctttgtttccttagatggattacgttcaggatgtttgcttcatgaaagactcctcatgcaacatacacaaattgcacacagttacttatatctacccaagacgtgaaggtcaaagcaaaacttgcactagacaaagttaaacaggcaaagaagactttattcaaggctattgcaataggacagagagactggaattgagtctgaactcaattcccccccaaaaaaacgcaggaatgtttgtaatggctggtatggggaatcacaggacatctgtttttgcatattggcttttccccctcaaaacgtaaactttcagtcttatatctgcatggtaagaagtagtttcacaatgtggagcgaggagtccaaggaagttaggctcctactcttccacagaaacttagagatggggcactatctttcttgatgattacatttcaaagggat

SEQ ID NO: 1882373 - DNA, 4001 bp, Homo sapiens
gtgatatttttgagagtatagattctttcttcttttatctttcatcctcaatctccagcacatctggatcatgatgctttacaagtattttgaagagtaagcaaagtaagaaatttggccttcatttggtgtgttagttagtccttgcattgctataaagtaatatgtgaggctggattattattattattattattattattattattattattattattattattttgagatggaatctcactctgtcacccaggctggagtgcattggcactacaacctctgcttcttaggttcaagtgatttttctgcctcgcctccccagtagctcggattacaggtgcccgccaccctgtccagctaatttttgtatttttagtagtgatcgggtttcaccatgttagccaagctggtcttgaactcaaatgatccacctgcctcagcctcccagagtgctgggattacaggtgtgagccactgcatgcagtcagagactgggtagtttataaagagaagaggtttaaatggttcatggttctgcaggctgtagaggaagcgtagtgctggcatctgcttctggtgagggcctcagggagcttacaatcatggcagaaggtgaaggggaaccatgtatcacttggcaagagagggagacaggagagggaaggtccacactctttaaacaaccagatctcacaagaacactcattactgtgaggatggcaccaaggcattcgtgagagagccaacccccaaaaccaaaaacctcccaccaagtcccatctccagcattggggaatacatctcagcatgagatttggagggcacaaacacccaaactgtatcagttgatcaagaactgaccatggaagatggatagttgaagtcacaagcagtccagcacaattctaaccttaccatgaatctgaattcttagctcactaaagatttaggaacagaattggggagtagaattatggtcatgtaaaaatagagtccgtttaacatcctaaccttaaatcagaaaccatcaaagcatcatatcaacaaaaaaattgttttcacttatgaaaaatatgaatattaacacaattttgttgcacacttactctctgccatatgtcttacactaggcattgagaaaatactaaaaatacataggatatgttccatgctctcaagaagttgtgaattgtgaaagaacctgatagttgaagtaataatttcatgcagtgtgcctaaacatgaaatagaattccatacaaagtgacatttaaataggtagaaaaaccagagaccatatccacactggtaacagcatgggcagaggtttgcagttagacatgaaagttaatgcagtgttcaagaatatactgaggagttagtaagaaattaggctaaaatgtatgttgatacagatatgagaaagggctgtaagactcaagattcactttatcttgagggcagggtggcagctatcaacagtgctaaagcactttctcttccactttaaaaattaaaacagtgtggtaaccttaaaaggtgttctgaaacaatattctaagcaactgttatcacttttgctttttccttttttttatcaggtgcttacttaaacatttctcataattgcaaagattgtgacttgtaattatttgtagttactattttaccatgagctttacccacatttttatgtgttttaattttaagtggctaaatattattataaatagtgtgtgcagtataatttatattcgtcattttcattttccctgaaatctttgtaggctattaagaagaacaatgataggatcatatttaagttttagaaaaatgacaccttaaaagctgcaggtagattaggatgagtaggacttggagtcagaaacttcaataagggagtggctgcaatatagactaggaaagaggtgataccaacctgtcagtgtcctcatcggtaaaagaagatacagctgggcacagtggcttatgcctgtaatcccagcactctgggaggccaaggtgggcggatcacttgaggccaggagtacgcaccaacttggccaacagagtgaaaccccgtctctactaaaaacaaaaattagtcaggcacagtggcacacgcctgtagtcccagctactcgggtggctgaggtaggagaattgcttgaacccaggagaaggttgcagtaacctgagatggctccactgcactccagactcggtgacagagcaagactctgtctcaaaggaaaaaaaaaacatacaacaagcctcataagtgcttgtgaaagctaattgaaataatatattaaaagagtttggcatttagaaagctctgaaacgatcattcatttaacagaggaagctatgaacattttttttttaaaggtcagtttgacttttaggcacctgatttcctgaaggactctttgaactctttgaatgtgggtactgttttatgcattttcatgtgataactaaacagcctgatttacattcttgcccaatatacgtatttcttcaaataatgaactaatgaattcccgggcaataaataccttttggttaaatggacaaacagttctgttcagtgggaaacatgctagtagagtctgcttttaaaggaattgctgtatgcagtattctaagaaataatgaggaagtatttttacttcaaaatactttgatcataatatgatgataggtattttcttctcttgcctgtgaaagtgtgtgttaggtatgtacattatggggccaaactagtgattgttgctaattaggatatatgtggcgcattctatcaagaatcccagttttctgggcactgtgagctgtaagtcaagtcataaaaaggagtgaattgtctttttcatatatagcactgaaattgactggagttaattatttaatgcctacctcccctactagactacaggctgtgtcacacacctccctcagcatctagcacagcaaatggatttagtaatatttattgaatagattaagaaatacagagtgaataaaataggacactggttggagtgttgggtcaaccacaattttggtgtgatatattctacatatcacagtgagaaggaaaatgatataaaatgaataatatcctccttaaagtactatacaaaaagaatacttcttatattttttcaagatgatgtaatcttgtcaaatatataatatgttgcatgccagtgctttcttaatccttaatagtaataccagtaattgtatattaagttcctgctatgtgtcaaatacttctaggtactttaaatgtatattcagtaatcttcagaacaagcctagagagcagaatttagttatttcattgtaaagatgagaaaagtgggtctcaaaaaaagcagataacttgtcccagatcacacagtagtttttcttggtacctggagtgattttcatccctctttcaaatacaaccctttggctattgggaagtagctattacaactgtattttttctttaacttgatgtaagggaaagaccactttacacatatacaaataggagaaagttttgccagaccttctgcagctagtatttacatgagtgagtagagaattgtaagaggttctggtagcagtaaaaacaaattacaaacaacggaacatgaagagaagatgttgtctaccaacatctgtcaaatatggcagatgatcttctttgtcttattttgttcaataccactcaatatcatcacttaggcctctctctcttactgtttagatctcttgggattctcttaattttttaaagcctataccttgaaaaattctgtttaaaaatacattggaaagcatatagattttagtaggctgaataatggctactggaagataccaggtcctaatcccaataagctgtaaatgttatcttttagggaaaagcggtctttgcaaatgtgattaagtaaaggatcttgacaaggtagattatactggattaacagtgtggg

SEQ ID NO: 1882374 - DNA, 4001 bp, Homo sapiens
gtttatttttgaggtgttctgtgtatgtagttttaactctgttatgaaaatgttgaaacgtgctagtgaaaagtggcatacagttaccatggaaacaaaactgagccaaggacatcacttagtacctgcagcctctcctgatgaagtgctggttcttgtgcaggagcctgtgctctctggagagccatgcctttggtaaaggtaaagaacttcacgagcactgccacttcgaagaaggtttctaaaagtctagtgatttccatgtccctgaagccatccaactggatgatcccttgttagtaggttcacaaattccgcataattcattcaaagggtgaccaggttatttacacgatgttcctggatttctctctttggtggatgtaactagtgtctgtgctgacagatgccttgctttgccccaggtatgcatgggggtggaacattgaaattcaaggacaaactttgggctattgctacaaatttgccaccaagaaaaaaaaaaaaagttccagaaggggcagaacaggtagtaaggaaaagaaacgtggtgattgttgatcagtgcctaattgaggctaggtggaatcctttttaagtggtttcttttggccctgactgcggtatagacaccacagaagatgcaagcatgaatgttgtttgccttgaggctgaaagaaaaggatagagttgtaattgggttctttttttttatttttaaaaatctttgcccttgaaatgacgggatccccccagaaaatatccatccaaacccttcaaacaaatggacacacctaagtctaagtgcaatgagaagaaaagaggtactagctcctataagatgcctctcacagataagagtatttcttaatgtgtttcttttctttttttattacagagaggccagatactggctgtttcttttctaagttctgcagaatgggaatgtgatctctaatgaatttttcagtttatgaaagtactattatagaatactaattagggtgtcccatgaggtctgtccttaatagttattactagttactattattactagtttaatcctttttgctttgagatcatcctttttctttctcaattggtatttcttacctctcatttataattttctttttttccaaattcatatatttatagattcctccaaaaggtagttttatcagatcttaaagtgctaaatatattaactgctatttgtcttaaagtgttaaatgtattaattgctatttgtctattaataaaggcagtttcttttccttacttcctgttctgccccttctggaacttttttttttcttagtggcaaatttgtagcaatagcccaaagcatggccactatagcaaatatgtagtggctatttaggtctctaaagcttgtgatgtttctctacctctaccctcaccactaggagaattagaataagagaactgaaataaactcttatctgttgtattgagatctccattgggcatatcaggtgttttatttgtaggagcttgggtattctgcagcattcatctattcatttgttgaacaaatgtttattgagtgtctactatgtgccagacacttctgtaggtgtcagggatatggtagtgaagaaaaaaaatgcctgccctcactgggccttaccctctagtgtgggagacagatgatggacaagtaaaacatgtagtatgttgtatgtgataaaggctgagaagaaaattaagctgggaagagagtgtgaagagttgggaggctacattgaaatttaaggttagatggatggagaaatccttggtgcagatctatggggatgtgctctggtcagaggtcagaggagtctcaagtgcaaaggccttgaggtaagaccgtgcctgggatgtccaaggaactacaaggagaccaggatatcaggagcagagtggaggaagggtcacttcgtctttacctctcactatctgccagccgcatcgccctgcctctcgcacatagtaacgtccacatattcatggaatgaattagtgaaattgaattccagaactttcagagagaaaaaccaacagcaactagacaggcatgtgacaaaagagaagtcagatgatgtcacaactaaaggtacagtgcgggggagagagtggttttaagtgggagggatagactcgagtggggtttgaagtaaagatgtcaaatacttggagacacaagttggccgcttgagagagctcaggcaagagagagatttggaagtgacaattgaaggtgaaggattgacgatttcctctagggagatggctttgggcaggaactcagagagggagggattcattccataggcagaaccttgaggatggaggagaagcgggcagcaaagaaaaggaggagttgagcataaagccagggctctgtgaaccatggtggtgccattgataagatgatgaggaccagacatgtctgggataaaagtgaacatcagaatagaaaatatttagtgttatgctgaattgaaatgggaatctatgttcgagtctctcaaaatcacttgagctgtgaggaggcaagatggcctcgtttatgacgtagccttcagcatagcgccgatgtgcccgtgtcaccagcagatggcgcgctccggggtgtgagctgaagcacttccaaaggcccatctgcctggaaaccttgctgtcttgctatttagctcagagccctggaagcgttgcttttgatgtctaccattactgcttaacttaggaacgctctgcctagtgaggggtctgtgctaagcagagtgttcctaaatgtaactgagctcatcaaagggatgcctgttcccatgttcaggtatcagtagacatcgtgcttcgatacttggtttgtgcctagtcgatgcaccgaatgataactcattagcaacaggcaggggacaagtttcagatggtactcttcacagtaagacattaactgccaaaaaatgaacaagataatttcgggtcaaaaggaaatgtgctctgtttgcctgtagacataccagaaggtagttttgctaagtcacaacaatcaagattggaagaagaggttgctccgggatcccctttctcaataacagaagaaagagagttgccaggtaacatcatgcacccagccaatggttcaagtaggagtgggataaatgggtcagcacaggatgtaacaacatgaatcacaagggaggtatagttttaagatcatagtagctacaaaatcctaaaaactaagcttttgtgcttttggagacaaataagttgttgcacaaattatagataaaagcaagtgccattatcccctagcatttttatttcttcctcgtaactcttccttctgggaattttcagggcccaagggttcctaaagttataggtctctgatatggttgatagttatcaaccaaatttttgtgtgagaaatatctataccgattaagaagaatgatctggaatgtctgcatgtttgaggctggccttctggacaaatggtaccatgcattttgaaacaaagggctccaatgcaacagatttgaaagcattgattccagacagcctggatttgaatccaggagctgctggtatgagcatgcaagacttatgcaagctctgttaaatgggaatcctgacagtacctacttcacacaatttttgtgagacttaattgatgcttgcaaatccctcagaacagcaccagaccccttgcaagccctctgaagactggcacccagaagcagttacaccagagaaataccctagctatatgtcctccttagaacctattacaacaccttggcctgcttcttagacaaaatgtcagttgccccgatttaaagtgctgggaagatatagaagaaatgagcactttccagagagcgaggtcatgtccaggcagtcagcggggcttccatggttcgcatctgtgcttccaaataactcatcctctgggcaactgatgaattgagcaagtctacttt

SEQ ID NO: 1882375 - DNA, 4001 bp, Homo sapiens
gatatgtcaggatacagcaggaccaaaacctaggtaagaactaaagtagtaggtaaatattggatcctaaattaagagtggagggcaaagcttggggtgatgtcaaagtcaattaatggatattcaaatataaagttacatagctgagtaacaaacgcactatatcagagttgtgaaatggaaatcaaaaccaaactgagctggacgtggtggcatgcaccttgagtcccagctacttaggagactgaggtgggaggactgcttgagcctaggaggtcgaggcatcagtgagctatgatcaagccactgcactaggctgggagcagtggctcatgcctgtaatcccagcactttaggaggccgaggcagatggatcacctgaggtcaggaattcgagaccagcctggccaaaatgattaaactccatccctacaaaaataagctgtgtgtgcttaataagctggtgggcatctgtaatcccagctacttgggaggctgaggcaggagaattgtttgaacccgagagtcagaggttgcagtgagccaagttcgtgccattgcactccagcctgagtgacaagagcgaaactccgtctaaaaacaaaaaaaaagccactgcactccagcctgggtgacaaagtgagaccctgtcttttttttgtttttttgagacggaatctcactctgtcacccaggctggagtgcagtggtgcgatcttggcgcactgcaacctccacctcctggattcaagcgattctcctgcctcagcctcctgaatagctgggattacaggtgctcaccaccacgcccggctaatttttgtatttttagtagaaatggggtttcaccatgttggctgggctggtctgaaactccctacctcaaatgacctgcctgcctcagcctcccaaagtgctggtattacagccatgagccatcacgcctggcctgagaccctgtcttttaaaacaaaaacaaaaacaaaaaacaaaaattgagcaaagacaaatgaattatctggaataatgaactccaggaggaaacatgaacatctgactaaattctagttgaagtcctgctggtttgcagttgctttgacatcactagcacatgccttcctactccataattttaaagatactgcttgaagcacaactgactgtagaatgtgctctctttgtcttacggttttctctgaaagaccttgctttatacaactgctgtttgttgtagccacagtcatgcttcattcagacaacagcagtgggttttcaaagtgattcatctgttttccttgtacttaccctcttatttgcttcagggtcctgcatgtggctggctggccgagctttaagagtagggtttgggtaatatctgcttctgagccatgtttcaggactgtggatatttttaagctaaaggggagaagtccaatggaagacatgcagggagcttttcatctacttgaaggaacagacttgctctgtattgctccaaagaggccaatattttgaaattccaatgaggtaggctcaaaatgaaacatcctgaacatctgagctgtccaacaatgatgccggcttctggggcattactcagctacttgtgctccaccgagttcttttctttttctttttcttttcttttctttttttttttctgacacggagtcttgttctgtcgcccaggctggagggcagtggtgtgatctcggctcactgcaacctccgccttccaggttcaagagattcttctgcctcagcctccagagtaggtgggattacaggcgctcgccaccatgcctggctaatttttatattttcagtagagacaaggtttggccatgttggccaggctggtctcaaacttctcacctcaggtgttctgcctgcctcgtcctcccaaagtgctgggattacaggcttgagccacagcgcccagttgagttctgaatgttgaggctcctcagatttcagtttggacctctcttctcttttacacactttttcttcagcacctcatcaagctctgttgctttaaatgccatgtatatgtcataatgaaaccattgttttctccagtcaaatctctcttgccttatatattcaactacctccatgaccttccacttgaatgtttcatgagcatcttgaacttaacacaggaaaaatagaacccttgatttcttcttcatcctcttctgccccaaagtcttattttcctccaacctgccctagattagtcaatggcaccaacacctacctgtcacttagccccaaacttctgcttctctctgcctgtcacactcaaaccacctcaagccaatcacctccagacttgaacaaggaacacaagtgtctcactcattgagttccctcaaaccactggcacacagtcaattccacctaaatatttggtgaatgaatgaatgatgtagaatgatcatctgaaagaaataataatggcccttctaacttaatgagtctctaccatgtgataggtgctttaaatatataattctatccctaatgacaacacttcaaagtaggtaggcaagttaaaaagctcacagaacagagagttttgtatggttttgcttttaagttttattaagtgctttgtatgatttgtttttttttttttttttttgagacagggtctcactttgtcacccaggctggagtgcagtggtgcaatcacagctcattgcagcctcaacctccgagctcaagcgatcctcttgccacagccgcctgagcagctgacaccataggcaggggccaccatgcctggctaaattttaaattttttgtagagacagggtcttaccatattgcccaggctggccttgaactcctggcctcaagtgatcctcctgcctcagcctcccaaagtagtaggtaggattacaggcatgaccactgtgcccggtgtgtatgacattttttatagtatacataggcatagtgctaagtgctttatatatatataaaatctcatttaatttttaccagccacatacagggtagcttttatgcaccatttcgttgataagaaaactgaggctagtagaaattaagcaatttgacttagctaaaatagccaggaagtgatgggactgatatttaaaccctggtctatttggttcctacagctgtatatttccccgctatatgataaagcaatctctaacaaggatactactgaagggatgccaacattttacaaattgttgtagtagatgatcttttggtttcttcaaattggaatttttatagttatattgtgcaaacggtccttttctctatttctttagattcacttcattagacatctctaccattttaaagaaagtaaaaataactttccaaatttcatagaaaatctagaaatgctctaaacccacacaaaaattgcaaccgatgtgacagtaaagagctccttccagccgggcatagtggctcacgcctgtaatcccagcaatttgggaggctgaggcaggcggatcacttgaggccaggagttcgagaccagcctggccaacatggtgaaaccctgtctctactaaaaatacaaaaattagccaggtatgctgatgcacgcttataatctcagctactcaggaggttgatacaggagaatcgcttgaacccaggagccggaggttgcagtgagcagagatagtgccactgtactccagcagcctgggtgacaaagcaaggctctgtaaaaaataaaataaaacaaaaataaatttaaaaaacaccttcttttattcttttctgtatgctttggcacaagtcaaactagaattcatatcttcttaatacctaaactaagttaaccagcctggcaatggttcccaaagccatgccagcaattacacagtgcaggatgtcacccctgggctgactcaccacacagaagacctagtaacttgaggagtattgttctcaaagatccaaatttgctgaaatctattctaagtactcctgaatta

SEQ ID NO: 1882376 - DNA, 4001 bp, Homo sapiens
tttagggaagtaagtaaacataatgttttgaggtgatcgcttccaccatatcgaggtttaaagaccagctagggaatgtgtatcttgtagttagagggaagcgactcggtttcttcagtgagggagttacatgatgacagcattccttttaggagataattagggtggtgtgcctgattcagagaagctaggaatgtttggactctagccctatcttttccaagttgatgtcatggtagacaactgcattctctccccagacactcttagatgttaatattggcaacactggaagaatctgttgagcagtttttatgaaatgtaatacgagatgtacttgcttttcaccttcagcaattttttcaaagaagagtgaggaaaagtttgaaaatatgtcacattggacctctacattttatggtcataataataaaaatcccacattttctaaatgaaataaagcaatgagttagagttgagaaaataggaaggccttggttaaggcaaaaacagagggattataaaaatgttttggggaaatgatgtcagaattgtaggttatggatggttgtaaagagataattctgattttaatcagttagatcatctatattcaagaagccaggtagtcagggcaatataaactagaggaaaaagagagtgtgtagtagttttcatccagtgaaatcaaagccattggaactattaatattaatagaagtaattgtaagtgaatttagaagggtagatatccaagtcaccatcttcatggcatctagaaaaatcttgtcctgggtttaacataagtcattctcttcaaattaaaaagcaaagaagaaaaaagaaaatagagtagaatggcgagtagttatgagtatgtaaataaatgcttgcttaaaaagaaatccaattactaatcagtaaaaaacaaaaggaggatataatgaagagacatagaagaataagataaaggagacattacacatagtagaaagatataaaggaaaggagctatttagatactcacagaagcagattcttccagattacttaaaaagcactcattgctcttttgcaaagtatccctaaggagtaggttattatcaccccattttacagatggggacactgtcaaatgtcatttggtacttcagcacattaaacttaggttgctaattagcaatgtatttgagatggaatttggcagtggtaagaaacattaatatttctttgttttcaggaccttcagtgtaacttagaagaaccatttctttgacttatatgctatagaactggtcaatattgcatgatgacttctcaaaattaccattgatttaggtttccaggaaaaatcaagcatgcttcaaggagattttagtagcaagaaatccgtattatttgacacctgctattatttcctcagcatcccagaatttctcatttaagtactgcccaatattattctggctttctttgcatttgtgaatacagaaacaaaatgttttgttgtaatttattgcagaatggcagtttggcctttggggaatatgaatcatgggtcactgtcataaaacaacttatgtttggaaacttttttgaataatagttggtttgggacaagtctttttttcccccttactaagaaattaggagctttcttaataagaaataacattagagttttcaattttaaattgtgtgaatttgttttaattgtatgaaaatggatacaagataatcagttgctcagactagataccaaaaggaatggttattaagacagtagaaaaatatttttgaagaacattcataggatagccatcctgctcccccaaatcaaacctgaggcaatagaaaactatgcttttagaataataaaaatagcagaaaactcctgtgagagaatgtctgatttacctttctggaaatcactattttgttccagatgggtggactatggaactttctgagagaacatggttacaaaactgttgtgtgatcaaagctctggagggagggactgttttgactctcttgttactatgtgagggatggaattttgcaaccagaaggttccacaacagttggaaacgacagttgtgtgagtagcaagccgaagacaaatgtgtgtgtcctgttactcctgctctgagaactacacactgccgccgtgccaagatttcctgcttgcatcaatattttttataattaccaaacctcatgtgcataacccattagtagcaaaaaaaaatcttacaagtaacatctacactgtctttaggttagacagccatctggctagctgatatgcactacacacacacacacacacacacatatgcacacacacagatacccttatttagatgccttattataatgctagttccattttcaatcatctaccataaatcaagctctacctccttttgcagaaattaaaacagctgaaatttaaaaagcgcttagaacatgttaaagctcaccataggctattgtcatcctgttattagcggcttactcttatcttccgttctctggctcatctctctcacttgtgaaatcatgtccctttcattttccttagcttccagaaagtccattttatcaattgccctttctccaacttttcccaagttggactttgactctagactcgtgggttcctttgtattgatgtccacagacattttggtacaataggaactgccatgaaaaggagatgccaatacattcaaaactgtaaatttaatcgtgtgctttcaaaaacaaaatagtacggaatggtatagcagaaagtttagggaagggaaaaatgagtggtttaagtgttgtttaccagaaacaattcatctgcaaaatttgatcccatgaacaggcatctggagaaagcttcttatgttggcaacatacttacagagtcagaagctggtgagtttgagatctggtaaggtttggggaaacagatgttaatgtaggaggtagatattgggaattgagatgtgtttgcaaaaaaagaggtacttgtaaagctagtggtggtgaagttgtggtgttggcagtttattaacaagaaggaaaggttacttgtaatcaatgatttagatgggaaatttgaaatgctttaggattgtgtggaatactgtcctgtagtctggtccatgtgcccagtatacccaactgctgatgctgaaatcccataaatatagacatataaatacagcccttattaaaatatatgtacatatataaatatataatacaggtgtctgcatatatgtgtgtgtatgtgtatatatatatatatacacaaagtagtttcagtatatatatatatatatatatatatatataaaatagtttcaagcttcatttataaaatatgtttcaagacacccagtggatgcctgaaacctcagatattactgaaacctatatatatataaactgtttttttatttctttttattttctttcctttcatttatttatttatttttttttttgagacaaagtctcactctattgcccaggctggagtgcagtggcgctatctcggttcaacgcaacctccgcctcccgggttcaagcgattctcctgcctcagcctcccgagtagctgggattacaggcgcacaccactgcaccgggctaaatagagacggggtttcaccatgttgaccaggctggtcttgaactcctgacctcaggggatctgcctgccttggcctcccaaagtgctgggattacaggcatgagccactgtgcccggcccatatatactgcttttttctatacatacatagttatgattaagtttaatttaaaaattaggcacagttataaattagcaataactaacactagaacaattgtaatatactgtaataaaagttatatatgaatatggtctctctctcttaaaatactgtaatattttaggaccatggttaatggtgggtaattgaaactatggaaaggtgaatatatacagagatgtg

SEQ ID NO: 1882377 - DNA, 4001 bp, Homo sapiens
atatacacacaaaatagcagtccatactatattcttgacatgaataatagcaaatgacaagtagtttattttctcagtgaatattacatggtaagaatttcctaggtaattaatagacatacaaatatttttatgccaattaatgaaatattttttagtgtatcaatgaactattatttatttaatcattttccagctgttatacatttagaagaaaatacatacacgaagattctatgcatttagtctcctagagtttcatatataaaaatatgcactatataatttttcgattaccaaaattcccacatcattattcacaggaaatgtaatacatattcatcactgggagtacagaatatttgcaacatgattctttaataaaagaaggcttcttaattatgaaaaagtttttgttttagtctgccattgcaaaataccatagattttgtggcttataccaggaatttattttctaagagtttcagaggctgggagcgtgagattattgtgccattatggttgctttctggtaaaggctcttttcctggcatgcatatggccaccatcttactatgttcacatgacttctttgtgagggtgctgagaaagagggaactagagagagcaagctctctgatctcttcttataggatgtcaatctcattattaattcctcaccctcataaccttagctaaacctaattacctcccaaagacctcatcaccaaataccatcacaatgggggttagggcttcaacatatgaatgtggggaaatacaattcagtttatagcagtcctaacatctaaaatggtttcttcaagcaacctactgtcttggaaaccaatcctttatcatatatttgcagaatgttttgatattgagcaaatataggaaagtagaattaatgtttaacaaatctatctaaaatattatttattcattattctacaaatatagcatttaaaaagagatatttgaagtgtacaagtttagggtgaataaatggtcatataccaggtatgggataattaaataacaactgtaattgttttaaaatatgtaattttgacattaagcaaacacatgttttcagttcatgattgtgtagtatcagcaattagagttttaacttatcagcataaagaataatgtaaatgtatattatattaccacaaaggtagaagccaaaatctgaataccgatattttttcttaatctgagattactgtaaacacatttttcctaattgaattgtaaatgataaaatatttaattcttaatttgttaataattttgttatatctaaaatattgtttatgttatttataaatattatgtggaaataaaagcttaagatgaggataaatttacaacgtgattaacatttcaagaattcaggttgtattttcttatattttcttgccaatttcttaatcttgtaaggcctttaaattttagtatatttcaagacatcagtgaacaaatctgaatgctgaggatacatctaactgtctcaaatgcatgaataaatttataaatatgagcttaaaattactaatggaaaaaaattgtattggttttatagatgtatctgaacaaatataaaaccctattggttgtataggtgcatctgaacaaatattttttgattcttctcataactggtactacatttgtataaatgtttatttaaaaaaataagccttagaataggagaaaaaaaaaacagtaaataagataggaaaatcctattttcatattttctgcctaaaatcaactggaatatatttattgtatattttgcatattgctatataattatatctctctatctcaaaactttccattccctaactgacttccatgaagaatgttatagacttacaacatttcataaattatcttaatttagggcaccattggttccccagtaagcttcagctgttgagacttcattctgcatagcttcaatctacatatgctttcccttgtgagcagttgctcagggctctgtcaaaaactaaagtccaagtatgtaatcgggtgtgctcccaaagattctaacggttatactggtcttatctactgataattcagaaccttctacttaaaaagaagtattcattggaagtccctttaaaccagctacatgtataaagatttcctgttatccagggattgtcaggccccaagatttcatggagtggctacaaaacagaaggctattccttaaacccatcattgtcttaactcaaaagatactgagatgtgccatcctagaaacaaaaagagacaacttagagctcagaaaatagtaaaaaagacaactgcagaatctaaaaaataacatttttgctaaaaaggaaatattctattttttaataaagatattttcagagcaagggaagatcacagaaatgctagaatgatgtatcctggcatgtgggattgggagaaatgtcacaggacaggagtgagataagcaacacattaattagtaagatttttttaaaaaaaaatatctatatatacttataaattcagggggtacatgtgcaagtttgttactggatattgacctagacagagaatttatgactaattagtaggatttttaaagaggagtttccactaataagaattgaaagccttttgaaattgcatattttacacaggaaatcaatatggaagcatgacatcttactgatacagtgaaagtccctggactttcatgtcatctcatcattgttttcattaaagcgagaggtaactggtagtctttgaaatacaaaattcagtaagttcaagctatgtgattttgtgagattttacctgtctgaaccatggtttcctcaactgtaaaagaaaataccaatgacttctcttaattgtttaataattatgaaaatgaatataatagggcttttctactgttccattcagttttctatgaaagcagaaaattgatgaaattcttaaaataagccttttaaactaaatttgtattgatttgcattccatactgtactctcgcctcaagaaagttatagtgcaatgtactcttccggtattagggaaatatattttaacaccctctagtgtccctaaaaactctaaataacttataaaaattgaagattaccttttaaaagaactctttttaatataataacatttattatagaataataattttgccatattgtgtcacttgtggaataatgtgagacatttcaattttaacctttaccattatgaaataaatttctcataatctgcagtgtgtaaaggagcaagaactagctaatatcttaatatttacaatgtatttgtatgcttctagctgcagtttgattttaaaggttgaaaacaaatgaaaacatgtcaacaaattaaggagtatgaacagttaggatagaataaaatttgcttttgctttactccatttttgtatcctgaaccttaagaaactcaatcctagtaatgctttcaagcccatgaggatttaagaaaaaaactcaagaaaataaatgtgcattgaagagattggagtgcagggagacgggatttttcagggtgacaggatctctgttccatgtgtgtgcacagataccagaaggcactatctaagaccagaaaaaaatagtttctgtcatctccagatgtagggaatgactgcccagcagggctcttcagactgttgagaagtctgggtcatccaatctgcctcctccataaaacagcctcatcatttgagtgttccatggaaaccatgatctttactaatcaaaacacccccttctagtaacagaacttcagtattttcaattctagtagaaatgacaactaaatacatactagaagtagcaaacagaggaccctgtctctcatgaattggtaagatgtacttcactctctaggctttgtataatttaatgatattaattaagaaaaaatcatattgcaagcatttacaatttcatttttcctttata

SEQ ID NO: 1882378 - DNA, 4001 bp, Homo sapiens
aggctgaggtgggaggatcgcttgaaaccaggaggcagaggttgcagtgagctgagatagtgccattgcactccagcctgggcaacaagagtgaaactccatctcaaaaaaacaaacaaacaaacaaacaaacaaacaaaagagtgggataataaatgcccagaggattaacaggtgtagtcatgccaagcaccatgtggatagcctgaattaaatccctacttgtaaatgtgctaggctatagcatggccatccattcatccatctgctcacccatccatccacctgtccgtcaataaatattcactaagcacttctatgtgcaggacattgtggtcagcactggagacaggaagatgaatatggtctagctcccttcttcaaggtgctcacagttcagtgagggcagaaacatttacacataactaattatgcatgataattttaaaatgtatatttagaacagagatggtgttttggtaatatcttgatcctcagaactttgtacaaagttaaagcaaaataattgttttttctgaatatcagaatacatggaacaaacagcattttagaaaattctacagggagatatgggaaagagggatttaaaatatttctttaaactaaaaatagaactaccctttgacccagcaatcccattctggatatatacccaaaggaaaataaatcattctaccaaaatacacctgcactcatatgtttattacaacgctagtcacaagagcaaagacatgggatcaacctaggtgtccattaatggtggactggtcaaagaaaatgtgatacatacacaccatggaatactatgcaaccataaaaataaatggaatcatgtcctttgcagagatgtggatgcagctggaggccattatcctaagtgaattagcgcagaagcagaaaatcaaatattgcatgttctcacaagtgggagctaaatattgagtacacatggacataaagatgaaaacaatagacactggggactccaaaagtgggggaagaggggaggaagcaaagcaagactttaacagctgcctattgaatactgtgttcactatttgggtgattgttcgaacagaagcccaaacctcagcatcactcaatacagccatgtaacaaagctacacatgtaccccctcaatctaaaaaaaatttctttaagttcctttaggaaactcacggccccccttttccctgacatgtcttaccgacagttatatatatttctatatgtattcattactgcagcagacctttaggaagagaaagaggaaagagaagaaaattcaaattctactctccgtataactgaacaagtaaccatcaattttccctctctggaaaaggccacgagctttctaggaaaagaagacactatctagaattagccaaatttaattaagttgatgttattaacttacactattatatacaaatgtgatgattgtaaactggaagttcatcttcacgaagcaaataaatatttttgagacttatgtcatcaacactaaaatgtttacgtattagcatctacattctccatagatagttttaaataattaaatttatatttttcaaaacactacttgattttcctcagttttgttagaatcaaataactgttggttaaaagagaacaataaacagcttataccaactgagaaaacctgaacatcatttctaatttttgttcttaacttgtacagttgaagatattattaaggaaacagaaaatacatattttaatggttaaacttaaaatgtttaactattcggcatccagcaaactgggtgaagtttgctcttctatctgacttccgagaagccagcaagccaggtcatgtggctggctgacctcccagcaccacctacctcaactccatgagatgccatcagatcccacccaaaggagccagtcgtccccatgaaacaatgaccaattcttacaagacacaactggagctctgttgctgtggcacaggaaggctcgataagatctcccagccacagcattcttttgtgtcagcagactcaagtgggatgttccttctgcagctcttaccgagcaagaggaagcgggctttgaaacacaatgttcattgaaattggctttcatctgaggaatcccagggtggctcctgcttcatgatgtgcattctgtctgcagctgagctctcctgatgcatttcccttgtttgttctggggggaaggcagcacctttacgggactcacccttttactaggtaaagggcatcgcattgtgctgggcgaagcattatgtgtcaggatgtctccagtgagtctggagcctagaaggagcatcaaaaataaaattaaaaaaaatcaagtcctccaccatcctggctcactgatggaacaatttaggagaagaacacaaagccatctaatgaccctggggagcatttgcttgtttggtgaccttaggcgcaggaagtcatttatcactctagttgctacattgggcacaatgccacaggacacaaatgggggtactgaacgtaagtctgagtgttggcccaatagtacctgtccagaagcagcctgggatccatgatccattgcagggcaattatggctcttaagaaaatgaagagaagtaagtaatccacagtatcaaatcatgggtgagaagtctctccatcccattgccctagttttataacttagcaattcatcttcttttcagagaaaaccattctggatcccaaacagattttctctgattaagaaatagtctcaatcagtacatggagaaaaaagcaaacactgttaagcccatcttttcttgctagacacctcttcctttctatctgctccacccaatctgggccagtttattatgcaaaatgagataagcagtcaactcccaataggaatagaagaaagaacacaccactttttcacttccacggcacttttaactctgcacatattttttcctttgactctcaaaataacctggcaaagttagataggcattgtctattttcagcagtacaaggagttagtacagagacaaagttaaagacccttgaacctcataaagagctggcagcagaaagtacagaacccacatgtcaggttcctcaggtaggccctgttcatcaggtcagatcccttaggcatgtggacaagtgaccagtctccagttgactgtaaaggctggctttcatcaccaccagcgggctaacctcctacatatatctgtgtgtctacggcaaggtcgacagaacccatatataaggaaatactgatactgaaaaacttgaaaaacctggaagttgcttcttggaatccagtgttcttgtcccaaggtaaaaagaatagatgtcaatcttgtaactgacgcaagacactgacgaaaatgacaatccatgcacttagctttcccaagaatgaaatgaatcaaaaagtaccaagaaatcaaaattctagctaaagctcatgaaaaggactcaaaactactctctgaatggcttatctttagctgagctcataacagaactcttaaatttctgaaaatttggtagaatcttcttgtgaaattcttcagaaaggattgcccaaacctagggatagcaaaagtttttgatgacctttccgctacctatgactcaacttatccctgattacaataggcttctggagaagagaatttatattagcaattggctttgagtaaaagggtctgtgaaactatctgttcctcatcaggtccctcccccaacccaggttaaaagaataaaatgaaattaaattattaaataaaatggataacaactggccaaaactctgcaaaggagattcttaaattgagtgggatactctggggttctttttaactctaacactctatgactttttaaaaatgctagccgggcgcggtggctcatgcttgtaatcctagcactttgggaggccaaggtgggcagatcacttgaggccaggagttcgagac

SEQ ID NO: 1882379 - DNA, 4001 bp, Homo sapiens
aacactgacctctcaatagttcttctgtaaatcatcaaggaaacttatgtaataatcaatttatacaattaatgtggtagttttggaattaaatgcattaccttataaaagagaaatacaaagcaatgtagtgaaacttcccaagcaaatatatgtgtatcaactgaaatacacatatacatatcatatacatatatatacacacacgtgtatgtgtacttacaaataatgcgtgcatacatatacatatgtatgtataaaatatgtgtatatgtgtttatatatgtaaacataaatatagacatagacttgtgaaagagaccaatgaaagcagataattataatttgaaatggtgattttaatatgtattcagtcataaaagtggaccaacatcaatagaaaggaaaggacagagagctgagggtgtgtaaactgctgctctctttttgctgttgggtcaacatgtcagcaatgctttcatatggagcagcttgcagacatgaaacaaggtggttcctcctttctttgcctttggattgtgctgttgttagtgtccagagaccagactgtccatatagggttctttttgtgattctttattataatcccctgaggaagtcagacgagcctggggttactggagacagtgtcttgcttggcgtagttatcatccacaaatcatctgctataaatatatctcagaaggatcatcatcaggccagctcagtagcctgcaatttatgaaggttatgagaaacaatgtgaagggtgaagcgctttattaagggtggctttcttttctgaccctgccctgacttctacttgaatataaatgatcctgggagtaagtgaacctttccatttaggatttaggcttttaaattgtccctttcagctgttattcttatgccactgtgtcatgactttaagaatttctaagaaacatcaaaatcagtgttacaagataatatgagaaatcactagatgcaaaatagaggtataactgaacctcacattacattctttcctttttatgtataaaccatccaaagcattttttcctccgtttttattccacatctgtcatgcttttttttcctctggataaagtaacagaactgaccaaattgccttgcgaaaatcataattacgatctctagggaagttgaaataaataaaatgtttttctcctttgtgttgctcaatgttctttgtttttaaaagaaaatgtgttgcttaaacggtgtttcaaaatttgttctggacataaaccctaattatttccttttaacatttccttaaatgaataaaaaatattgtaaagaaccaaaatgacacaaaaccaaaatgccacccaggctgctctcttgccggtgatttgttactgggaaaatagttaaagcctgctggggaattattaactgtttccccttacagtgtttatcccaggcattcgtttaagacgggaaagccttgaagagggtcactctattaatatgcattaagaagtaaaggaccaattttaatatttcaaacaactccagtggataacagaccataaacttcctgttttcactatcaatctcttttaaaatggtgttcttggctatccataatcgccccaggggagagaaacaagcggaggaaaaaaatgcaagagtgaggggaacaaatgatggaaaattgctttattcaacttcacctgccgctcgagaaactcacccttacgaagattccagcactttatatgaattacccattatggtttcctcccaccacatcactgcactattttagcacttgttttgcaaaccaccaactgcgtttacaagtagaaacataatcaggaggcgaatgaccttttgtagcatgtatctgaagctggtttatcagacacttcgtcagccaactgtccaggaggcaaaatgactatctatgatgatagatagacagacagatagatagttagattaaaaggtggggaaacatcccttttccctttttcctttctatataatctggttttttctcttcaccccttttctcgcttcttcccaccccgtccccaaacctgttactagggaaacttgaaaaagaatcagatacattaagactacaaaacgaaacaaaagtttagaccccgaaaccatgattccattgccaagcacaaagcaatgcaagagcccaacgtcggtcgccgcaccgcgatcctgacaaagcctgtatggagccagaacaaataagatgttaattgcagcctcgcagagaaaaaaatactattgttccagccagagacactcagcagctcggtagctgggatgtgccccctccgctgcggactggatcaattctgaatcccggtactgaaatgacagctctctggctgcgacaggtctgcgctgaaagaaagagaaagacgatcaagtccagcattcacttcccacccttcagagtcgccttcccatcctccgcacccccctgcctcgcctcccagtgagtttctcttacagttggtcgccgccagccccagcggtgggaactgaggatgcaaaaacctcccagacgcagaaaataccgctttcgggacgtgcttgggtttgagtagccgtgacgtgcaggcgaaccgcggccctggctggagctccgtggagcccccctcccgccagcctctcccccgccctcccgccgggactccctcctctcccaccccgcggctcccttcgccttctctctcacacacccgcccgcgcccccggcaggcagaactccaggaagtcgcagcggccgcgccgcgcgagccgagcctctggcgggcggcggggcgcaccgcagctgtgcataagaagggcgcgcggcacccgggacgcgcgcgcacacgagcacgcgggaggccgccgcgcggacgcgctcccgggacacgcgcaccccccgcgcgcgcgcccaagggagagcgagcactgcgcgccggcgcgcacacccgagacagagctttactatctcgctccctctcgcgcctccctcctcgctgggcattcaaacagctttccgacatcaccagccaaggatttttttccccgctctccttagtcgccgtccgtccatcagtacctgcaggggggaggaggaggagggaggaaagcggaaagaggaaaaagcataagcttgagccttccgatccgaccacgaatactcctgtaataaacccaccgccccaacaaatctgccatagcagccgccgccgccgccggtcacttctcgtctcagcgctttctttgcttcttggtttgttgggggtagcttttatgaaacaaatctttgctattaagccacttacattttggggggttccttagagtctcccttgggggggcttctccctccctttagcccccctcggtttggaggttggattcagttggatacggcgcaaggttctgggctcctgctggcttttttttcctctctctcatcgacccccctttggttcccaccccccaccttttgcttttcgtatgtatgcatttttaaaaataaatcctgattttggaagctgagccggggaaaatgggcaacggtgattgggaccgaaggggagtctctccgtcactgttgctgggacgcgtgcctgtgctggtgtcttagagcaagagcctccctgagctttcggagtggaaggtaaggaagggggtccaggggtcaccttttctctgccgggggtcgccaccgtggagctttgggcttaatgtttgagaagggaggaaaatgaaaggaaaggctgttgctggcggatggggaggctgtgagcagatccgactgtctgcatttacttaaacgccgcagttgaaaagttagagaagtctggttttcaagagatgtgctgggtcagaaggaataagcggagagacctagaaaatctggcagttttgtgtgattggggtaattttatgaggggaaaattttaggttaaaaggaagttaagagaaggcagtgggtcttctat

SEQ ID NO: 1882380 - DNA, 4001 bp, Homo sapiens
agaacttgcttttaacggtttatttataaaatgctccttactattcttatattaattctttacatcactttattcttcattctcacttcctttgtttgcctcagtttgattcattatccttcaatcgttcaaatatccttcattattcaaattgctgctttactgacccattctctaaacgtatttttttatattgacaactgactccttggaaagagtgaaaataataatactatctattagggagctttactaataatcctataatgctttgtgaataatgattaagatatttaataaactgtatctttgaagtgatcattgatgagattgcttatttatactcaaaacaatgaaacaaactacttaaagttgaataaaaatgcatttatatacatgaactacttgcaataattaattctaaaatatctattaggctagtagtacattgtatgagaagttgaagccatattcaggtcgggggtaagaaatattttagacttttgtattaagtatgaaaactcaggtattagcctgatgtttctttgactaagccttgtactttatatagcttgttctatgtgcagttatgtaatcttttagagtagctgaaaggatattaaaacaatatctttcagttttgcttttcttttccagtaacaagcttccatgttaatcagcatattcaagcttccttctcattagtttttaagaattctaggaaatactttccatggcatgttgtgagagattttattataggattaaaatcctttcagcaaacaataggcacacatgaggcagggtccaggtattctgtcttataagccaacactacacttaggtaactctagaaatggactacatttaattattttctactttgtttttatggcaaaagcagccatgtcaaacatttttcagatcatatcttacctcagattctctatcttgtttcaggacagtggaaaagctgctggaaaaaaatgcgaaaacaattttttgacttgagttcatatttttcattcaatgtctgcggggccctcaatgtaacttttttttttttttgagaggggtcatcctccaatcattaactacttctaatcttcactgctacacagagtttccaatatttagcaacagatggctttgcttttaccttatagatgaggccaaagcaccaggtaggtggaaggttcttgtatcggttcgaaccccgacagcgcgccaacagacaacacgaggcagtggggagcaacatgctgttttaatgagcgcctgggtgcaggcgtgctgaggctgaaaatggcatcagcaccaaatgaggatggggcaggggttttatagtctcctgtaaacaggaagtgtctcagtctgatgtaactgctacgtggtacctggacggcctctctctcggtcttcacagggtacatatcttccggccagctctcttcctgcttctgctatcttgctgacgcatgctgctagcacaagtggccttgcaccttgggactgggcctgaggagggcggagttattcattcccttaaactttcaggccccggggagaatctttcagtaagagctctttcagctttaccaactacagtctacacacttaacctgcttccacgcacaccctcatcgttctctttctcggtggaaaatatgtgcttcccttggcaaaggccaacctgttcatctgtgctcctgaacacagcctctccaatgtacttgttatatatatatgtgtgtgtgtgtatatatacacaactatatatatatatacgtatatacaactgtatatgtgtgtgtatatatacacacaactatttatgtatatacatatatgtatatatccctcccaccatggggtcttcccattttgcccaagctggtcttgaactcctgagctcaagtgatccactcaccttgggctcccaaagtgctgagattacaggcatgagccactgtgcccagcctgtccttgtgcctttgattcatcatttatcctctccttcttctttatttttccactgatcctttgtcacaggccttagtcttctgccagctgataaatgggaatattccacaggttcagttctcgccctttttcttctttcattatgtacatcacaaaggagatcttatccacattcatggcttctgcacacacattaaagccatgtacacctgccttcagccctaggtgagttctaggtgcccacaggacctctctacctatcttctcaaagataagtcaatcttaacatgttcaaaatgaatccattataattgatgtattagtctgttctcacaccgctaataaagacatacccaagactggataatttataatggaaagaggtttaattgactcacagttcagcatagctgggaggcctcaggaaacttacgatcatggcagaaggggaagcaaacatgtccttcttcacatggtggcagcaaggagaagtgcagagcgttggtggagagccccttatgaaaccactagatctcgtgagaactaattcactatcacgagagtaggataggggaaatcatcctcatgattcaattatctccacctggtccttcccacgacacataggaattacaggaactacagttcaagatgaggtttgggtggggactatatcaattgagaattaaaaaaaatcatttcttctgtattacccttgttctgtattctctctatagtgaatggcattatgattgtcacatcctgaaacctaggaatcaactcgtgtcttccctgtctcttactctctcaccttcagagaatcaccaagctctgttgaacttaataataattgacaatgctgaatatgaaaggcattttttaaagaagactaaatgtattttctcaattttcacagtcactgtgttatgtgggtggctaatatcacctccattttaaaattaagaaaattgaggcaccaagaggcaaaataacttgctttggtcacacaggtaataaacggcagggatgggatccaaatctaggcagtttacagcgctggcctcttaacaaccataccatggtcggcttactaaatgccaggatcttaaatacctcttcagttcatttcctcctattctttctcattttggtagagttggttcatgtgcttcttttctgctgtgtaacttcttacaacctgctgctctaaatccatttttaagttatcttactaattagccttcatcaacattttcaggaatttggctaagctatgtctttgtaatctatagatttgagattttgtttcaagaaaattatattcaattatatatttgaatttttcccattccatatattattttcttccatgaaagtgattatttgtttaatgtccataccacctcctttcttattttatctctgttcttttccaattcgttttatgttatttactcaagggctttctttttgtcctagactgtatttttatccatatatatgtgttaccatttgttgactctaatgagaatttcacctctgtaataatttcatcttatgcttctattcatctctgagctccacacacccactgtttatctcctgttcttgcttcatctctcttttgatcgatctcttgttattctttcaggataatttttttttttttaaggaaagccaacttgcctttagtttctttgagtcttgggagaactgtttgtttgaaattggcctatttttctatgaataggtcctgaaattttgtgttcttcatttgccttttgtttccttttttctcctatgtattttttctttactgtctaacctctaccagggaaatggatgtttcagaaagaattaaaggtaaagacaagtgatagtttctgaaattaaaaaataaatgtatacaagttttgagagagaattttataaattccttaatctttcctacttaacatacccagggctgagcctggatgacctagaacacagagttctaccgtagtatagaaaggatg

SEQ ID NO: 1882381 - DNA, 4001 bp, Homo sapiens
gttttgttttatttttgaaacagaatctccctctgtcccccaggctggagtgcagtggtgtgatctcggctcattgcagcctctatctcttgggctcaagcgatcctcccacctcagccttctgagtagctgggactaaggtgtgcaccaccatgcctgactaatttttgtgctttttatagagacagggtttcaccatgttgcctaagctgctgccttggcctcccaaaatgcagagattacagatgtgagccaccatgcctagccaaaatttattcatgtagtcaatgctaagtcaatgaaagagacttacacaaagaattggctccctaaacagctagagttgagtgtttatatatcatcttagtaagaaagagggttaagactttaagaaagtgtatggtgggagactaatgagaaataagtgtgaggaacagaaagttttgataaggttttgtttatgcaacatctcctctaggtgcaagtggtctatctcctctttggtcattaacctcctggagaggaaataaatggcagatgtattttaggaggcattgcttatgtccgcaaaagaaatttagataaggtttttttctgctgctgctgtttttctgatgttttcagcctaaaatcatcttcatccacatcagtgggtccaaatggatctcactaatgcactcacatatttttggacagctattgaatggtaggcaccattccatgtgctggagagatggcagagaacaaaatggagagaaattcctgctatcactgagagcttacatgctctcatctaagtcttaatcgggcccaactctgcttagcttccgagatcagaagagattggacgcattcagggtggtatagctgtagactcaggttactttctaatgagagacggacaataaacacaaataagtaaaataccatctatagtatgttagatggtgatcagggttaaggagaataataaaccagggaagggtttaggaagttacagtgtagcagggacgtgcaattttagataggaaggcctgggaagctcattaagaaggtaagatttaggccgggtgtggtggctcatgcctgtaatcccagcactttgggaggcagaggagttggattgtttgaggtcaggagtttgagaccaacctggctaaaatggcgaaaccccatctctactgaaaatacaaaaattagccgggcatggtggcaagcgcctgtaatcccagctactcgggaggctaaagcaggagaatcgcttgaacctaggcactccagcctgggcgacagagtgagactctaaataaataaataaataaataaataaataaataaataaataaatgaaggtgagatatggccgggcgccatggctcacacctgtaatctcagcactttgggagaccaaggcgggtggatcatgaggtcaggagattgagaccatcctggctaacaaggtgaaagcccatctctactaaaaatacaaaaaattagctgggtgtggtggcgggcacctgtagtcccagctgctcgggaggctgaggcaggagaatggcgtgaacctgggaggcggagcttgcagcgagctgagattgtgccactgcactccagcctgggcgacagagcgtgactccttctcaaaaaaaaaggtgagatgtgagtaaagatctaagggaggagagatccatcacactagatatttgtacctgcagtgtttttggcattctattaatgttattagtagttattaatgttttggcatttacatataaagaaggccatacagactgaacattaacagagctgccatttgggtctttgaggtgattactcacctaatgtgattaagcccccgccgaaagtgcatggttttttctaaggtggttgtttccttcgagagtgcaaggactcagtgagtcaccacttcgttgtttggccttgtcaatgttgccttcctacactgattctcttcccgctaccagttttgattgttctgagcagacagcaataaagagatgattctagaaaaattctcatgattgcctcagaatgaaattcttgtttcccttagcaacaacctgatttgctaacctattaccatagaaatagaatgcaaaatatataagcaatgtaatgttaccttttattttttaaaaccctctcttctactattcctggacattacatagatgattctctgtccttctaggctgaaccagtctcttgtttcttttcagctttctttcaaaactgccatttcaatttctatctttatctcgtaagaatagaaaggggagatagaaaaacaaagcagcaattacccacagagatggttttacttaaataacactgctctttttacaattccttttcattttactatcaccattttgtttaacaggagtcagcttctatatctaatcttctatatctaatacataatcttttaaatctgtatctaatacgtaatcttttaaaaaatagtcttctgatgccttagattcctaggggaaattaaaactttagcagcctcatcaaggtttatgtattcttcactcttctatataagcatacctgttgtagagctggacctggtggtgtgcacctgagtcccagctatttgggaggatcacttgagcccaggactttgagtccagcctgggtaacatagcaggactccatctctttaaaaaaaaaaactgctgagtatgatggctcccacctgtactcccagtggttgggaggccgaggcagcaggatcagttgaggccaggagttcaaggccagcctgggcaacatagcaagaccccatctctacaaaaaatagaaaaaattagctggacatagtgctgtacacctgaagtcccagctgttgaggaggctgaagtgggaggattgcttgaacctaggagttcaaggctgcaatgagctatgatggcaccactgcactccggcctaggcgacagagcaaaacactctttaaaaaaaaaaaaagatttaaatatatctattggaaaaatgctttcacccaagaataaaccaataatgactctaaatgttttgttttgggatctagttcttttctaaaaaagttctcatcacatttttctataacttgattaattagttaagcaaataattactgagcatctactacaagctacatgctaaaactggggatagagtaattaaggatgaagtcccaagtctcgaagagctcaagtgtccagacgaggatgacagaggtagccgtaagatcttgaagggcattgtcttggtccatccaggccgctataacaaaatgccttaggctgggtaatttatacccaatagaaatgctttgctcacagttccagaggctgagaaatccaagatcaaggcaccagcagattcagtgtctggtgagggcctacttcctctagatggtaccttctgtgggtgctcacatggctgaaggctcaaccaggctccttcaagcctctttcataaggggactaatcccattcatgagagctctagcctcatgacctaatcaccttctaaagggcctaactcttaatacattgtgattcggtttcaacatacagattttgagggcgctgaagaggggggtacgcaaacattcagaccatagcaggcatttatgctgtgctaaggagtttggatttcatccggaaagtaacaagctgccaataaaatagatgcagtggcactgacatggaaagttcatgtggaactttggactttggaaagttcactgtcaatttagtggagaataaattggggaatggagcaacaagagaggagaaaagcctctgaactttttttttgcagagaagtgcttttcttctgtgctacttctacagagattctgaggcaactccggtgagaataaggaggtaaaatggatttgtgagattttaagaagaaaaatctgagaacagttggcaataaatttgaaatacatagtaaaagaaggaaaaaaacaaaattctaag

SEQ ID NO: 1882382 - DNA, 4001 bp, Homo sapiens
acccgcctcggtctcccaaattactgggattacaggtgtgaaccaccacgcctggcctcattttcagtttttcttaataaaaaatcccacttctgagatgaacatttttcattaatccttttaacacatttttattgaatagctactctgtgccaggcatgtaatagcctcatctctatgcaaatccatatgcctaaatttttgcatgactacgcctttcgacaagtgtgtattgtgggaaggagggcataaacaggaaggtggcatcactttaaaatccacacagatttatacaatgtggttctaagactttctgtaagtcttctcgggaggcaacattatcatctaatcttttgcagtccctcttatgtttgcctacctctagaatgaacctgaatttattaatccacctttatgaagtgaaagattgagaagaattttctgtgttcttaattgcctttgctcatcaaattgcccccaaattgcccccacttgtagagtctccatggcctactgtctgctaaagtaaagcagaatcccagtcctcgttccagacctgccaagtcagagtctgttttcatgtgattctcacacacattggcatgtgagaagcactgagttagaccttggtgcttggcccacccttgaccatggtcctcctctctgaacaacggaggtgaggagaccagtagtaacagctgtgtcaggaacaggtcagcacccagggatccacacagacacttttgaccattcctaagtcctgcctgcacaggaagttggccactaaagataggctgcctgaaggaaaggacataaggacctttgcaagctgttcagcagggagaaaaagggtggaacaggaaagggaggaaagcaagtttctggattccccaaaccacagtttgtctaggtgctactttctcacttttccttatttagcacatagctttgtcatgagacatctttttgctgacctcttttccgtttgcattttgccccatattagaatgctaccatctaaaaccgctccatgaattagaaagtttaagttgtcagggactgaatgtgtctgttttccaacagtttctggcagttccctgcttttatggtgtagtcatggtgaaacctgagtcatctgaagatggtggcagtgccagagagcaggagagaggagctgcaaagaagccagacagcgttgggcatcaataactcctgggcaccaccggccactggccttcattctgacaggagagccaacccaaccctaactgtgttcagagattgctccaagctttacagttctaccaaattctttctgtagcaaaaatataaaggcatcttcttaggtaattttttttcagggttccaagtagcaacacctaacgtctgcagtgcgagttctcttcttctttttttttttaaggtgataaatcataacattttcctggaaaggaaagcagtagacctcattttttgttttaaggaaaaatagtttttctgtttccattcatatacattaaataactacccaggaaatacgccccggttttgcgcgcgtgtgcgtgcgtgtgtgtgtgcgtgtgtgtgtgtgccgtttctctaaaattctgactcatagtctggaggacaatgattgacttttttccacttcacatagttgctatgaatttctcctcacaaggatgggcctgtttactcaccctgggcatcgttggtagagcgctagtgtaaacagcctgaggaacccggtgggccggggaagtgggcgcgctctgttctccgcggccagctgggacgccgggccaggtggggccgcctgcgtttagcaactgctttctcaccccctggatttgcgatgtttgccacagcagcgagaagcgccattgtaatggggatgggaggggtggagcctccaagtcctgtctcaatttagatctctcactctgctgttaggcgcgcccatttcagattactaaactcgaattaagagggaaaaaaaatcagggaggaggtggcaagccacaccccacggtgcccgcgaacttccccggcagcggactgtagcccaggcagacgccgtcgagatgcagggcccaccgctcctgaccgccgcccacctcctctgcgtgtgcaccgccgcgctggccgtggctcccgggtaggaacgtgggcgcgcggggggcgcgcgggcgcgcgggcctgggccgctctgcggctctgggccagggcttcggggaggtggcggctgctgtgcagcagcgggtgggaaatgccctcgcggctgcagtccccagcctggtactggcctggaggtttgaccatatgtagcttcagcgtggctctccatgggacagttaactttctccactcatgaagttgtttaagcgtctccccggccataacaactttctgaagagagtcattttatttttagtccacattgcctctgccttttgcttctcaactttttgctcccagattgcgattcttctctcaaagacatgatatattttttctaaccaagatgtctcaaccttagcattgccaaagtgtggcggaggggactgatgtatgggttcaggggcagacattataggaagaaaacaacagcacccaataatggcaagccccattcattcctaaagatttctgtagttgagccctaacccctagttatagcagagaaagtgctgctttagtgacttcttttatgattcgctatacctggaattttcaccagttgtagtttattttcaaatggtatatttcaatcaatggtattggttaaataattttttaccctcgttgggcagctactcaaggataaaggtttgaataagaaacaggcaaaatcttagttaaaaaataacaacaacaacaagaaaataatcacgctgggataaggtcctctgtaaaggagaagcttagagacttttgctttgccaataactccattatgccccggtgcaagccatttacatcatggttccttctgtgcggttcgtggtttataaaatggaaataataacacaggccttcctctagtagtgatgcatgaattactgcattaaaattgatttatgggaattattgttgtttcagtagcatttcaattcagttgccaaatagagcagtgggcaatgttaacggaaacaactgcaattggcgcagtatggagtgcctatcgcactaggaaatctgagggtcacaaaagaaaggagatgtgaggataagaaactttgtttttcccttgttgggaactctttaggcctcggtttctggtgacagccccagggatcatcaggcccggaggaaatgtgactattggggtggagcttctggaacactgcccttcacaggtgactgtgaaggcggagctgctcaagacagcatcaaacctcactgtctctgtcctggaagcagaaggagtctttgaaaaaggtaagataaacagcataaagtcttacccttctgcagtaataactggaatatgttaataaggtcatgtgttaggtagtatagcagagaaaccccaaatttgcagtatcttacctaatatacttttaattctcact[426 bp omitted]

SEQ ID NO: 1882383 - DNA, 4001 bp, Homo sapiens
attgagtagatacaaaagaatatttataaaatacacacgagatgttaaggattacaatataaaaaaatacctatacatccatccctcaagttaagaactatgtaacaatatttttttactataaaaagcagaccaggtgtggtggctcactcctgtaatcccagcactgtggaaggctgagacaggtggatcacttgaggtcaggagttcatgaccagcctggccaacatggtgaaaccctgtctctactaaaaatacaaaaagccgagcgtggtggtgggcacctgtaatcccagctactcaggaggctgaggcaggagaatcacttgaacccgggaggcggaggttgcagtgagctgagattgtgccactgcactccagcctgggtgacaaagtgagactccatctcaaaaaaaaaaggagccatatccagcaattccactcctaggtgtatttccaaaagaactgaaaacatatgttcacccaaaatcttgtacacaatattcattgcagcattattcataatagccaatagatgagaacaacccaaatgttcatcagctcatgaatggataaataaaacatggtatatccacacaatagaatattatttggccataaaaaaaaagaatgaagtattgatacttcattcttttattcgggcagcagcatggatgaaccttgaaaatattgtgctaagtgaaagaagccaggcacaaagactacatattgtatgattacatttatgtgaaattccaggatagtcaaatctatagaaagagaaagtagattaacagttgcctagggctggagaaatttagggaaaacttaaactttttaaaatttaagtttttttttaagtttttagtttaagtttttagtaatgattcccttttggggagtaattgctaatgggtgtagggtttcttttggggggtgatgaattatgttctaaaattgattgtggtggtgattgctcaactgagtgataactctgctgagctaaactatggaattgcacactggaaatggttgaagtgtatgggatgtgaattgtatttcaataaagctgttttatttcaaaaaacaaaaagaaaaacaaacagccattgtattcccctcacagaatttagtcgttccatgttgcttttgggaagaggagctttagcagacagaacgccgaattccagggtcttcagtgcgcctcttttcctcttaggggctctgcccaccccgagaaaactttggttaaaacagttgtgctcagttacagactttttgcatcaaggcaattgtgcccaatgatatgcctccaaatgttgccgtgttgtattagagactttagaactgtgcggcacgcatgagaaaggcatcagaaatgcaagatggtctgttcttctgacataaaaataacatttcagaaaagagcaagtttcaattcccaaacctggatatcatatgacagcatgaacatacacccatggtgacttcttttgttccagatatacagacacacacctacacatgccagttcaggacagctcaagcactacctaggtttctgcctttttaccttccacccttggagactattttaattagtatctcagttcatcagctcctgtccttctcccagtccctccttgagtatatgttggggctgtgggtgtgaggggttctccccaggtagcagcatagtcaaaagggttgggcttttctacatgctttttgttcacaaagagggttcagtatttgcccctcagtgttaactctagcaattaagtagaaaatgtacttccagtagtaccaaagatgactcagttaagctcagtggactacctcaagactgtacaagaagccgaagaaatgcagctggaagtgcaaatgcattcgttttactgctaggagtagtcaaagcactcccaggtcacccttgagcttctgaaagcggactaagcagcatactccacaccatgcaacacccatttaccggtggactcaagcccgtggtgccgtctctgtgtcgcagtcatttgtgcgtcactgctgcccactgggcagtaggaccgtaggtagaggagtagaaaggcagacttccttgaggtttaaacaggactgtgagcagtgaaatctgtatctgtgcaacgcttaccaccagcttgactgctcattggctgtttttctctttcttttttattttttttgatacagagtctcgctctgtcacctaggctggagtgcagtgacacgatctcagctcactgcaatctctgcctcccgggttcaagcagttctcctgcctcagcctcctgagtagctgggactacaggcatgcaccaccacacccagctaatttttttgcatttttagtggagacggagtttcgccatgttggtcaggctggtctcaaactcctaaccgcaaatgatctactcaccttggcctccgaaagtactgagattataggcgtaagccaccccgcccggcctggttctttcaatatatgaatacagcaagtcatttattttagctttatagaggtgtggtctctctgagtcataatcattaaaattcacattcccctaccatagcttcttccagagtatatgaaaactgaagataggtttgcagctcctaatgtgtatttgggtcctgctcaatttgttaccccttaaagactgatttcaggtaaaagggcaccatactcttagtccttattacaagttttgctagaacgttcttcaagtcaaaataatactgcattggttaaaaaaaaaaaagaatttgcccatatagacttgaatttcatccactgttaaattttttaatggaaaatatactgaatcagacatggtggctcatgcctgtaatcccagctctttgggaggctgaggagggaagataccttgaggccaggagttcgagaccagcctgggcaacatagtgagacctccatccctacaaaaaaatttaaaaattatctgggcatggtggcgcacatgtagctgtagtcccagctacttggaaggctgaggtgggaggatcacttgagcccaggaggttgaggctacagcaagctatgatctcaccattgcactccagcctgggtgacagagcaagaccctgtctctaaaaaaaaaaaagagaagaaagtatattgaatgtcaacatgctatttctataatgtccacaaacatacatgtgtgttgtatgtacatacacatataaacatagacatatgtgtgtacatttatattgaagtaatgttcatgctctaataatagctatgtgtatactgcttcctatgtgctaggcactgtactaagacccttataagaccctacagacttaggaaactaacaagagagaccgttggagctacacttagtttttgagttttgactgtgaaggtgaggtaaagcgacaatgagatttttcatacatttgatgaatatatcagtacatctaaaaatgtagaacaaaaccacactcacattttttctatttgtggagtgaataattgtgacttcagttcccaatttcactccttctaaatggcatgccttaatacaataggattctaaacatgctggtggtactttagggcttttcaaggaaaacaaaatatgtctagagacaagtcattattacaagagctttaataatagagatttccattcatgattatcttcagattaatggcccaggaacataattaaatttttcttaactcaaatgtcattatttttgcatttaccttgacttctataagtgagaaaaaatatattataggtaaaaattgccgaaaggaaatgcaactatttttacctatctataagtttaatatttctaacaattctttcaatcttgtatgttaatcccattataaaaggtaagcattttactagcccttggttcaataaaatagagataaaaatactggtgatgccttgcctggtttgtattgtcattcaaagtattaaattaagggaatttaagta

SEQ ID NO: 1882384 - DNA, 4001 bp, Homo sapiens
gttctctctctctctttctgtgcatgtgtgtgtgtgtgtgtatgtgcatgtgtgtgtgtgagaaagagacagagagaggctaaactttagtcttctctcaaatcataggaatcactgacttctgtcacaatcataagtaactcataactaaatttattttccttctcaaattacattatccttgttacttctcacattttccattttatcctaaaagtttcttacatcattatcaccagatatatagtaaaaatccccaatattaaaaattaacaaaccatgattcaagttgatttttaaatattttctccctaatgatgtatgtcttggtgaagagaatttgatatggtagttttttttttctaagattaactaactcaattcattctctccagattggattggaagttggatgaaacactataaatcaatgtggaaaaataattttgccaaatttcaatctcaatcagtctccatgaaaactttatccttttgctgtttcaatatatttgtatggtatttttaagttgttaaaagtttatttattttaaaggctcaatgggcttcctggatgccaaatcactttttaaaaacattttgatgatacaaactaaaatgaattaaaaacacatggaatcactgttctctaaaatatatgtgttttcaaagtttagagaaagagggtgggaagaggtgcttggcagcatgtttgggttttagaaaatccgaaatttttgaaaaattgttccagatgttgatgaaccccttggttcccctaagtttcacccaaacctgctataaataaagataattataaacagcaataaactaaggttaaggcagtatgtaacggatgccataggaatcataattaatttgaattaactctgaattgaatttagccacagataatacagatgtggatgggttgtaaataccattaagaaaagtaaagttttacgtacacttacataaatgaaataggaaaataaaaacagaactatttcacacaaaaaacctgacagcatcctggcatttcatcctggcattcagaagctctcattatctagcccagtggttcttcagacaggatgataaatatcccatggaggatgtttggaaatttgtgggacatttttggttgtcacaatgactggaaagagctactgccttttattactcagtggccaaggatgattaacatcctgaaattcccataaaatgaggaaatattcacccaagtaaccacggtgtccccaccagtctcaccagtcctctctgacccctatatttgtgtctcaccaactttcctgacatcccccacaaatcacagccaacctgcctttgtgtttttcctctactgttcctttacttggaattttttacatctcctcttcaataagccacatctagtattatcttccagcaagactctttttcacttcaggtctttcctatggaagactgacttccatagtaaattttttatcttctcctgaggtctttcaatagcctcatcctcactatttcatattccccaattacatctaatacagggtagtttgtgtacacaaaaacagcttaattaactactgctaaactttttatcaagattgtggacttgtatagactcagctatagtttaactttcttatttgactttattgaaagaactctgccgtgtgttcacatgcacacatatatgtatgtctgatgatataggtataaatatagacagacacagatacagatatagattagatacattcctataaacatacaaaccactgacctctcatttaaggatggcattgtttaagtagaatttgtcctcttggttctattcctttgataagcacttacctctgattctcatggttttgcctcttactagttacactacaacagtagaaaatctttagaaccttgaagggcagccaggaagagttgacttggaaaaatataatctaataccaatgggaggaaataattcccacagacgtttgctggaagatatgaactatacatctggactgcagtaatgctttggaatgactaaggagagtttcatctttcaagccagtgagagctgtactagaaagtatgctttcaaatagcccttccctggtttcatggaacaagacttagggattcagataaaaaatgaataactgctactttaatttagggctgatatcactttatggtgatgtttagtacgcgcagcctgtgtctcaagaacatgtgacttttgaatgacctcatccccatcactggaggtttcctgctccctggacccctgccaagtgcccccttccaccatagcagctgtcaccaagagcggcctacagtccctctcagcctcaacccacctatagccttagagtgggcacagaattgaaagctcaaaagattcaagatttcatttcagaatgcaaaagggaagaagtgtactttctgtggacaaataagtctactggtaacactttctttattctctatgtgaaataacaggctaatatgaaaacttatagcaatataacaatcttttattaataaaaatgccaaaaataacaccattaacaccattgctttttctgactatgtaagtatcacatctattattttaaaataagaaatgcacaaagatggcaaaataatttggaaattatttctaattctaccatgtataaattatcactgaatattttggtaaacattcatccagagtttatattaatacacacacacacacacatacacatacacacacacacatatgtgaaatccaaaatagtattataaagcatatacacggccttcaatttagcttattacttattatattatggacgcatttccatgccaagcacaaagaaggtataactatataacaattttttaaagctgcttagtgttccactgaactaatgcatcataatttgtattaatatggccttaccatctggcatttagattgttctcagtatttcactatctcattcaccactgtgatcaacatacttacacatacattttggacatttctctatttatttttaagagataaattccaagagtggaattactgactcttattagagtagaaaaataattttgatttccattatcaagttcttccctcaaaatgctataccaatttactctccaaccagaaacatcttaagaggtaataaattctgggctttgaacaattaatttacagggtttttttttttggaatataacccacttcaaattttgagggtgcttgtgtgaattgtttagtggtttaaaattatgctttttaaactgtattctgatttcttctgtcaaggaccaaagaccaagaacctagaagaggaggatgtgggggatgggtagagagaggggaagttaactttccttttttcagatttgaactaaaacagggcttctgcttttaaagatttatataagcttccctctgagcaagattgaatacaaatattcaaaatctttagttaaaaatgtctttcctcacagtgccaaggagaaaaggtagctgctgttctagttcactgtcagaactgtggtgggaatataaattagtcttgtaactgtggaaagcagtttggagatttctctaagaacttaaaacagaactaccatttaatctagcaatcccattactgggtatagacccaaaggaaaataaatcattctaccataaacacacatgtacttatgttcatcacaccaccattcacaatagcaaagacatggaatcaatctatcatacctaggtaccaacctaggtacccatcaacagtggcttggataaagaacatgtggtacatcaccatggaatactatgcagccgtaaaaaagaacaaaatcatatcctttacagcaacatggatgcagctggaggctatcatcctaagcaaattaagactggaagaaaacaccaaataccacatgttctcacttataagtgagaactaaacatggtgtacaca

SEQ ID NO: 1882385 - DNA, 4001 bp, Homo sapiens
tgactgggctaaatggcttttgtcttggtttgggttccctcaaaatcatgggataagggttcatgtgcagtggtttattgatatgtgataccacgggggagggggggcggtgggaaacagtaaggaaaaagggagtggaacaggaaaagaaaggcagccagttatatgccaattaaccctttgagtaactggagcttaatcctgcaggattcattgtagaatatgcgactcagagttacctctacttcccactaatccccaggtaggagctggagtatttgtacctactaataatgatcctcagttagcacagtgcccttgtgggaagaaacacagaaaaccctcaggaaggaagtcctgcgttacaatatgaaagcagcctctgctccagcctgttctgatgccctcttctccaaagatgccctgatagctctaacattctatctccaaggtataggattctgtagaaatgtatggacccctacttggggaaaggattttgtttaaaaattgttttatagatttgaagaattatattcaaagcatttctatttattattcaggagactcttttttgattgaatttcatttaaataaaccagtatgggaaatgtctggtttgtctaatcatataacccagtagaaagagatagttccacaatgcacagatggctcaataagccctaacttgaaggaaagttcgatcttgttctcctaattttattcttcttacctttctccttagtcaacataggctggcttcatttcagcatgcaaattaatctccaaatcccaatgccttacccacaacaaagggttatttttcaatcatactgtatgtctacatagtggcaccataaacatctctgctccacattgtcattcaaggacccaggctaacagagagttcatcttctcatagctacacctcatgcaagaggcagcctcttttgtcaccgcagtaagggaaagaagtatgaagaatgttggatataaaaatgctctaggaataaatgctcagtgacacaaagtaaaaccagcactcaggcaaaagtttaattctctcagcaaggcaatttacttctgcagaagggtgctacctgcattaatcaagattgcaagagcacagagaacaaagaagaccaggggttttttatccttaatgcagtccctatctctgtgtgactcccccatgggctggggttggaccgcacaatctgagctgacccgattggctacttgtacatattttcctaaatatagaagggaagggggacgtgaggtacagaggtggtgcatgtgagacatgcagtttcgggggaacaatgggtacaggtaaccaagggaacagatgtgagttattgattagagctgatgggaagcgggtaggctgtttatggtaactaggggcaaggaagaataagaaagttgagtttgagaacaaaggataaggaagttaactggctaaactctttgaatataaactcagaaagatttattgtatcttacaagaatcacatgagttttcactgtctcaattcaataatgacaaatcatgtctgcccacattggccagaactatttacattgcaaaacctagctgcaaggtgctgaggaatgtagggtacaaagagtatagatgataagcattattgtttcagccatacctaccaaatagaaaagacttcaaagatcatccaggccaaagattttccagttgtgcatgccaggagctctattgctcccagcattcattagggattcttgaaggtgaaaaagttattctgccccctcccgcatgttaatcagaaaagcttttcttcatttttcccccatattgatgttccttatacaattttgtttgaagaaaggattttgttgcttttttaaaaaaacatacttttggactacgccaaatgtagtctaactttttcattttaaaggtaagaaaaataaagccccagtgatatatcttttttaaggtcatgcagctggttagtagaaaacgttgtatcagaacgttgctaggacattgtctacgatgacgtcatgcctctacaatctcctcattgttgggaaaacctgtttctaagaagtttgtcaggagtatctggaaaagcttaagcccaatgtgatttgaaaaaagaaaaaaaaatgaaagaagaaaacaatcgagacagaggcacatggcgggagggaacaagctttggcaaagtgaaaaacgggataaagaaggagtcagagagaagcgcaggaggtgtgaaaaggctgtgagcccagatgagagagccacgctgtctagactccagatgtgagtacatggtttcagtgagtccagctctggactctgtaaacactttccccagatgtcgtggctgagctacaaatccttggacgggtgacagaattggctgttgttctgttcagtgtgtgactggtcatgctgcaggctgctctgaggttacaacaccagataacaagactgccttacaatcagtcttggatgaccttgaagaagtgaggcatagcactgagccctcttgagtgcctccagagacaagtcggtagagcccaggctctcaggtatagccacccacccaacctggctggagatcaacctgacccccaaaaggcaaaataatagtgagaagctgagtaaataaagtagaaataggctactgtttgctagcaacagcattttgggtaaattgccatatctttctgggattctctttcctctgagggatttaatcaaatggtttctaagttccatttgaacattgacactatataatcctataaaatgacaccatgaagaaaggataaacaagaaagtcatgtctcttccaagattttatgatagaacataaaaaagcaaaacattctgctttgttaaacaaacttggtaaatacttggatttgctctctgcaagtcagcagcctccagaacctggcaatgagttgaatgcatgagagctaagacggaacagctctgaggatacagaagagttctagaaaaaggaaactatcaaagggctggccataggcagtaatttagaaatcaacagaatttatgtttcttagtcttccactctcacattcattcactaaaccaatacttagcatgggctatatgctatggcctagggatttaatggtaagggaaatagctcagtcttcattcttacaagactcacagtataatggtggatgccaacaattaaacaaagctaaaatagagtgtgacaaggatgatcatggggatgagatgtaggggctggggatggggaaggtatccagaccagacttggaagaccgagatcctggaagaagtacattttaagttgagtcccatcggaaagatgagaaacagtaagtcgactgtgcgtggtgcctcatgcctgtaatcccagcactttgggaggctgaggcaggtggatcacctgaggtcaggagttcaagaccagtctgaccaacatggagaaaccctgtctctactaaaaatacaaaattagtctggcgtgatggcacatgcctataatcccagctactcaggaggctgaggcaggagaatcacttgaaccccagaggcggaggttgcagtgagctgatattgtgccattgcactccagcctgggcaacaagagtgaaactccatctcaaaaaaaaaaaaaaaaaaaagtaagtcaaacagagaagaaaacttctaggcaaccacttgagatacgttgaggaagctgaaagtagtgcatatggctctgccacttattgcctgtgtcaccatgagcatgctatttaacttctctgtgcctcaacttccttatctggaaaatggaccaataataggttgcacagaggattgtttttaacattaattgagatggtacctactacagagcctaccatgtaggaggtacccaagaaatgatatcaaattatcatattatggtttggggtttagaaagaacaacacaaaagtcaacatgttgcccaagttttta

SEQ ID NO: 1882386 - DNA, 4001 bp, Homo sapiens
tgcaatcgagaaccaattagttgtattccttaggcaaattattgacttctttgaatttctatttctttagttataaattaagaaattaggttgggcgtggtggcccactcttgtaatcccagtactttgggaggccgaggtgggcagattgcttgaggccaggagttccagaccaacctgaaaacatggcgaaaccttgtctctccaaaaaaaaaaaaaaaaaaaatagctgggcatggttgtgctcacttgtagtcccagctactcgggaggctgaggcgcggggatcaattgagccttggaggttgaagctgcagtgagccatgactgtgccactgaactccagcctgggcaacagaacaagaccctgtctcaaaaaaaaaaaaaaaaaagcaattaaatttttttgttgttctaaattattctgattctataaatcaaatggtccactaaggcttggagccaattagatggtcaaaaaacaggaattaaagattaatcctgaagacttcccaatgctatttcatgctctagaactttcctttcacccttccttccaaaaggtggcttgatgaacaattagctataggagtaaccttccgaaatctcactcctactagattataaagtcatacaaacataggattatgtcctactcgtatgagattcaccacagcaactagccacatactttgcacatagctgctaaaggaattagttagcagatggaatgaaggatggaagaagagggggaggaagagagatagataactaactgttccatttaggatgtgcaggtgctaaaggaaagagaagaagtagctagatctgtcaacttccatataaagcaaggagcaggacaaatcagagatgtctggtaaaggtttgatttaattactacagacataaatcacagtggaaattgttatttcaaacaaagttaacaaagtggaattctagtctaacacaattatttgatcttttccttggaattttttttgtattagagtttgatctaaattttaggttatagattcaggtaaaaaaaattgagaacactgaaaaagactcaactgaaagacggacataaaaatagaagaggcttgattaatttattgaaaatgaaatacaagacataacagttatggtgaaatgagtattagtggcaacgaaatttaattctccttgacctttccattctattgttgaataaaaaaataaggtggtacatatttgagaggttctatatggatatatgtatatggagaatttataaagtataatattaagattgccagctctgaagttaggttgcctgatttcgcattctgacaccacttattagttaatgtgactgagcaaatgactgaacttttctgcacctgcctcagagccctcatttacaaaatggtgataataatagtgtctatctgataaggttatgtaaggtttaaatgagataatgtttaaaaagcactttgtccattacttgtctaagtgcttcataatgttgttgggtgggggagataatgcatgtgttactactacatttgtatatctacagagaaaacaattttgaaatgatccacttcaaattattaatagaattagccttggtgagtggaatgtgggaggatgtagcatatacgtttcattttgtttaaccacttctctaatgttgatttttttataacaaacatttttgtgtcataattttgtctttaaattttgatggtaggtctgaagagataatttaccactgtaaattcattcagagagagcacaattcaaactcatttatgcagaattaaggtagtagaagagaccataaataacaattcctttttagggggacaatatttatatgcatattcaaacctatggtctccattaatcctttagattaaataggattttgctatttccaccagagttgagaaagttgagagacttcccagatcttaccttgttactcacctagtgaagatcagggacagaaatgactcaagtgccctgattccacagagcccctccactgccttatgacatctacagtgtccatcattccccacagagctccagttttaaagagacaaagaacagtgcatttacataatcttgaaacccagcagaatggagagtaacaagtcttttgggcaactggctaatttgttttagatctatatgaaaacataggtgaagactctcaaaatatatggtcaccattcaggtaatttcttatctcctgaaaggtttaaatatattttatgttttaggcttttgtggctgataaactgaagcctttcaccttgtggctaatttaacatggttagctttggttgagatctcatttttctgcctgcagattcacaagatcccccaaagtctattcagtaattgtgatgcattcctgtagcatttaagactaagccctaaaagctttgctttgtatacttgatctgtagcgacctttagagtttgctgcccattgaaccgaaggtcttccttgtgaaatcatagaatagtgccccagttcactttctgttacttgatatcactgaacaaaaataccattatcagtgcctgagaaaaaaagagatatggtaccctgtctctttaacagtttaagaatagcaagcacagtagagttaattcttttgggggctgtgccttgagaattttctggcccagaatcaaactacagataattaattatgtcagtgaaaagctctgatggcctgttctcttcagaaaaaagtgacatcatccatagaattctctggcaataaagcagaacaaagctgtgagtgcaggaaataacagacagatgtccgtgagtgcatattttatctacttcaaagtacattgcaagaagtcatgctctagggctgtctcccagcagcagtggcttggcaaggggtcttggagagtcagagaagtttacaggattgggttcactgcctcacgtgccctggcctgaagattgaagtgcagcatctttaaggaagctattgaaaaaagataacaatgctcaaaaaatgttggcaagaccatgagaagccaatcaagttatgtagtgtggggaaattggaccagatggctatggatggcaccacttgtggatgattgttagtacaggaaacattacccagtgagttttgttccagggctttcctttgctctgtgcttacatcatattttcactgaaaattgttattaacacctatagcaacatataatggaaagaacaaatattttggagttagataactctgtgttttactaatgatgggatcttggtcaagctatttactttatctgagctttattttttcatctatagaattggaattaagaagcagtaaattaaataatgctcctgaaaggaattttctccatgctagagtaaaatgtaagaattggttgtttttaaattcaactctgtcctttcctgcaaaatatattacatatctaaatctacaaatccaaagtcagacttatattagctagaacaaatgtctacatacacaagcagttttaggtataatagaaagatcattgtttcaaaatttcaggtgccagaggaccagaaattctactgttagaaatttagtcctttgagctgaaatacgtagcactttctttcaaaaaaaattgtaggccagacatggtgactcacgcctgtaatctcagcactttgggaggccaaggtgggcagataacgaggtcaggagttcaagaccagcctgaccaacatggtgaaacctcatctctactaaaaatacaaaaattagccgggcgtggtggcacgcgcctgtaatcccagctactcaggaggctgaagcaggagaatcgcttgaacccgggaggcagagattgcagtgagccgagatcaagctactgcactctatcttgggcgacagagcaaggctctgtctcaaaaaaaaaaaattgtatctaattatcaaagtaaaaccagtctgatatagattatttaaaac

SEQ ID NO: 1882387 - DNA, 4001 bp, Homo sapiens
tgcatgttgcactcttaatataataaaggagaaagaacactggcgtaggaattaataggcaacttatactcgtcacatcttttatgattatcttattccattctggtgacaacccccttactttatcctaatttaatagatgtttaaaaagcaagctctgagtggagtagtgatatgtttggcttaaactggcaatgctgactttaatgtgtttagtccaaattccatcaataaataacccagcaacttttggcaagacattttgcttgtcttcgcctggagttatttgtccataaaataccggtgggatgtagatcttttgatttctaaggcttatcttccctaattcttttggcatcttgcagccattaacaatggctgcaggatagcccttgttcaagaagaaactcacctctctgtggggttggctgcttaaagttgtgctgttttcagccaagagtctttgtatatacttatagctataaatttgattactctgacaaaatttggtagtaaataatttttctcaccatttagtcctctactttcattcaagagagttctctggaaatttgaattatggtataaacaaagcagaatcttcatgatgtgttcattgtctttacatatataggagatgtttgcagggcagtcttgtagtcataatattaacactgctgacttggaatttatttattttgcatatagaaatacaacgaaggggctgtctgtcatctaggtaacccccagtagtaatccaatagtaataagattgggatagtctgacaaaccataggctatgctgagtggagagccctgagcattcatttgtcagagaagttgaaagattttctctgcaggaagctgcctcttgcctgcacaggtggaactgtgagcatgtgcccagtcccatgagtggaggggatttcttttatttaaagatacttaactatttctaggctcatgaaagacaccaaccagtagtagtggtcctaggcctaagggctgtgtgtcagatatctctgaagtgaggttatattgaaccaacacaatattttgttttgttttgataaatttgcaagctcttgcagtctaagcatgtctcagttaagcatagtatccactactctgtatttacctggccaacttcattcattcacgctgtctgctgctcctcgaaaccaggtggtctgtcatctctgaaagagtggctcctatttgctgcgctttgcatcttatcctcaaaacagaactgtgagttaggtataactcctatttataagtgagtaataggcatctcctatttataagtgagtaaactgagactcaaagggaaaaactagcccaaggcaagataactaacaaatcaccactgatgactgagccttaagcctgcgccctaataagtttcattttacttggttctgtctgtgtcatctggcccctggaccttttctggaaagtctgcaaaggaccacctgagcccatgacttggactcactctttcattcgaacaacaagacaccttattggttttattacagatatcatcacctagccctcagcgactcaaggtgtcattattttgccttccttacacccactgtgttaatttctggaccccaggttttcaagccattgacaatttcagcgtgtctgtaatgtctccttagtaattattgaaggtacttgttatatttagccaagagaataactggggtggtactaggataacatctacgttcaaatagttggatattcaagagtcgatatatgtctatggttccgaagggcaaagccaggcagtgtaggtcctgcagaactccaattaatcagggctgcccagtaatcctaatgccaaacccgtgccccagaacctcgatttctccccagacaccaactccaagttcctccacggggatgtgggatttcagtttatgctcttgcgtccctctgcagccacaggccgcagagcccgcccccagggccccgcccccgctctccgggcgctggacgcgggacgccgtctcctggcaacgcagacgcggagccgagcgcgcccgcaggctctttgctcagagctcagccctacatagatcggcttctgccatggcctccaaacaaaccaaaaagaaagaggtgcatcgtatcaactcggcgcacggatcggataaatcgaaagagtaagggacctctgcctgtccgtccctcccctggcctagcccctcgacctcaccactagttctggggctgcctccctgcagcaaactgtgccagggcagaagtttagtggcctcctcgcagcttgtcttctctggtaaaccagatcctggaggtgctcgctctcatccttctctcttgcttgtcttgactcacttcctttcccagagcccctgattttcttgctttgggtgttcagctcccatgggtgaatctgccacccctcctcttcttcatagccctctcaggcagttagaaaggccatagctttcctaagaaagaggcatatctcaaatacttctggttaaagccacatcttcatggccccggaaatgatacagacagcgagtgacagacagacatggacacatttcaccttaatggtgattttctagtttgcatctgcccagtccaacgactacgatctttaatcagatatagtcagacgtaaagtggcttctaaaccttaaaacattataaatgtatagttcatgttactaacatttactctgagaaagtaaacagaccctcgctcatggaatttttatggtgcctttgtcctgggctggtgttaggtgttgtgtcttaggatgtacttccccatgattattattttctgtggtctgtttccctagggatatccagttatccacagcataggattggggctgtttgaacttacaccatttctaatgttcattcccactgtgagagaatcccagctgcccgccctgcttcagtgggatcattcatgttcttcatgctctgcctgatggggagggcgatgcaatcaatcatttcaaattgaattcttacatccttgatgcctgtttctccatttccttccctggctgaagaattccacattggactgatccctatgattcactgatccctaggatttaaactctttttctttgtgaattcttctcccagactcattcccatgtctgtgaatctctagtcccttagttctaacctctctcataagcaggtttccagttacccggcagataatccattccttttactagcttaaattttagatattacatatataagtaatattacatatataattttatataaatattacatatgtaattttaataggattgctttacttctgtgtaccaaagtcaggtcttttcagcgttgtctaatggcttccattcctctaggtccaaggccgaggacgcccttcagaatcaggcctgtattacttctctaaagttaccttccactagccttctctccactccctgagtcatctcaggattgttcccaccgcagggcctttgcacttgctgtttcccctattggaaagcttttctgctcaaatatccatatggttttccctctcccttccttcaggagtttacctaaatgtcattttctcctgttagcttctttggccacctgatttaaagttacaacctctacttctctgccaaaataaaacaaaacaaaacaaagctccctgtcttccttcactgttttatttttttattgacttttatttttttgctcatttaacatgctatatatttcactttttaaaaactacatttttttttttcatttgtcttcccaatagggaaggcagggattttccttttctattttacatactgttgaattcttagtacttagatagttccaagatcatacatagtaggcactcaaaagtgtttagtgaatgaatgaatgactctcttaactaggagatattaaaggattgcaaaagaattttgagtacacccctcccccatgcgcacaca

SEQ ID NO: 1882388 - DNA, 4001 bp, Homo sapiens
ggttgatagttgacaggatttggtgtcataaaccctgttgggttttttgtttgtttaagatttttgttgttgttgttgttgttgttgttgttgttgttgttgctgggcgcagtggctcacacctgtaatcctagaacttcgggaggccaaggtgggcagatcacctgatgtcaggagttcaagaccagcctgaccaacatggtgaaaccccgtctctactaaaaatacatacattagctgggcatggtggcgtgcaactgtagtcccagctacttgggaggctgagccacgagaatcgcttgaacccaggagaattccttgaacccaggaggcggaggttgtggtgagccgagattgtgccactgcactccagcctgggcaacagaatgagactctggctcaaaaattaccatatgtttgtttcctaataataaacatttattgaattctttaaatatttcaatatgctttatatgtatttatttcccttaaacaccagagcaacctagtgaactaagtgatatccccattttatagatgggaaaactgagactcaaagcgattaagataatgagaggatcacgtgagcccaggagtttgaggctgcagggagttgtgacagtgccactgtactccagcctaggtgagagtgagacccttctaaaaaaaatttttttttttaatattcagaagatctgattttaaaacttgccttcattacgtgtttgttgccttgtgactctgggatgtcttcctaccaagaccttaccctaggttagctcagcaggtttttgtgacgagcaaacataaacaagtataggaaaacactgtctaaaagtaatatattattcattcacaatggggtgaagcctagaacccatttattctgactcaatttaatgttattttgctgactaattcttaatcaagtgttctttaccttcaaataattttattttccatctgtgcccgcttttgcctatagtgatgaatatttattgagtatgcatcttgttcttggcaccacgtaagtatcacacacgtcaaggtatatgaaaacttggcttatgttatcaagagacttcatgggatgatgagaaatgcagaaaaaaactgaaatcctgatcttctcttttttccatcacttctctgcacctcatattttccatctataaaataagtgataataccaccacatgaaaaatcatagaaagaatttagcaacgtaactagtaaaagtgaatacatacaaaccatatgtgatagaatggatgaatcctactaagaacagttaccaggtaactgaagctaaacaactctcagaggactgagggatgttacatttctgaccaagtagagtagaaacaccttgctaaatacttatgtattcactaaaggccccagaaaagctgcacctttggagcaaagctaaaatagggtactccacaccgaccctaacaaagattaacaacaacctttaagccggtcatggtgatgcatgtctgtagtcccagctactcaggaggctgaagcaggaggactacttgagcccaagagttgagcccagccttggcaatatagcagatccagttttttataaaacaaacaaacaaacaaatcatttgaaagaatcagtaagcctgctagaaaaaaactcaaaataatattgttatgtttaaaggaagattacaaagtctagacactaaatgatacaaccttcaccatgtccatcatctaatccaagattctaacgcagagaagcaagaaaatgtgacccaaaaacaaaaccagccttttggccagaaccgtcatcttccagtaatttgccaaaatgatgaatacaaaggcaaaaaggaaaggcactggatatatgttctctaggcctttacaaaaacatggagttgttcctttggccacatatatgctaatctataagaaaggtgatattgcagacatcaagggaaggggtactgttcaaaaaggaatgccccacaggtgttaccatggcaaaactggaagagtctacaattttacccagcatgcttttggcattgttttaaacaaacaagttaagggcaagattcttgccaagagaattaatgtgcatattgagcacattaaacactctaagagccgaggtagcttcctgaaatgcgtgaaggaaaatgatcagaaaaagaaggaagccaaagagaaaagtacctgggttcaactgaagcaccagcctgctccacccagagaagcacactgtgtgagaaccaacgggaaagagcttgagctgctggaatctattccctatgaattcatgcataataggtgttaaagaaataaaataaaagacctctggactatttaaaaaaaaaaaaaaaaaaaggccaggcgcggtggctcgcgcctgtaatcccagcactttgggaggccagggcgggcagatcacaatgtcaggagatcaagaccatcctggctaacacagtgaaaccccatctctactaaaaatacaaaaaattagccaggcgtggtggcaggtgcctgtagtctcagctacttgggaggctgaggcaggagaatggcgtgaacccgggaggcggagcttgcagtgagccaagatagcgccactgcactccagcttgggtgacagagcgagacaccgtctcaaaacaaacaaacaaacaacaacaaaaaaaattaaaccatgtaaccaatagagatgtgtgtgtgtgtgtgtgtgtgtgtgtgtgtgtgtgtggtgttgtgtgtggttaggcaagcaaaaacaacaaaaagcaagcaaacaataaatctaacatttaggatcaaaatattatttgagggagatgcaatgggatgagacaagaaaggcacatgtagataaatataggttacttattctgattgttgggttggatgtttattatattattgaatggtattgtgaatggatcaaggatgatggcatataaacacccaaagtttatggttaacacaattctgtgcatctgaagtgcaggagaacaaggtgggaagtaaaaaagaagagtagaaaagaacacagcattatgaagtctgtggcagaaaacaatataactttctagagcataaaaaaaaggccaatgtgagcacggctggaactggaggacgttatgttaagtgaaataagccaggaacagaaagttaaacaccacatgttctcacacatatgtggaagctaaaaaaaaaaaaaatgttgagctcatagaagtaaaaagtaggacagaggataccagaggctggggagggtcatgggaagggtgggtcgggggcaggatagggagagatttgttaaaggacaaaattacaggtagataggaggaataagttctattgttctataccactgtaggtaatacatagtttcgaatagctagaggaggaggaggatacagaatgttcccaacccaagaaatgaccattgtttcagatgatggatatgctaattaccctgatctaatcaccatacattatgtttcaaaacaatactatatacccccatgaatatgtacaattattatttgtcagtttaaaggtttttaaaagattaaaattaaaaaaaaaaagaaaaaaacccggccgggcgccgtggctcacgcctgtaatcccaacactttgggaggccgaggcgggcggatcatgaggtcccgagatccagaccatcctggctactttcgtgtctactaaaaatacaaacagggcctgtagtcccagctacttgggaggctgaggcaggagaatggcatgaacgcaggaggtggagcttgcagtgagctgagatcgggccactgcactccagcctgggcgagaaaaaaaaaaaaaaaagaaaggaaagaagaaagaaagaaagaaagagagagagagagagagagagagagagagagagaaagaaagaaagaaagaaagaaagaaagaaagaaagaaagaaagaaagaaagaaagaaagaaaaaaggccgcccggtgcggtggctca

SEQ ID NO: 1882389 - DNA, 4001 bp, Homo sapiens
tctagacagtggtgagatcaaatacaaacataggtgacttagcaggtgtcctagacagacactgttgggaaacaaaggaatccacaagtcagataccacttacttttattttagacaaaactccttcaagctcagtgatcctttttctaaagccaaagcggatggtgcagcaaattgaaagaagaaactatagatgcaaggacagaaggaagaagcaaaaaaccataatggaaatgtctgacttaaatattcctgtaaaaccttaccatgtagaggagaaacaaaaggggaaagatatgttttcaagaaaattaaaattagaaatgtttggtactttaaggagtaaatttctctattctggaatattaatctgtattccctcatatgcaatttacccagtgaatttgcagttgatttctttcccagaagttgcaggctcaaatgcttcatgagtcaaacaagtaacaaatatgtaaagtggctgtagggggttcaaactcaaaacacaatagaaactcaaactcagagctgttttaaaattgccgaggtcagatttccgacccctatcttttttttttttttgagatggagttttgctcttcttacccaagctggagtgcaatggcgtgatttggctcactgcaacctccacctctcgggttcaagtgattctcctgcttcagcctcccaagtatctgggattacaggcgcacgccaccacagccggctaattttttgtatttttagtacaaacggggtttcaccatgttagccaggctggtctcaaactcctgacctcaggtgatctgcccacttcggcctcccaaagtgctgggattacaggcatgagcaactgtgcccggacttttgacccctatcttaatcaatgtttaggggagagaaaggtactccctgaacttgacagtaacgtcaccctctgagagtgaccctagtaggaatcaacacataacagatgagatgaaccacgaatagaaatcacctgtcctgtaattggtctgtaaatgtatggttgagaagatccactctctctagtcttagtcaaggtaactagggcaaagtctcagggagacaagactgattgaaattaacgaggcaggaagggaaattgctgggttgcctttcctacaaccattcctttcctctttttcaccaaacctgcctcccgtaagaggctgtgaaaatgttagatactgccattcacagcctctcttgcagctaagagtaaaaaggtgatactgttctagccaagaaaacatgaggggaaatctgcagagcaacatctggaaaatttattctctgtgataataacaaccacaagaagaaggtttatccctttgctgggcacagagattaagggggaaatggagactcttcaaagaaagcacaggccaaaaccacataatttgaacttcaaaagggttattacaaatctatgtttactcttggagaatgccttatagatcaaaggttgtatctaaccctttagacactccaaatcaaacactacagaaaatttaaaaatcatgaaaccaggtttggaaaaaataaaaattccaaaagaaaactatcatactcactcagaaaagagttgacagtgaagagtttgccctgggacattgaagatccccagagaggcctagaacaatctttatggagatgctccagctgaattagatatcctgtttacagcaaatatcatgatggattttgcaactgcagttgatgatctctgtcaaagtattaggtcaaagcaaaatataacaaaactttaaccacttcttcagctttctccacattaaaaaggaacaacaagagaccattccaacataagagtcacctgttatttgccacttcagatcctctcagccttacctttctctgtggcctctgacctcttgttccagctcagcccatattgtggcagccaactctgtgtaaatttcaaccaacttcactcagtgcatgccaatagcacctcacttcatgcacacctctgacatcctgtcccgcagctttcccgttgatgctgggtatgtctgcatatgtacattcagggagtgcaggaggattaacacccactggaaagattctttgaccaaagggaaacaggagccaacaactaattctccctttaacacatcagaggactgtcctgagaagcaatcatatatatccctttcaataacagttccccaagatcaagggatcagttgttcttaatagctatcctccaattgcatttccctccttccctgcctcactctacttttccctaattcccgatccctactagggaattgccctccctaattaagttgtagcacataagccttggcctcaggcactgctttctaagcaacaaaagctcagaatgtattcgttttcttattgctggtaacaaattaccacaaactttgttgtggaaaacaatccctgtttattagtcaggtcacaattctgtaggtcattctaccccagtgcagttgggtttatagctcaggttcacataagactgaaaccaaggtgtaggctgagttgtgttctcatcaggagtttagaatcctcttccaagctcacctggtttgggcagagttcaattccttgcagttgtagggtaaaggttgccatttccttgctgtctgtcagctggggcctgttctcagctcccagaggctacctgcattctttatcacatgaccccctccatcttcacagccagcaatggcacattgaatcattcttatgcttccaatctcttatcctggccaggcatggtggctcatgcctataatcccagcactttgggaggccaaagtgggtggatcacctgaggtcaggagttcgagaccactctggccaacacggtgaaactctgtctctaccaaaaaaaaaaaaaaaaagaaatacaaaaaattagccgtgcatggtggcggatgcctgtaatcccagctacccaggagactgaggcaggagaatcacttgaacctgggttgcagtgagcagagattgcaccattgcactccagtctgggcaacaagagcaaaactctgtagcaaaaaaaaaaaaaactctcttacctctctcggcgtctgacccctagacccagatttaaatgactcacgtgatcagttcaggaccacctggataatcaccctatcttaagctccactgacttggaattttaatcacgttagcaaaatccctttggccatataatgtaacatacaccctcacacttgaagggaagaggattatacaaaagcaagagtcattgggaatcatcttagaatcctgcctatcagacagttggtatcaaggggtgacccttgagagcagacccttaggatgagattttggtactagattactcagagctctgaaagcaatagggtttccagtattagcggtaagtggggtggaagttcccaatgtgcaatgatatcgcaagtactgtctttcacctgaaattaattgatattaggtggagctagaaggtgaggcaatgggatatgcaatggctgtggtacttaaaaagtatgggagcagttatgactgaaaattgtggaatggccttactgctattaacagaatcaaaagccttcaaaaaagaaaatgatagactcaggacaaactactaccaattcaaagcttgttttgaaagccagagggccactgagataattttaaaaatacatttatctcctgttactaaagggcaaagctgctagggagacaagaattgtgcctcattcttagtggtagcaggtgtgaggtgcaacctctcattttttatcttggaagggatgacctggcatgttccagaccactggatccctacaaacttcaccaatgtagcaattccctgaatattcatgagatttatctcccactctctggtacacatgattctactagggcattggtacttgccactctttgttcatcaggtccatttagtaagatgccatatggtgatctga

SEQ ID NO: 1882390 - DNA, 4001 bp, Homo sapiens
catttctccctaggccaggcaatgccattaataccccctcctccaccaagtgtctgcagatggtgcaaagcccagtcacgctgaaagctgagagtcggtgattgtctctaagtgaggagtgatgcaatctgatttgtattttaggaaaataaccatgtaggcaggatggcagaaggactgaggagggagagcctgggggcaaggagaccagttgggcacttgaccactgtcagctttcaaggccaggaaggaagaggggccaggggttggaggatatgggagagagtccaaaaacatgtctgaggtggaaccaacaaatttggtgattgtatgtgagggagcaaaggcaagggaggagctgatggtaaaatttcaagatggcaaaataaggttaagagtgacaaaattaactaaaaataagatcaactgtctcgaggaaggagaaagggcacccatcagcctggagtgcttgtcctcctttctcatcttaggccctggaagggctggagcctgttaaacagagccgacattagacctggtgccatgaattggtattgcaataatttgaattggtgtctggactctgaacttctaaaggccaggaagcgatctggttcaccttttttagtctcagcacttagccccataagcatgtaataagcgcacaacacatttttgctacaaagacaagtggcataatggaactgggaacagcctcactgggaaatctcactgttgtcaagccagccttatgacaaagatagtttcacataaagaggagccaaaactcctcattcacctgggctgcaaatggcttgcatgcctatgatgatgccagcagtgtgctttaggaggaagtgttaatgaggaaaggtttttaggcttgaggtgtcatgcttcagtttccagtgtgggcagccgctgacaaaagccgctgtccatggtaggtactgcctctgaatgtgggagaggagggaggcagttggggcctgagaccacagcttgcttctgtccttgtcatggacatgctgaggcagaggtagaggggcatggaggggctagaagtgaacttagccagcagaacctggggaaatggggggcaggccactttgctcaacagcagaggaaacccctttgaaggggatgcatggtggtggctacagctacaaaaggagagcaatcgtttcccagagcgcagggagacagattctatgtgcttcttcccaactgctcttctttgcttcagatctccctgcaacactcctttcttttcccaagtttcctaaaatgacaccatgaatatgtttaattaattagtcaatcaatagccagtgattatcagacagctgctatgttcgtagttagaggaagctgccatgtgcaaactgggggctgacccagaccagtatgtttctgacctcaaacgtgcctcgggcagcatttgacctggtattcccatcccacctctccttacagatgctttctaagtggtttaatccctcctgtaccaagaaagtgatcatgtcatctacagttacatttttcacataaaatcgccctgtctgattttttcttttttactctgagccatttccctctctccgtcaccaccatcccactccaatcctcatgggagacagtgtcacatttaccaattaaaagcacgatatccattctcctttgtctgcaatactgtgaaggcttcattttcacatttctctttggctggaagtgttaacttccagttgcaggaggtgagggtgggtttccctttccctgtctatgaaattcagtatacatttatactcactttctttgccctgcaggtttgcctcttgaatttctcagaagtcagcaaaattctgtgctaggcagagtctaggggagctgttgttgacagcttgggagggcggaaaggacagaaaagggagaatgggggaagaaaataaataaagaggagagcaaaaggaaaaataactctggaggcaaaagggaactgtccaaatggttttggaagcaactcactagctcctgttgtgtgccatgggcttttgttctcaatgtcttgaagtcagtcaccgccttatttattccgttctgcgagcctgatccatgtctaagcagaccccctgcaaagacatccatcatggaaatgaagctgtgttgcaataaaacacaactaaaactgaagggaagaatttaagctatgagacaaggaaaaatattaacatataaatattcagagccttgccctcttccctgcctgagagagctctgggctttttctaagaacataacagaagctgtgtgggggagaacctcaaagctgggctaggtttgtttcagaaagagcagagagtatatatgtaaaagagcagggaatgcggggccaggcccccacctactggttaggaaaacaagaggaggaaggaaggagagagactgcagtagggtagggagaagctgctgtattgggtatgggggaaggagagaaagaatttctagttttctgtgcattacaactggtatgtatcttcagcattttctcaataagctatagtgaagactcgagttacttttaagtattttgaagtgatagattgtactttgaatgtgactccatgctgaggaagagccacatggcagctcatctttgtatgggctacagatatgtcctacatcattgtagacactaagtctgagacaacagctgtcaaggaaagtggagtcagtgggagggggatgttcagacagaaagaaaaagtggaggaaacaagacattcatgatggcataaagaagccaggctcaattttccatcacactatccttgaatattaagctctgtcacttagggagcagtcatgaggcccaaggtgttaatgaaacccagagagccgcaggaccccaaatctgctctccatgaaacaaacctccttcttgtcactaaacgtcagtccgtggtttcctctgtgaccaaagcagcactgctgaccctcataggctaattgggaggtgccatggtagtgagggcaggattcctctgccagagaggccattaaccaccctttgccaggggttagggcctccctctgccctctcccttggcggtttctccagatgtatccaccatcttgaggaccaaaggggacctgtgacagaataatacctgcttagggtttattgaagttattaacaaattaccatcgggaagaattcactttatagccaaaagaagtgctcagttcccaaaagtcaccattcaggataactgaggggagaactgtttgagagttgctaggaaagtaggcaggggaagctcccagccttgaagccacagttccagcttcctggctttgaaagccgcacgcctgagactctatctgggccctctggacaaaaagcctgccactcaggcaggagttgcaaagcaccaggctgaatagagggcttgaccccgaacacgcaggctccaactctcaccacccctgccttccaccccgacctcctcaagtagaaagtaggaattctctcaccctatgagatgtcatttttgtcaaagcagtcatggcaatcctattctgagatctcagcctctaagagtggcccagggagccccaattctccctgaggcccagggtcaagttttggtgcccagtagttaaaattgtgtaaacaccatgatctctgttaaactctacacaacatatatagataaaagattgaaaacataacccctggctactcgagagttaatcttattttctccatcaaataaaacttttctattttctcaattttaagccacaatcatttgtaactttggcaatcacaaaatctctctattattgtgaaaataattaaaagcccttgctctgcccctgattacccaagagtaattaccctctctaagcctttgtcttctcatctgtgaaatgagaaagttgtgtgtgtgacttgcttgctaagatcccattcagcaccaatattctggaaatctgtg

SEQ ID NO: 1882391 - DNA, 4001 bp, Homo sapiens
tagattcaacactacttcaaaattccaaccaagatcacaagatgatttggagggaaatgatacaaaacatttctaaagattatagagaacagtactaatggattttttacaagaaactagagtcctgccagataataaaaacatataaaacaaaaagtaaaaacttaaccctaaatgaaacaattctggacagattactcagaccctaaaagaatttatcatacagtcaaaaaggcatccatcataaagccccgaaaaaggaatgagttatgtaatcaatggtattgatacagcttaacatctagaaaagaacttagatccacgtgatgctgtaaaccaaagtaaattctagatggagtaaatattttaaaaattaaagtttttaaaaaacgaattacaaaggcctgaatgggaaatgaaaagcctcaaaaggcacaaaaatacatgattgtataaagtttctgtatgtataaagaaatgacaaaaaatatagagcccatataaatgtcctcatcataaacggacccaagtcatgaacaattcacaaaaacagtataactaaaaatggcgaggggtatttaacttcactccttttaaaaagttagcaattaactattacagctaatgtattagacaaaatttggcatatattattgataatatgatcatgcagttagcatcattcatacaatgcctggtaaagttcaaaagagctaatgattagagttcttacatgtgccaggacctgttctcagtacattagagatacacaactgaggtagatgctatatttcactttacaggggaggtaataggccaggagaggggaaatagccagaacacagctaggaatagggagccccaggatgctaacaggcgaggcaagcaagtccccagtaaactagtaattgaacatttttcgttctattttaattcgatacaacaccacttggaaaattaatatggcaaagattcgctaactccacttctagtgatttaacccaaaggcatgtgtattgtgggaaagataaaacaactataaggaaataaaagcaaaagcctgaggcttagggatgttaggctcctcgttattagtgatgaaaagtgcttaagactgaagtgggtgagccattcaaagctttgtttcaaatgatcatgaaggccaccgctcccggaaaacctttgcgctacaaaagaacaggacaaaaacgagaaagagaaaaaaccaacacaaactgtaaaagaaattaacactttcaattttagtattttcaactatacacatttttaaaggctcgaaagaacatttaaatacgttttcacctctttcccccaaaaaaaccttaacttttttttcgagacagggtctcgctctgtcgcccaggatggagtgcagtggtgcgatctcggatcactgcaaccttcacttctcgggttcaagcgattctcctgcctcagcatcccgaggagctgggattacaggcaccttacaggcctcccagagtgcttgggactgcaggtgagagccaccgcgcccggcctccttcactttcatttgaactctctttaccaggaactgtgttaagtgccctacctttcttctttatcaaaacgaccctatggtgcactgttatcctattttaccgacgagaaaacttcggccagcgcagcagctagggctcagtcccgaagcctcgcgctctcagtccgagagcaacccgcgggccgtctcctaggaaaccgggctcgccacaccccttggtcgaaccccacttccgctcctgcgcgctgaggctccggcggacctctggtggacatggctgcttcccgcttacccccagcgacgctaacgttaaagcaggtaccggcggttctctgccttccaaagcagcttacctgggtctgagctggattctccatctgtccctatccccaacggggcgggttccggggtcctgatgcggcgtgcgcgccctctgagattggcccgatgcctgcggggcggtgcttcgctccgcggggcctgacgggaggcactggctgcttccttggtttggtgcgatcgcgtgagacagcgtcaggcgcttgatttccctgagtcccggtgcctcagctgcccagtgcccacggtaaaagtctattgcactgagctgtggcaaacagcaaatgagattaccaaagatttgaacaactgttaatttagaaaaagtgctgtcgttgtaataacaacttctaggagaccggcagcccttttcagcccggtaggcagctcctgattttttaatggttcttaggtttgacagagcagtaagcaaaaagatcagatgaacctcgtgatgctttctttaaaacatctttttgagacagggcctcactctcgcccaggctgagtgcagtagcgcaatgaaggcttacctcagcttagacctcctgggctcaagtgatcctcccatcttggcctcccaaagtgctgggattacaggcctgagccactgcatctggccaaaaaaagaaaaaaaaaagtttttctttgcctttttcaaaattgaccaacgagaagtactctggttacagcttggtttgctgaagtagaactttccaggctggcgattgtgcagtagtaattgctatttactcctcccttttacagttcgtaagaaggcaacaagttcttctcctctacagaaggattttgcaaacaattcggcaagttccaaatgattctgatcgcaaatacctgaaagattgggcaagagaagaattcagaagaaacaaaagtgccaccgaagaggtgagaacaaaatcatggtgaggacagatcctaaccctttttattgatcagtgaatttttttttttaagtttagcagacatcttggaatatagtgccactgagctggtatatcttgatcattgcttgtaatgttaccgattttaaattattattttaaaatttagtattttaaaatatgtagataaaagagtatctacactcttcagcatcatcacttgacttttatgttgtacattttatatgtatgtatgtggaactcttttagcttttctaaaaggcagcagttccaataggtagtattggttcttgattttaacagataaaatggtatagctataccttgtttaaccaggtaaaactataaccagatttcactttattctacaggatacaatccggatgatgattactcaaggcaatatgcagctcaaggagttagaaaaaacacttgctttagcaaaatcttaactatagcattattctgaaggattttcaaagtctccatgtgttttgttgcatttaggattaacaatggacaacacaaagcccagtcttactatttatatgtacagtatttggtgatagagagcaaaggaaaaacacatcagaacagttgccttaacactgaaaaacataccctgcattttgaaaatgtttatggatgtctcagcagttcttaaaagaagaaaaaaaccactaacaaatggccagtagatgctggacacaatcattagggaagtgtaaatcaaaactactatgaggtcgggtgtagtggctcatgcttgtaatcccagtactttaggaggctgtggtaggtggatcacttgaggtcaggagttcaagaccagcctggccagcatggtgaaacctcatctctactaaaaatacaaaaattagcttggtgtggtggtgcattgcctgtagtcccagctacttgggaggctgaggcaggagaatcacttgaacccaggaagtggaggttgcagtgagctgaggtcgtgccactgcacttcagcctgggtgacagagtgagacagtctctaaaaaaaaaaaaaaaaaacaaccctgagattcacattcactagaatggctgtaattaaaaagagaaataataataagtcttggtgaagatgtacagaaattacagaaccctcatacattgctggtgggaatgtaaaatggtgtagccacttcagaaaacagacggtc

SEQ ID NO: 1882392 - DNA, 4001 bp, Homo sapiens
gacagaaaccacacagctccattaaatggcatgtggggaaacatgataacataagggagtaatgcaggaaagtgtgtttgggctgggcgtggtggctcacgcctgtaatcccagcactttgggaggccaaggtgggcggattgcttgagctcaggagttggagaccagcctgggcaacgtggggaaaccctgtctctacaaaacatacaaaaatgagctgggcatggtggctgaaacctgtagtcccagccacttaggaggctgaggcaggagaatggcttgagcctgggatatggtggttgcagtgagccaagactgcaccactgcactccagcctgggcggcagaggcagagggagaccctgtctcaaaacaaaaagaaaaagaaaaacaaacaaacaaaaacctttgctgggaagcaggagagtttcctggaaaggaaggcggtaggtttacacctttcctgggtgctcaaattcaaagagatactgtatttctggttttcatctctttgcaattcatttaccttttttttttcctctctgcagaacacaaatccggtcaagttttgggttgtcatgagggagaactgacatagcgctgggcggtgagttcagccaggttatctctgcgaggacaccggtcggcggcggacagcagcacgcggcgtccaggacccggccttcctagagcttaggtcactgtagcctccaggggcgctccgagtccatctggagggccgcgaggcttccaggctggaaggaggaatagggagaaggaggaatagggagacctggggcagtgttacaattacagaaaagggagaggcgaggtccgctgagtccttggcctgggcaacaaggcacactgaaaactgggttccttttcgacccgcatcgtgcgcgccctagaaatgacagccagacggagcagggtctaaggacgctgaaaacccctgacgtgggcgcgccgggtgcgggtagggacgtggaaggactgggctagccacaggaactacagcgctgcggaccgggtgaggggtcccggcccgagtccccacttggggcgcagaggtgtttctgtaaggggacaaagggcactcctcggcgcgatgggcgacttccccagccagaaaatgagagggttagacgaggggaggaacttcctcagccacttggcccggcacagcgaccgccccaagttcagaaccgctaagtcagtccggggcgctccggccccttcgtcccgcgccccgcccgcctccagcccgggccccgccgcccccgtcgcccctgtcgcccgggtcgcccccgccggccctggccccggccccgcacaccggcagggggcgcccgagcgcagctaaaaggctcggcgggaggtcggcggcctcagtggcggagcgcggctgccggtgtgcggccgggagcgatcgccgcggggcaggggcgcggcgggcaccgcgcagagcgcgcagaacagacggacggcggcggggacccgacggcggcgcctcggcactccccagactccggccagcgcccccctgccagccgcaagcacccagccccggcccaccccgggctctcgatggcccccgaggccggggcgaccctgcgcgcgccgcgccggctgtcctgggcggcgctgctgctcttggccgcgctgctccccgtcgcctcctcggcggcggcctcaggtacgcgccgcgcccgggcccccggcgctcctcagctccccgcgcaccctcctgcgctcgggccccgtcgtcccgctcagtgctggctacgggtcgtgtcactagcctgtgcgtcctcgtcactcgcgggtcggggcacttggcgccctgtgtgggtggcgggagcggggacgcctcggtgcccggggaccgcagcgcgctggcgtttaactttgccgtcgcccgccttggagtcgggaggctccagccgtctaagtgtcccgggagattcaggcacagcggggaaaaaaggaaaagaaaggcgactttcagcgtgcggactggggtaatgcctttctttgcccagaatttctcgggagcgtaggtggtcatcctactttctccgcgttcacctctcgcgaggcaggatgacgggcgcactcgggagaccggagggaggcagagcagggctgttctagaaggtcgtgggggaaaggctgcgagctgccgcagggcgtcgggtgcctctgcgctccagaggagaagcgctccagtgccagctcggctccaggcggcaggaggcccgcgcgcccggggggaacgttcaagctgggagaaaatgtttgtcttgagaggagggagagggaaatgagaaagctgattccagagaaactcgcccttccccaatggctgaggctgcagccaggatggatgcttcctttgagagcaatgcttttcagaaaatgctagcgcgctcctgtcagatttcttgcaagcttcctgcagagagagacaagtttgtggcgaggttttcattcctaagcctttggcggcccttgttaccacctcctttgcaggcatttttacacttgaaactggcttttaggttattggtttgtagaaatccaagaagcagacaatgatcgtcagatactattccaacgagggtaccagttttatgatgctatttagtgtatatattgttctcttacttcaggggtaaaggaagaaaagttggggatcacattactttgtgactttttggtagatacatcatcccaatgcttggctcaggtttatgcgaggtattctgatgccaatgccactttctcataaaaggcagtgcctgccgtagggtctttttcttcccattagtgaactctaggaaagtattcactgaatactttgcacagtacttgagaggaataaaactaaataaagtcttccaacttccccacctacaactcctggcttttgtttttctaagtgaaaattttcagagtgctggaagagtttttgtttctgaaaatgatctgaaactggaaccagtgctgccctggctttgtggcgattccagccttctgcttttccgattcctctgccacctgcccgtgggttgcatgtgagtgggtccgagcggggttgtttgtgagagctcctggaatcccaccgcgatctgcactcttgctttttcgccttctgctctgtgaatcactgtgctgaggaatgctggggctggacagcttcccagcccttctctctactgtgttgacgtgggatctacagtcaaatgatgaccagactagaggtggacaaaggaggacaggcacatttcagaatgaaatctactaaatttaaattaagtaatagaaggatagaaacagacatagcaacctgtagatagctccccatgctgtggatgaaattatggggtacataacttctttcatgggctccctttgacagcaacgtcatggatagactgctccctctctctggttgaactaatgcatggaccaagcgagctgcttgtgtcaagctctccccttcaccacccttttggggccagaatctctgtaaggaaattacccacggccacataatagtggctccgagggactttgcttaaagcaggacacactgaagatctggataagcccttcagtgtagggtcaattaaacataaaacaaaataagcaagcagtgtcccctcctccactcatattcatccctacaataggatactatgcaaacattaaaattatgatggccttgccagtctggtatgatacatttttctaaacacatgtggatgtactcacacatgcacatatttgcagtgggtatcttaggatggttagggatgatttttattttcttctttaaagaagcttttagggaattttccatgtcaaaactattttcaaagtaatactaagattactaagatgctattttcctttttcacagttgacatttgcactgagggtgcaaaagcttgatgggtaaactgcgggtgtcttactgagaatcaaggcagggac

SEQ ID NO: 1882393 - DNA, 4001 bp, Homo sapiens
tgtctaatttgtaagacctcttgtaataactcaatagctgcctcaagggttgagaaacactgttaagtctttattttagaaacgtcacaataagtctaaaggaggtcataatatattaatagataattatactttttcagattaatttgtgtttctgagcaagatccttggtaattataacagcagtcataagaacagatattttcaatgaaattttaattgctaatagaagcaaggatatggaaagcataagagtaagtctctgatttgagtttttttcatgaaagtcattaacctctgatgtggtttggctttgtgcccccacccaaatctcatctcgaattgtaaactccacatgtcgagggaggaacctggtgggaggtgattggatcatgggggtggttttccccatgctattcttctgatagtgagtgaattctccttggccttccaccatgattataagtttcctgaggcctccccagccatgcagaaatgtgagtcaattaaacctctttcatttataaattacccagcctcagatgtttctttatagtaatgtgaaaacggactaatacaacctcactgtgtttctgatgtttcaatatagtatcactgtcttacacatttgttatggggataaatatttgacaggctaggtcaagttagaattttattgctgctgaccaaaggtcattgtaagatttaaaggtcacatagtaggtactatgtgatctttaaaaagttataaaacatgaattttaaagatatattttatgagtaaaaacgcttcacatttctggagctaatatcaatgtaatccaggtattcacatataattttaactgatatgtctaaaacattccttgttctgtgtccctctgaaagcaattttcttttaattctggatttcttaaactttaaagaaagattcctaaatttgaaaactactattttatgttaaataaactagttatcctaagaatgaaaaatttactgaaataccttaactgaaataaggtttgttgtcacataaaccttaaaaatgactatttgtgaatctaaattaacaaaaggagccagcaattgagaagaactcttaggaatagcagtcacagtgtgacagacacacacatacatatagataagggatttcctcatttatctcttcttcaaattttggctttaatcttaaattattctcagtatctttttttaaataaggacctcttattgttatttatatggacagattttaatatgtttgcatttgatgatactgtaaaaaacagaactgttgccagagttttaaaagtaaagggaattttttaaatgtacaactattagatatcaattttaaaactaccaaaaaactcagaatagccaattaaaccctaaatgatttctagtgaaatgagggaaaacacaagcacccggaagcctatcttgtctattataatagtcataaaatttctgaaatgtaaataatcactgcaatgctaataagagaaaaatagtattttatttacagaatacataaagttgtagaatacataaatttatagaaacttacatactccttcacctacagagtcagtgttaaacagccgaccctcggtgcagctgccctccctctatcctaggcacagccactcatcatctggtcattgttccttagcaggacagccctctcaaggaagttaacacagggcagattcaaaaggtcagaattaaaattcaatgcatgcctactgaatacctacctattgtgtgcccagcactcttctaggcaatgacaagctccctaaaaaaaagaacttaagaaactgtaatgaataaatgatgaggctacaaaaaaatcaaacagggtgatagacaatagtaggacggcctcacagaactgaaattgagatgaaaggacttgccagtgagaggtctggagaggagaacggtgtgcagtggactgaatcgtgccccaccgctcccctccaattcattatgttgggcaaatcccagcgtgaccgtatttggagatggggcctgtatggaggtaataaacgtgaagtgagatcataatggtggggccttaacccagtaggcccattgtctttataagaagagaaagaccagcgatctctccgcatgcacacagaggaagggccctgtgaggacattttgagaaggtgactgtctacaagccaggaagcgatctctccctccacagaactcgaatatgctgacaccctgatctccaacttccagcctccagaactgtgggaaaatacatgtgtgtttttcaagccaccttgtccatggtattttgttaaggcagcctgggctaagacagtgcgttcgaagagtccctaaggaggaactgctgcgggacttttccttagttcggctgaagacagggttttttgtcccatggccacgaaaattcatgctcacagacaatttgaatttgaatgagtaagacagggttttgttgggtgaaaaaggaagaaaaaggggaaacagggactctcgctaagccagagtccctgctagggtgcttcccaccagccatcctcatcccattttggggcttcccaccagccattcgcatcccagtttccacacaggaagaggaggggccaggctactccctgcggcaaatggtgtgaacctgtgtggctcctcccagtgggcaggaaagatggagagggtggaccttctccaaggaccgcctcccccctggctgtctcagaaccagcgaggtcaggccaggccagggattggagggagggaattagggtgacctgccagtgttgggggtacaacttcaccaggtcaattgtgctgtgctgaggagaacagaaaggagattcaaggattagacacaaagaaagtcactggtgaccttgataaaagcaacttcagtgaaatggtgagggagtgggttaaagagggaacgggaatgaggaagcaaggacagtgatgataaagaattctcttgaaaaactttactatgaagaataatgtggaaatggagcggggaccggggacagtgtggaaatggagccgtgactggggatagtgtggaaatggagcagtggcttttcagaaaaagtacttaaagagaagtcagatatattattaagacacacacatgcacacatatccaggtgtgcacacacacatgcacacacacacgcacacacacgcacacatatacacacatgcactcacatatatacacacgtgcacacacacgcaaacaagcgcctgaggataaacgtaatataagagggattaccaaagcctaggccaaattcatccactgaaaacaaaattattataataaaaaggaaccctggaagatatgtaaaaggaatttacatacaaaaaatcatcctgtaggaagtagaactgtatctactgtgttaaaaaagtttgtgtctcaaaatataatggcaaattgttattctattattttgttgttatttgttttttattgttttattttttctttggcatttttatcattgtaaaatacacataaaacttaccatttttaccatttttaagtgtacacttcagtggcagtaagtactctcatacagtgtgaccatgaccaccatctagttccagaactttttcatcaccccacatggaaaccccatgcccaataagcagccacttcccagaatcctttcccccagctcttaagcagccactttctgtctcttggatttgtctattccgaacgtttcatagaaatggaatcgtacagtatgtggtcttttgtgactgtcctccttcgcttaggaaaatgttttcaaggttcattcatgttgtgtcatgtatcagatgctccacatcctacttgttaggaaaatgaaaatctaaaccacaggaaataccatttcacacacattagcatggccacaatgaagactacagaaaataacaagtgttgacgagaatgtggagtgactggagccctcatacatggctggtgg

SEQ ID NO: 1882394 - DNA, 4001 bp, Homo sapiens
ggggtatttatcaactcgatgattaaactgggactgaatgtggtgaaacatagctttctttcctaagatgttaattgtacgtttgtgtgcaattaacttacaccacgtaattagcctctgtgatactgaggttgtgtatggaaatgtcttttctctatgaagatgaaacttcttgtgtattatttgtgtcttccctattaggaggggatattgttctatatgtgagagtgttattcacacatcacccgtccacccatcctcccatccatccatccattaaaaaacattcatttgtgtttttacaacagacacctaaagagattctgtgagagagaaacagataagccagcttctcaagtgactaaattttggtaatttttaagcgtctattatatgaaaacttgatttgaatttcagaaggagcagcggatcagtttttaaatgtgataatgtgcgtgcatttgatttcactgtttttcaacaaaacattccgatatgagaaagtatctaaggaatcagaaataagagctaatgagaacatttccatgaaaatacattctgtctgtttatttcctctctggttgactaccagcaattctctgtttctattttccttcatttcactgtaggtgtccttcaacatgtgctaacactcttcactaaatgtacaataaaggttagaactatttctgcaaagatgtcctgcaaggtaaacaatgcagcactctttcaggagctcctacaattggacctttaaagaaatttgtgtagccacaaggtccctgagggtttaggcaaacccctgagaagagagaggagagaggtggccctcttcatattttccttgtgatttcagcaggcggatcatcagttgtttatagcttcctctctttttcattctattttaaaaaggtggaaaaggtctgattggcgtaaaagatagacagaggtgaggttttcatgaaaaataggattccctggggagaggacagaacatcatccctttcagtatgcagtgaccacatttcaagcaagtttcttctgtccctggagcttaagggcgtagattcctgggtgcttagaccataaacagccttcaaggcacttaaaaaatctgcattttgtgggtgttggcaaaatgcactcttctctggctttctcatccgccatctgttctttgtgtctgagcttccctttgaacatttgccttggcttgtaaatacttcgagttacttcacttcgggtttcaagtggattccattttgccaaatgcacttgcggttggttaggcaattcctaagacattttcatttctgttaaccagacttggcttttctaggtaaaacaccaaaatgcagattttgtttttgtttttgagacaagagtctcactctgtcgcccaggctggagtgcagtggcaccatctcgactcactgcgacctctgcctcccgggttcaagcgattcttctgcctcagcctcctgagtagccaaaatgcagattttagggagcttaagactcccccaggacctggcgattctgatgactacaagagcagaggccaccttttctgtctccttttgtgatctcctccaagccacgctgctcttagctcctactctcaaatctcagagagcccatgagagccacgttgggcctcccctcgcggagagaagggctcttaagtggcctccaaccctgctttcctccttcacctcctcagggtcgagccaaggcgcaggaccttgaggggtgtctccggtccctacccagcattttcagggccggctgccctgggtgctggtacctgagaaaattcattgtttcagggtctgtgtttggagaaacccccgaccctaggctggcttgggctgcttgaagggacccccctcatgtgctccgtcagtgatggggaccccagggtctcaccgtccctgtggaatccccgcctacgcatttcctccaggagtcttcccccagggatggagggcctcatgagggttttgccacaactgtgacttccaaaaacaaacttgctaagtccctttgtgacgaggaaggaacacgatttccttattgtgtaagacaagcagaagtaagtctacaatggtgctgagctgcagttagaaacacggcgttcgcccctcctcaggtgacctggcaactgtctctgtgccggagccccagcttctcatttccaggccgcacagcctcgtcccccttagctgtctttccttgttctctctgccctgccatagcagccccctcgcacctcggagccctgggcgtgcttccagcccagggcctttgcacctgcgccccttatctggaaccccttccccagatgccccccgctaacctctcaattcctggggtctttgcagaaaaggctcagactgcgtggcacctgcagctcatccatgccacctccacactctccccagcctgcagtgccttctgctgcctcactttcctttcttagcacttatcaccatctaacgtaattcacattttatttatttatcttctttagtgtttatttctacttgtatatccccagtctagactaggtcctggcatttaagaaacatttgatgaagtaatgaaaagattagggggttttctagggaatcttaatttccttggcaatgcttttcattttattttattacatgcagtttctgaatgacgaaggtgacctcaccttgttgtcatcttcagaatcatgagcataagataaattaaggctgtttaaagacatagtcaaacctagcgttcaagaccttctgtcctgtggccatggaacaactctcccagctccgctgcggcggctggtgggcagggggtggggggggggcagttcctccaaccacccctaggagttcctgcatttcccactcagtctctgcctctactgtccccattcccatctctacctgcctaggtctccccttcagccgctctgaccccacttcttccacacaccctcccgggtggatccagtggtgaaatccttgctcttctctgaagttccctcagacacaactgagtctttgaacaggacatgagcactggctcggtggacttcaccgttctccttccacagccacccaggctggccgtctgcagccaggcacgcgcccctgggctcagcctggcagctgggactcctctgtcccaagcacccgtacttcttatggttggccaggtgaaagcccctctcacctcgtcaatccacattattttacgttcgttcagctttccctaagcagcgtcctccctctttctacccacacacactcttcatcgtcagccctgatcatcagcttctagatttaaaacttctcagggacgaggattcttcagactggatcccactcccgagatgcgtcacggtgatgatcacttgggtggaaagggggttactgggacccccaccgctggttccaatgcatgcattgatcagctccaaggagggagacgatctcctccccaaccccagtctgatgcttttgttcacatgacatgttttctgagcacagctcatgcccaaagtaggaggatgtggtcaccctactgtgctggaaacaggacaagttttctgactgtggtcattgcatccgaaagagaatgctcagtacagcaccatctacaggcgtatttgtgagaacgtgtgactttcaaagataatcgctgaaagttcacttccttttcattttatttttttgtgggggagggatgtgtcgggttaaaaggtccatttcaaggccgggcgcggtggctcacgcctgtaatcccagcactttgggaggccgaggcgggcggatcacgaggtcaggagatcgagaccatcctggctaacacggtgaaacccggtctctactaaaaatacaaaaaaattagctgggcctggtggcgggggcctgtagtcccagctactcaggaggctgaggcaggagaatggcgtgaacccgggaggcggagcttgcagtgagccgaga

SEQ ID NO: 1882395 - DNA, 4001 bp, Homo sapiens
ggtgtgtgtataaagctgtagcatctcaacctcttcattataaaaaataccacctcttcatttaagaactaatcttttcttcaaaatcagaaaaataataggcaaatctgtctcactgtgcagaaagttgtagaatctattaagaccacccccactcacttcttttttcataaattcatccaaccctgggattaactaagtctttctcaccatcttacaaagccaggaaatgtcagcttttgcccaaagtgaagctcagctgagacaggaccatcccagtaatggaagcgtttgcacgtatggttggaatagacaggccatcccagtaatggaagcgtttgcatgtacgttcggaatagatgggaccatcccagtaatggaagcattcgcacgtatggttggaatagacaggccatcccagtaatggaagcgttcacatgtatgtttggaatagactggaccatcccagtaatggaagtgttcacatgtatggtcggaatagaaagggtagtttacaaacactgaaaaggtgcctgtgttgtgttcatatgagtgagaatgaaaaagaaaacctccgatggtgcagcaggtgccccccccttccccacgagagccttgtgcttccaggaatcccccttcccactgaaggtgaaaagagggcctcgtgcttccaggaatccctcttcccactgagagttaaacgagggcctcgtgcttccaggaatgccccttcccactgagggtgaaacgagggccttgtgcttccaggaatccctcttcccactgagggtgaaacaagggccttgtgcttccaggaatgccccttcccactgagggtgaaacaataagggccctgtgcttccaggaagcccccttcccactgagggtgaaacaagggccctgtgcttccaggaacctcaccttcagctacagaaaaggggccctctccatgacagtggttacatgttcatcttcatttccaaaggctcaggtcaagggctcagattcagaagattaaaaatctacccaaagcattaattattcacagcaaaactggtataggaggtggggtgggggacagagtgagtattttgtggaatctttaaagagtttgatttctttccttagtgccattgtttgctgctatgcactgtttcttgttgggatggagaggaaggctaggcagagagagggacagagagaggatggagaggaaggctgggcagagagagagagagaggaaggagaggaaggctgggcagagagagggagagagagaggaaggagaggaaggctgggcagagagagggagagagagaggatggagaggaaggctgggcagagagagggagagagagagaattgtttcttgatgagaactgctgcacacgcaggcaaaggggaaaaaggtgcctgtgttgcacattctcagaggagtctgcatgtttgatcataaataaaagattttttctttcgtctccttacctaagccgaacttgcttctcttctcctttttatttttgtttatgtatttgtttctcaagagcgcagctttctttgtgatcctcagggtttcttttatgtttcttgggattcgcattttccagacctggtgctgctgggagacctcaggttggggcagtggctgggccacccaggctgcctctgccctctgctctgcgttgggcagcctcacggagctggatcctgggacccagctgtgagcgctcagcgcagtgctcaactctcactgggccgaggtagctgggaaggcatgagtgataggcacaagcccacgcttgcaggccttgtcggggtggtggccctgagctccacatggagggtgtcctccaagccactcaccatgtgagagccctgagggtgggacagccgtggcctcctgcttgccggtcacagagccacacacacactccaaggcagggttcctggaagccgaggcctgcacaggaacccagggggatgctggggttgaagaggaacgacgagggcttggtgggtgaagggcgaaggcctgagagaagaggaaggtctcaccataattagaataattagaatgctgactccacaattagaatgctgactccagagcccaaggaagtgaacttagccctggccctgtttttgagcaggctctgtggaatatcacccaaaggccacggttcttcagcagaacatgtttgggacctgcttgttgaagaaacatggaatccgaggaatggaaagctggcctgagaactgatgtatcgatgctgtaaccccacatgtatgtggtggatttgtgtttggtttttgtcttccacaaaacctcacatactcctcaggaagttaccttgggaacaagtggccatggctgttgggggagagccaggcttcctgcagaactgcccctttttaacatgtgtatacactggagttccacacagggtctccttggcagaagccaagcaatgacagccacctgcccaggcctcatttcacagtgggagacccgggacccggtacaagcagggacttggtgtcctcctgaaacccccatggttgcatcaccacactgagggcctggcctgggtgctgcactgtgggggcccagcctggagccctctggctgctgccctctccatggggcacaggctccacagggcagagggactgaccacccacccagccccatgcccactctctaggccaagccaatgcccagacctggaattcctgccccatgtcttgggctggcagggtctgtaccagcctacccctgctcagacagccaaggcccacccgtgctgccagtgtgcaccccaagtctcaacaggaggctctggtagaggggtgcttggaagtgagagtgggggtgttgacgtgcacgcatgcattcgagaccccctgcaggatcactggagggagggggaaactgaacccagaaacggacaacagtgccatgtgcaaagacggaactctgacccacagcccaggatgccaagcgggaacccctgtgacaacagacccaagacggccgggacttgatgaatagctgacagctgcctaggttttgtccctgcttccaactcaggaccaaacagagaaagccaagtgtgcaccccacactgcagggtgccctgattccagttccctgcctccatcttccccagccagctgcctccatagggtgcacctggcaccttctgcttttgcaccgtgaggctcccctcctctggccgcctttgaggctgtcaaacctgggtgatggtggccaacgcccctgctagttcaatgcagacactttgcatgcccccatttctacaggaggaaaggggcagaatgcaagctgaggggctgctgtttgtaatctgggtctgcagatattggggaaaccctgagaggcggcaagaccccttggttttctcactgggacacttctcatttaaattaggccgaattcctgagaaattaaaaagatacttactgattttccaaatatctccttttcagaccaccagctgagatgaggaatgactgtgctctttctaattagatgagggatgcttccctaggcccgctgacctgatccctgcccatctcctccaccagcacctgcccgactccagacgctacgggaagcttctctgggtgaccctccccaggcccaagggctccccttgctgatgtcatgtttccagttcgtcagccacacagactccggaggaaggtgccaggtatgggaaagtgaacaggtcaggccctgtttaaaactctccaagacatccctgacaaagcccaacccctcaggtggctcaggccctgtgacctgagtggatgtgattcagctcaccaagtctgtctcacattcattcccctgctttagctgaccttgtttccatctcttggacgctcctctcttctattgcaggtttgtatagacattggaacatcctcccccacacaccctctttatccagctgattctagtcattctcaggtct

SEQ ID NO: 1882396 - DNA, 4001 bp, Homo sapiens
ttactacagtaaccaaaacagcatggtactggtaccaaaacagatatatagaccaatggagcagaatagagcccttggaaataataccacacatctacaaccatctgatctttgacaaacttgacaaaagcaaaaagtggggaaaggattccctatttaataaatggtgctgggaaaactggctagccatatgtagaaacctgaaactggatcccttccttacaccttacacaaaaattaattcaagatggattaaagacttacatgttagacctaaaaccataaaaaccctagaagaaaacctaggcaataccattcaggacacagtcatgggcaaggacttcatgactaaaacaccaaaagaaatcacaacaaaagccaaaattgacaaatgggatctaattaaactaaagagcttctgcacagcaaaagaaactactatcagagtgaataggcaacctacagaatggaagaaaacttttgcaatctacctatctcacaaaggactaatgtccagaatctacaaagaacttaaacaaatttacaagaaaaaaatcaaacaaccccatcaaaaagtgggcaaaggatatgaacagacacttctcaaaagaagacatttatgcagccaacagacacatgaaaaaatgctcaccatcactggccatcagagaaatgcaaatcaaaaccacagtgagatgccatctcacagcagctagaatggcgatcattaaaaagtcaggaaacaacaggtgctggagaggatgtggagaaataggaacgcttttacactgttggtgggactgtaaactagttcaaccattgtggaagacagtgtggcaattgctcaaggatctagaactagaaataccatttgacccagtcatcccattactgggtatatacccaaaggattataaatcatgctgctctaaagacacatgcatatgtatgtttactgcagcactattcacaacagtaaagacttggaaccaacccaaatgtccatcagtgatagactggattaagaaaatgtggcacatatacaccatggaatactatgcagccataaaaaggatgagttcatgtcctttgtagggacatggatgaagctagaaaccatcattctgagcaaactgtcacaaggacagaaaaccaaacaccacatgttctcactcataggtgggaattgaacaatgagaacacttggacacagggtggggaatatcacacactggggcctgtcgtggagtggggggagggaggagggatagcattaagagaaatacctaatgtaaatgacgagttaatgggtgcagcacaccaacatggcacatgtatacatatgtaacaaacctgcatgttgtgcacatgtaccctagaacttaaactataataaaaaaattaaaaataaaataaaataaaatgatagattaaaaaaaaacctgaatgcctttaaaagcacccaagtcacctcttgaatgctttgctgcttagaaatttcttctcctagataccctacatcagctctctcaagttcaaagttccagaaatctctcaggcaggagcaaaatgccaccagtctctttgctaaaacataacaaaggtcacctttgctccagttcccaacaagttcctcatctccatctgagaccacctcagcctggatttcactgtccatatcattatcagtatttttgtcaaagccattcaacaagtctccaggaagttccaaattgtcccgcatttttctgtcttcgtctgagccctcccaactgttccaacttctgcctgttacccagttccaaagtcacttacacattttcgagtatcttttcagcaacgccccactctgctggttccaatttactgtattagtctgttttcatgttgctgataaaaatataccctagactgggaagaaaaagaggtttaattggacttacagttccacatggctggggaggccacagaatcatgatgagaggtgaaaggcacttcttatgtggcggcggcaagagaaaatgaggaagatgcaaatgtagaaacccttcataaaaccatcagctcttgtgagacttgttcactaccagaagaacggtatgggggaaaccacccccatgatggaattatctcccactgggtccctcccacaacacttgggaattatgggaatacaatttaagatgagatttggatggggacacagagccaaaccacatcagggccaaaactattttaaaagctattgtttgttgtcagtcttacaaagtggctttgtaaagtctatggaaacagtgaaaaggaattttgaattttattgaaaaaaggttggtagtgatttttaacttgtgcctgcaagatggaaagcccttccttcatagcagcaaatcaggggagataaaagcagcatcgctgctctcccgagttccctctgcctacaccgaggtttaggtccctctcccagatctaagggccttgatgctaacagacctgtcatctaaaacaggaatgggctctgcagcgtttagacaaattccaaagagcaactccttgcagaggatctttgaattctgtctctagtcagtggccacagatggtgtttctcactagattaacctccagctgacgagtccgtaggttggtgtcttgtgttccgtggcttcagtgagatgtggggtggatcacgctgaggaagagcccagatgtgaaggcagcctgcctgccatcctgcaccgcctcgcaagtcctgtgagtctgggtgaatgctgagcctcaccgggcatcccaggtagatgggtgcaccctctttaatcacctactgtatttgatgataatacctgatgaagttaacagaaactactgatgacataaaataatatgtgtggaagtgatgaaaattatttctatgtggctaacaaatattcctgatattgacgttcctgtccgtgacactcacctataagaacttccccctcccagcaacccgatccaaaccacagagggtaaaaacatgccatttgggaaatgagtgttttaaggcgagcttatcttttccacctttccagaggagatgtgccgagatgatcacgctattacaatggtgtatgatgagaaacaagagagcccttgtccaaggcttctagttatgaggacatctgaaaaggcactgtttatcttatctgttatcccatcaaaataaaattaataaagaatgcgtataatatggatgaataaacattaactttctacaagagaattttacataattggcttgaaaggctccatcctgggacatgctattgatgacattttctttcatctaaacccagctctgaatttctcctgatggtacactttttatttactgctacaatgagaaaaagttttatcgtgctacaatcagcaaaatttggcattcatgatcttctatattgtcttattaactcttcctattaattaataccaggcaaatttacgttctggaagatctttcttcatcgaaggccagttgttaaacgtggaggcggcctttcagacggcattctgtctttctgtttagtccacatcacatttctggagcacatgcctcaggcaataaagttttctctatgcttcataaatatctccatgtgtgttaatttatgcattaattttatgtgtctatcttgtgtattaattttattttctcaggaaagtttcccgggattcacaggaaactgacaaggaaaggtttcacagagaatcggagaaaagctgaaatatcccattgatctcattcgccatccttatatttttcaagctataaactgtaacttcttcttaacaaatgctaagaggcaaatgctccctggaaacagggtgggatcctgtgtaactgtggcccagatttctcctgtggagaccagcccttaatattgctctgaagacattacataagtggttttcaagcttccagaattaatagttctgggatatcattcaacagaaacagcttctaacca

SEQ ID NO: 1882397 - DNA, 4001 bp, Homo sapiens
atagcacaacctccgtgtactcactgaggattcagtgtctagagtgacagagacattgatcatgttccagccccctgactgcaccaagggtgagagaaagcatctgccccttggtattatttccctctgagacaaatcccactagggaaagatgattcttgaaagcaagtcatggtgcttttagagaaggggatgggatgctctgcagccaacatcaataaatgcccagccagtggtcattagatggtgttacaaagaagaaggccttgaataatactgaaccaggctacgtgtaggctgtgggctttatagtcattaatcctcacaataatcttaaaaggaggatgatattatccccgtcatccagacaaggaggcagaacctcagatacattaagtaacttgccagaatccacgtggaaagtgatgaagctggcttctaagttaaagtctatggggttccagagtccttacttgtcccacataaccaggcttccaagaagggcctcaagggaatggaaccacattcttgctttgatgaagtcaaataaattaaaaagagtttattaagggaaagagacagagactgaagtaaagggttcacctgatcttctcccaaggaagaatgtgcctgagtcatatctgactggcttgacccagaaagaagagggtagtcacaggcagaaaggaaggacaacacaggcacacagagacgggcggtctccagaactcaaaacttcccaagggtttacaccctgtgtactgaacatggtccgcttctgccacctagccacagatggtctcctcagccacagcacaagaagcccaactgtggtgaaagcctgtgggtgggtatgcagcaagcacaagccacatgtaaaggctttcctggtaaatttccaagatgaccaatgccactgagtcctcttctctgtcatgtgccttcttcatatttatccgagattcccagggacaggatggccagctcctcctttagattagggagggtgggtccttccccacccccatctatactctctgccccactaaagaacttttctataatcccatcttcaccatactcagcatttgccaaatattattcttcattttctaattgtgtcttttctagtttgtttggaaatgaaatctggtttcacctgaaggttgagagctaatatgaagcatattcctgcccttgggctaatatctttatgacatcatgacactaaccagctagaactgacttagtttttgttggccagaagccataacatctctgccaacaagaaactagcataggctggattaaagtcagcatgagaaagattacctgaagataagaaaataaatgaaggcccaccatgcttctaagcacatagtaaatagtcaaatatgtgcagaggagatgcataaacatatctgtgcaaggctttcaaaaggatcaggaagacaggtctcacaaaaaaagcatttccaggctttgtattttacagaccaatatttttgtgttttgttttttattttggggaggaaaatccacacaggattattatctttttactttaccaagtagagacattttaataaagctttaccatcctttcataagataatagacctgttaacacaagccaagtatgaagtataatcacagaataaaggacagtctttccagggaaaaatcatcggcacactggatacgggtctttgttttacactatatagtccctctctggctagtttaagcacaaacaatatattatggagcccagatagatagttcacaaatcactggaaaggctgtagggatatactccaagttgaattccatattaacaccccaaactatgccacgtaacttaccactgagggagctgctgccacagccgctgaccactctagctcctcaaaatgagcaccagctctgtgccctgttcagctccctccattattccaaattacccctccatattccaaatcaaagtcctgcatgagtcccagctgattggctgaacctaagcatatctagatccccatctgccaaggagtctgggaaacgtagttttagttttcagcctctgcagtacagggaggcacaggggctggagaaggcatggagtgaaccagttagccactgttggtgagctttttgtcagaccacagcacttctaaaacatgtcaaggtctaagcctgggttacagaatcacatttgggtgtactggcatgagagccatcctaaggaatgtgtgcagtcacgctttattgagaagattctgaaggtcagtggtcttacacaggcaccttatcaaggttctgacagatatggtgtctagtgagggccctcttcctggttctcagaccaccatcttctcattgtgtgcgcccatgtgataaaaagcagacagaaaggaagcaagctctcctgtgtctcttcttataagggtgctaatgccattcatgagggctccaccttcatgacctaattacctcctaaaggccccacttcctaataccatcttattgagggttaggattttaacatatgaattttaggggcatagaaacattcaatccatagtacatcctcagtctactctgctgccagaaccttgatatggcacctactgagtgaatggctgttcttaagaagggaatttgctgcctgaggctacagcatgaccacactctgactgtagtagacatctgtcatatttgtggcttctcatcaacttttgagtagctttcccgtatctggggatattctcatgtaataagtctcatctccctaatattgaagtcagagatcgagtcagagttcagagcgttcaggtgtctttgcagctaagattcagggatgtggtctgagctctcacaacccaaggcctccactagagatttgattcagaagtgagtagcataaagagcaggcagtgcacggagcttctgtttttgctggcatggaaggcagcagaggccttagctttcagaagtggtggtgaggggccgggcacagtggctcacgcctgtattcccagcactttgggaggccgacgggggccaatcacgaggtcaagagagcaagaccatcctggccaacatggtgaaaccccgtctctactaaaaatacaaaaagaaattagccaggcgtggtggcgggcacctgtagtcccagctactcagaaggctgaggtagcagaatggcgtgaacccgggaggtggagcttgcagtgagccgagatcgcaccactgcactccagcctgggtgacagagcaagactccatctcaaaaaaaaaaaaaaaaaatgtggtggtgaggtctggttcctgcctcagaagtagcatcagtggtggtggcaagagtggctgcaataaagtcaagttcctggtgtccagtgctcagtagcagcagccatagtaataccagtttccctccatgatctagccctacagcacagtttagggcattgttcttggaaactttaccccaaatctatttctccaccctccaaatgattgtttgtccttcagtttcctttattaaatcccatctgcctcaactagccagagtgaatcctgttgtcagcaaccaacaacccacttgatgtgctagataagccaggaacactgaccctgaatctactgcctctacaccaggctgcagtgtgaaccatttctgcaacagagagtatcggcctgaacctcatctcccattgccttcttgagtcaggtacaaagaaggatgggaggaaagcgtacttccttctgactcccagctttccaggagctcctacagaacaagaatgtttcttcttcactggattgttatcaccaacaatttgtgcagggcttagcacagagtaggtattcagcaaatgtttgacgaattaataaataagtgaatggtaaaaacactataaagttatacccagctggattcctaacccagatctgtgctgtccattaacagtacccactagccacacatggccactaaacaa

SEQ ID NO: 1882398 - DNA, 4001 bp, Homo sapiens
ctcatgggtgaaatttagcccctgtcctcaggaagctcccagtctgacgggggacacatatagtgctctcagagctgccttctttagggtgaaactcagtatctgggcttcaggaaactcccagtgtaaggggagagacacgaccctgcccttagggatctctcaaatgaggcatacccactggactttcgggaaccatcaatctgtttccagacatggattagagatttcaatgcctcaagggctgccaggaaaaaaaatacaagacgtccaattaaattgaatatcagataaacaacgaataatattttagcataagtctgtcccatacaatatttgggacagacttacactatttaaagtatccagtttaactggaagtcttgtgtttttatttgccagatctggtaaccctaggtgcctccagtttgagggaggagagaggacaccccctccaccccagacataggaaagcaggtaaacacctcagcgtgctccggagggcaggggtggggcaggaggagagtcctggggctccggctcgcggcagtttaaaattccttccaggccagagccctaatccctcggtgcacaatggccgccttctcccccgccgcccgcgcccacgccctcccccgcggggccgtggcagtgccaccaagggcctctttaagcccctttgaagccgcggagccccgcgccgcaggaggccccgccgctatgccagctatgccagctatgtccctgctgccgccggccgccaccgctcccccattaatgctggctaatctggctaataaataaactcccctcccagccccagccccgcgccgactcctccccgcccccgcagaatcgatgtcagggctcgactagagcaagcgcccgcactccaccccactccctcgagatgtagctgacgttttttcttatggctgccctaggtctgtagcccgtcggggattctcggggagacgtgggatttgggaggtctccgcctagccactgcgtttgccttcctcttttccagtccacctgcgcaccaggggcaggacacgtggctgggtgcagacgctggcccggatgtcgcggaggactcgcgggccggtagagcgcgcggcggcggcggcggcggcggcggcgggaggagacgcaggtcacgcccccttcccaccacctcccgccgccgacggggcgcgcgcgccgaggagcccgggacaggtgactcctagaggactgcgtctgcgcctcccccggcgggagtcccttcttcgcggcctctgccgccccctgcgtcccctcctgggcttccgagagtctgactcagccaagccggcatcgcttcgcctcctacaacacaccccgagcgcgagaagaaattacaggattgcaggggcacggctaatgcgctctaattacccaccgccgctgtcatccgcggcgctccgcggcgctgggccaacgcgccgtaattaagacgccgctccccggtcccggaaccctcccttcgccaccctccacccacccacctcgcggtccccaggaccactggctgccaactcctgccgccctctgggactgcccctcagtcccaggagagctatgaggcctcactgggggcagaacttggggagaccgaagccggcccttccactcccctaaacctacagtcctggaaggtctctgctggaagagactgggagagtggggaggggccagggacctatttcgttgacagaaacagtgaggtctattggaaagttagccttcagtgggaggagtggcaaaggcacgcagggcagcagtacccccgtttggcacttgaggcacggagaagggaagggaagtccgcccagccagaactcccagacccgctcgtttaacagtggctttatgagcagcacgacggactccctcccctggcggggaaattaccttcctgcgaagaaaggtgacatccccgccacagacacggaggccccgcctgctggccagctgtggccgccataggggagctggtgaggagtgaggtggctctggcctcccatgtcaggtagggtgagagaggccctgaagatagaagccaggcccgaaggccagaattaaaggggtagcttggccatcagctccttcccccaaaaccaggctcagagctctcctctatcagcaattctttcctgaggtccagggtgttgcaaactcatggccttgggccacgttttaccttcagtgaggttttgtttggcttgcaatgagtacatgggttttaggttgaatgtgagagtctgcagacaatgtgggttctccgactgccctcccagtgaaggtggacctctgatttagaccggcccgctgggcccgtgcctacatccttttcctcagcgtcaggatcttagtccccatgattgctgcccctttgtggtctgcatgtttcttggtaagggtgcccagtcaagtgtctctgggagccccctcttctctgtcatcgtcaggctccccacttgcagtggccgtggtggctgcacatgctcccggatacccctccagcactcccttttgtcatcttgagtttcagtccgtgacttgggtggcaccctatcttctccatcagggatggtagctatttttctgccatgagactagaggttgcttgagaacaggaaattggatctctcccttcaggctgggatttcactaagggctggagaaggggggaatatgggaggattatctcctatcacagggagcgctctgagggcaaggctgtgtctccgattcagactgacggttccctgaggatggggctgtttctcccctccgactggggctccctgaggatggggctgtttctcccctccgactggggctccctgaggacagggctgtgtctcccctcagcctggggctccctgagtcagggctgtgtctcccctcagactggggctccctgaggacggggctgtgtctgcctcagactgggaatccctgaagatggggccgtgtctccctcaaagtggggctccctcaggacagcgttgtgtctcccctcagactgcggctccctgaggacggggctgtgtctccctcagactggggctccctgaagaaagggctgcttctccctcagactggagctccctgaagatggggctgtgtccccctcagactggggctgcctgaggatgaggctgcatctcccctcagactggagctccctgagggcagggctgtctccccccttcagactggggcctcccccaaaggacagggactgtgtctcccctgggactaggttctttgtgtcttctgcatcagacagattcccatgaggacagggctgtctccccctccatctggagctccctgaaggcaatggcctctcccctcaaatgggacatttgcaccccaccccaccctctggctccccatggcgcccaggcattcctcccaggacaccatttgtcacgctttgatgaatgaaacttactaagaataactcagtccttgtagactctaaaggacagggggagggagagggaggaggctggtgattgtgggggtgctgggggagggaggacacaatccatttattcaatagcatttcctgagtccccagctgggcactgggggagacacagtgagtgccacagagccccctactgtgccatttctgccactgactgccagggcagactctgagacagaaagttcaggttcctgcttcagagcctccccaccccagcagtcattacctcagggccacccagccccctccatgccagtcatgagctccctctgcccctcccttcagtggaggggagactttgaaatcaggtgcttggggggggggcgctgctcccagtgggggtgtgaggaacctggaggatgaatccctgtcccccgccctccccctactctattcttccttaccctgcccctttccactccaaaacctcaagcctctggttcacatctgagtgacctttccaaagcaactgttc

SEQ ID NO: 1882399 - DNA, 4001 bp, Homo sapiens
cagccacttgccaatccccttcctgatcagggattcaggaagtgaagagagtgcccctggaagtcaggagacacctccaagatgaaggccctgcctgccatagcctgacacagcctccctgtactccctgggttgtcccaggacgcagactctgtgcttaccataccacacctttgtcagtggtgtgggcagggcccagcagagtcctggacaccccagggagtaggagctgtgcaggtaacataggagggggtgaaagggaaatgaactcccttgggagttccccatcccagaggaaataaaagtcaaagcactcctttgttttttcttcccaagcccttataaggggctttatggggcttgcctaggtttgaggtgcagcagaggcaggcgggtgagggcctccaggctgagagatcctggggcaaaagtgaaactatatggtcatgaacacgggcatgttctgaactctgtgaaaccctagcccaggacctggctgactgtacaatccgtcacccggcacaccgtaacagaagaccctactacgcgcagaggacagtactattggggtggcaactgaaaagggtcctggctggaggcggggtttgctggaggggtaacagagcgtgcgcggagtggagagggtacggaggctcaccgcccagcatccccaaccccggcgctcagaagagcagcgcgctccggagctcggcgcgcgcgatcaaagccggcgccgcacgcgcacgcgcgcccgcagccgctcccccgcccgcgccgctccggctcccgcgcgcgcgcacttgaggcctcccttgtgcgtctcctccattcgctacgtgcagaatggtccgtcggcagcagctgcagcgctgggtgggagggggaggaggaggggagggggaggcggcgcccaggtctcggggaggggccgcggcggccctggagatagaggggtgggggcgaaggggtgggcccccgcagcggggaggacagagggagagtccgggtgggctcgatgctcagccttccccctcccccgctcccgcttctttctgcgaggccattacggccatctcccggcctgagcctcctggaaccaagccgaccaagaggggtttcctccgtgttgtctcgtccccaaaacccagaatccagacccaagaaagaaccactcctgctgacccctcctcccgctacccgtcccaaccgcattcccaagctttcgtggaggtgacccaacagcaagcacttccccactccgcctttcatggggtggggtccctaagaggtactgcagactaactcctcttttcatctcttaccccacctggaggaagaggcatggccaggatggacaccagagcacatttcccagcatttccaaggggaaagggcagcatctcagcatgcagactccaacatggccacagaaaggtcgagtggcgcagaggagcaggctgctgcccaggcccctagggccacttccaaaggagtgtgaccacgactaggttgctgtggactcactcgcattacagggctgcgccctatacacctgtttgtaaagggtcctcctagaatgtaatggtgagggaccaccaagcggtggaccaagaattccaaacagaccagctccctgccttgccaggaaaccagatgtggcccagatgtccatagcagttcctcccacagggtgggacaccagctattctgtgcaacccctcccaacccttcttccagggtcagggaggaaagctggcaacctccgttgtcccttcccatttgggttgctagaagggagcaactcactcatcctcctcttcctgccaagagccacctgggcttacctctccagcagccacctaggttcaacctgtggtctaacctcaagccctctgctgacaggttaagtcaagatcgccgggaaggaaggcgtccagtttcattacacacacagacgtacacacacacccgacaccgacccacgcgcctgggctctgcacagtggctagaccccaaaaagccgattctcctgttccctccgtggtggcctcagtcttttggcggcgccctctgctggccactaggaagtgcaggaaaaaacagtctgcccatagacgcttggtggatctgggaaaggggacaagaggcagagaaacaagtgaaaagtgggagctgagagcagcgctgggctggccacaaacaagcgaggcatggtgacgccttcctggaggtggggagttttgagccagctttccatgggcctagggagacaagccgagctggcagataggggctcaggacaccccaggagtggcccttcctgtgtgctgagccctacccctgtcctggatggctcatacacccactaactcatatggctgctgtgccctgcttgggagtccttcctgtcagcctctattggggtggtgggtggggaggagcagccatggaaaccctgatccttctagtcatagtctggctccctggggctgtgagaggtgtccccaaagagaagcctccaattgacaaacctctgctccaccccaccccacatacacagaggatggcccaagcccaggtccctggcatggtggggcaggggcctgagtcacagcctggcgtgaccctgcccagtccccaggaatggccagctcgtccagaggtgagacccaggtcaacaatccatcagtctgcctcctgccaccaggtatcctccccatcacgtcctacacgtggggtgggccaggacagtgctgggcagagctagtgttgggcctgtgcctgggggccaccaagggggcccggagaaaagaatggaggggttttcacttcctgagcagcaggaggagccagctggggttaaagacaggagggactggttgggcctacaggcatttggagtctctccctgcctgctgggtgagggaggcagcaggtgccaagaactgctagcttctaggacctgaccctcaagttgcttctcctgctgaggggcttctagggtcaccctcagggccttgacatctgcacacatctgcacaggcccttcaccagggacttaacctccaaaggcagctcctgctcccagccttcacaggcccccctagggcccaagtccccagacccaacctcagtctgcaagctggccaagtcagaggtcctggctgcctggaccactcccaagcagtaaatggcactgtgggcttcctccatcctgtcttccccgccccacttcattgattcactgacttccaacttactggtcaggcccccttccagaccctgcctggatgaagaggactcccagaagcagtgattgaaggcctaggaggatacagagagccaggtgctttaattggaggtaattagttaatttactctgaaagcaatggggcagggcggggacagggggaggagaggggaggggaggaggtagggggctgtgacctaactgggctcaaactctcaaactctggtcagcctccttctggaccacagcaaacctgtgtgtacccacccacttaggagaccctctcctgggccccaggtcagagcaagacccaaagtggactagggtggctctgcagaaaaagcaggtgccctggggtggtgggaacaggccttttgaggttagggaggtgtggactggcatgagggaattggagaggtgcaaggagctctgggatgggaactggtccctctcctgtcacgtataattccatccctcccaaggtcattgctgtcacccaagttaggggcccagccccctcctttggtcagtgaagtcccagggcagcccattttaaatacaacggggcctgaaggctaacttctggccttcctgcttcgggaaatcattccaataaccgggaaaaaagggggcccgaggacagagcccctgccgggccccagggggagtgtcgtcggctcctttgcgtcgccggccggcggcgtggcggggactctggccggcagcctcccgcgccgtccggagcagctga

SEQ ID NO: 1882400 - DNA, 4001 bp, Homo sapiens
ccaaagtccaagctatttactgctacgcttttgcctcttctctatggaatacactattattattagcatattgacccaatgttacccttccaagaatgcatggggtaaaggctgtttttaaaaacaatcccaaatgttgcttctgctcattttgactggttccttaaatggatgattaaaattactgtgtgctgactatattcataaaactgggtgctactgggtgtcagtctctgatgaaggctcagacgtgccttcaatgaccttactcattgtaaaggagacatttttgagagacctatgtctatacatgtgtggtctgtaaatgaatgactttcagggacttaattgctaacccttttatttcaagaaggtgtcccatatgatgcctggttgttactttatgaactaatgtgcatacaaatgcatatcgagctgtaagaaaactctagtaaccttaaagacttactgggacagtggttcaaactcagattataaaccagtggtcaggatagaaaaaagagatgtggtcttgctttgtttggagtaacagaagtaggccaattgctgaggagtgctccagttctatctcaagtcagtttttttttcccacgagtacacaattttttctttcaagaggaactcatccctatctaagcattaatggaaaatggtccatagttcacaacacccaacgctaacaaagaaataaaaaatcatggagggcaaaaggtcagtatatgtgaaaggaggaaatagggaaggaagatttagacaagacgtgaagttgacataggtcagactgtcaacaatcagctgatttatctaataatagcagtagcaatgaggtatcatcctgtcactgtactccagcctggatgacagagtgagaccccacctcctaaataaagtagtaggtgcagcagctaatccttatataacaccagacattattctaaacttcatttactatacaactttatgagttaggcactactatcgctgttttactgatgaagagagtctcagagaggataagtaacttgcccatgtgacacagtaaggagtgaagattctatgtacagcagcctgacttcactgttttttttttttttgagacggagtcttgctctgtcgcccaggctggaatacggtggcgtgatctcggctcactgcaacctccacctcccgggttcaagcagttctctgcctcaacctcccgagtagctgggattataggtacccgccaccacgcccggctaaattttgtatttttagtagagacgggatttcaccattttggccaggctggtcttgaactcctgacctcgtgatccacccgcctcggcctcccaaagtgctgggattacaggcgtgagacaccgcgcccggccagtcattactcttaaacacatccatttacatgcctgggtatcagttggttcctccaatggacgcttaaactcacccactttagtatatgatacacatatatctaatttaagggaactgtatccattttactcagtttaatggatactagtactatgtagaatgaataataaggagagagcaggagggaggtgataaatatggggcagttgtgaacctataggcccgccgcggagcccagcagcagatgcgcctgtgggctctggggggcagaagggagggaccgcaggctggtactcggcagcctcgcggcggccgggagctcaggcgcaggcgcggcccggctgtcaggcgctgatgcgcggggccacctgcagaggcctcctcaccctgtccccgggatgtcccctagacgcggacccccgtgccctccttgccctgtgctgtcacagagtgacctgaatcctcccacgccaaaaagatgggtggaagaaagtatttccaaccctccccccgatcatcccttacccagggagagccgctggcccctcagcagggggctgcgcacagcggtggagcgatctgcggctttgtttctcaggcacctgttgtggatcccaaatagaaacgtcgcccttggggatccgggaccgggcagccagtgtccgggggtgggcgtgcttggccgcacggtccaccagggtgggcgggcctggggagggggcctggggcgcgtggctctgcctgggagggaggggccgagaggcgccggggccggagctgagccagccggggcgctgaccgccgcgctcgccccctcccttccgccctccgccctccaccctccaccctccaccctccactctccaccctccaccctccaccctcctccctccctctctccccggcgcgggcgagtgtctgcggcgcggcggccaggaaatgccgcagatgcgccgcgcagcatccccggtgaaggcagcgcgccggtcctcccgcaccgctgccgcggcctcggcccggcccgaagcacgcgcctcgtgcagggccagcagagcggtcagcgcggccgcagagggtccgggcgcccgccggcccccgcccgccctcgccgcacgccccgctcctccgcttggcgtggcgctgctcgtcgccgcccctgggctcgctgagatttgccgctgctgaaacccgagagggactcgggctcccggagccgggcggcccaccatcggcctgcccggaggcctgggcgtttcctttgccggccctggcgccggcagccccctgcgcccccgctctgcgtcttcggcttccgtgcttctccccagcgtgctgctccttcctcttttccagttcccaaggctgtgtcttgctgactgcgatactgtccgggggttacgagggggagaggggaatttgtcagtcatcgcttagataaacttcggcatggcgggttacctctcccctgctgcttacctgtacgtggaggagcaggagtatctccaggcctacgaggatgtcctggagaggtacaaaggtatgtggtccctgccctggggctgcggagcttggcactgatcagagaggcaaccgctgcctttccttaatcagagccaccactccttgggcacgagtaaacaggtgtctggaccagtcttgggaatggaccaggtctttttgcacgggatttagtacccccagcgcagggaggatggtggggtgggcgacagtccggagacgcccttagatgagcggtagagaggggggaagggggttgtttccaagaagcacattgcgttttctctcccttgtaaaagctcttaagcactacgcgtaatcataattcttcctgggagggtggataccgattattctctatgggattactaaggcattgctgctgctgcttggctagggtattggttagccctgtagaaaaggttcagcatcactagatcattttccttaaaatgatctttcttatttgataaagtttgtgactatatacttactctgatatattgtaaaaattattttatagcgtgatggataaaagactttagtgagtttgttgtaaatttaaatgtaaagaatgtattttgagatttttttctgcccatcctttatgttcaggaaattctatgccaatctgatatttatgttttagtataatgtttacttggacttcatagttgaatataatgatgaaatacaaattgcagctgtccattttttaagtgtttttgtgtctggaaatgtatttttaagtgtgtgtataccatctttttattgtggctcccaaaacactccgaactcaagagcagctcacagaggtttaaagtatttatagtgaatagtgacccatttcataggtaggattcagatggttttatatcttttgaatatttgctttgggtttggtaactcaatgtcagtaatttcagtggtattatatggttaatgatgcatgtagtttttctattagtagaaagtagaaataaaaaaaaattgaactaaacaataaaattccaaagccccaaaaagcccaaatacactcacaattgttttctctctttgtaggatatgttttataaccgaaattcttg

SEQ ID NO: 1882401 - DNA, 4001 bp, Homo sapiens
tttaggggtaaggactataacttttcatgttcgtttctaatatctaactcagacagagccttctgcatagaaagtacttaaacatttattaaatgaatcaatgagttcacaaatagacaaaatttctgacaaattcagagcttctaatactcatatcacatattaacatcatatataatattatatattacataataatattagagagttcagtataatttctttacatcttaatgcatcagaaagagctttactaagccattgatactgaaattaaaagcaattcacattcacattcttgctaaatattaattatattcaaacctaaataagtcataaatcaagtgagacgtgatgttttcaaacttgaataaccttttcctaattgaatttttaaattataaatatggcaatgctaagtacaaccaatataaacacaaaagatcataaagtgaaaaataaaaatctcctgccttctcagtcatatagtccaagaggcaactacatctaacagttcggggagtttccatccagatagttttgatgccttgaaaatatttttttccacatactcacaactaccaacaggtaatttttttttccattctttccttttcttttctttttcttttttttgttttttacccaaacttgaattgtagtatctagattgtcttgcaaattgttttcatcacttaaaaatattttgctgtaaacatcttgctagacagtttttacaatgttctcttcaggttattcagacactggatagcaataaatttttagagttcattttcaacatgtaattataagtacttaaggaaaacaggactatattatttcagttgaacatctcaccaagctcttctcacattcattttctcgataatctcttgaaatgatggtttggtcttgaagttcttggttatcgaagctcaagtctcactgtgacatcacttgggaagtccaggcttatccggcttatccatgaacagaaattgccctggggatttcagatctacctcatttggaaaattcagaaaattatgtagaagtcacatcaagaaacctttgatttgaaagtgaactcatttattaacttttctatacatttttaaaaaggaaagtgtgtatgtagaagcatctccttttttaaaaaaaagtgctggagggctgaaaatatcattttcactttcatttagtcaggcaaagagttaacccacaataaacaaactaccatgttaccaagtaaacataagatagtcagttttacttagaagttgttttcaatattttattttaattcagctgaaggggaagctagatatttggctagcaaccttcaccctaacaataaagaaatcaacacatctgttctatatctggccaggctctgcggccccctcaaaatttgacacattattatgcttctctgggcttccattatgtcatttctaaaacaaatgtgttggatgagattatcttactgctttctaaaattacaattcaaccaaattgtgacttcaaccaaaactataattatttactaaggataatttggtctatgtttccttgtattgaactaatatacagtttttaaaaataatttttaggggaaatgatgagatatgtcccctaataatttagaaatgtgatgtgatgtccattaccctctcagaattaagctatgaagataatgcaaaagggaccaagacaaaaagatgaaaagtttgactgaaaatattagcacatgtaaaggagggatgtatcaaaagaaagtttttgccacctccgtcttccccatctcaccaccagggaaaatagggaagggtttaaggaataagggaggcacaggagagacggaagggtcaaggtcaatgggaggtgagtgtggctgccatcctcacctggtgctctccactgctggagacaacaatgatcttggtcgtacggactgctcacatgctcagccagctaactgagagagccatttgccatcccctgagaaagtaaacattcctccagtcatccatcagtttagaataacagacatgattataaagccagcaacaatatttatgggaaacaatgtttctcctaaggaccacagctataaagtgtcacgcaaccttccttcttctttgaaggattactgccttcttactcatgaagaaacaagtttatctaacatcatagactatcaaaatgtcacatttgaaatagtatcattaaggatgaaatattccattcttgcccggaggatctcagtcaccttgacccagtgaagcagcctccatttccaagccagttatagagcttcagataaggggtgtctagacacaatattcaacatcaatcttaacttagtagtttttaaggaaacagggcctgaagtccatgtcatggtccagacttgatattgatcctctactcaaagtcttgttttgttttgagcctatcaaagcactgcttcatttaatgttcaccttaattccacccttccttcaaattctataataactcagctttttccttgtttggaaatggttctataaacttaatttttcagacttcaggtctgttccttttggttctaggctgatgggctaggacatcttgtagatctaccatagtagagaatgctctgtgtgattgtcatgtttctcattataagttaattcttttaacttttaaaaaatgttgattcttgcttatagtaggtctgcccccaagagatagacaccctattgggaaacaagaaaatcatttaattttaagcccatcaggtgtcaaaacactatatctttaaataagtaatgaatgagcacttggtaggctttagaagacagccccagagaccaccttgtgtggacaagtatatattcctctaacttctacaccttccagaatgataggaacactaaatactgataatattgtggctcactgagctgcagaaatttggcagaacttttgtctgtggaaatgataaaattgacacgaaaatttggagggagaaaagtgcttcatgatttggagatcaatttataaaaaaaagtttttaaacagaaaaagaaattcacaaagtatcctctctagggtttctctaaacacagaaattccattgagtacgtttttccacactggcctttgttcggtgctttgtttctgtggagaggctgcaggaactgctgtggggctgaaatgggtcctgacttcaaactgaacagcgtattcaagattttgtttgaatatgactcgctaccaaaaaagaaagtttggaaatcactgacgtagcactgtttttatatcatctattacataagcaggacacactgattttagaatcacagtaaccatcaatgttcccaattgcccatgtggggaaaaaatgtcattctcaagaactttggctttgaatgggtggttgggagcccactgggactagagcttagttccaacctttctgatttacttaaattgtcctgtaagaagatatcatgatgaaatttagtttctatccaacagacggcagtggtaaaactgttagcttggaagggatgtcgccctgaaggactgagtactgaggatgggcatggtaagtttggaagcaggaaatgagcataaatgtcatttggctctttctttttgcctagaaccaaatagccacattgttttgttcagtacccagaggttcaataccactcttttcttgcttttcactcatcagcttagccacccacctatactgccttctttttatactggaaataggagttttctctttgagatccaggttaaccgctgcccagaaggccccaagactctgatgagcaatgcaccctcgatgtgactgctctctcccgggctttgggatgcatgtaaggttctctggaagacaggatgggaactgtgctggcccttgcacatcactatttacaactttaggcttcagttcagtcatgaaagaagcattaaatttgcaaatggtagtaagctct

SEQ ID NO: 1882402 - DNA, 4001 bp, Homo sapiens
gtgattctcctgcctcagcctcccaagtagctgggattacaggggcccgccaccatgcttggctaatttttgtatttttagtagagatggagtttcaccatgttggccaggctggtctcgaactcctgacctcacgtaatccacccatctcagcctcccacagtgctgagattacaggcatgaaccaccgtgcccagccaaagactgtcctatattgaagttggacatttaaatgtacatctaatttgccactccaaaaaataacttgaaattttcattcagaactattaggtctgaatgtaggtagtgttttagtgtcattgtctaaaattctggatcctctcagccccaagcatgaaaaaaaggccattgtacctacagttcaatttcagttgtttttggttgagcacctcttggtttttttatttgcagatgagatgatcatagctgattctgcctctgtggtcacagtacaggttctccttgtagcaccgtcttcgttgtgaagttgttctgtgactctgcctgccgttaaatgaactcatttcccactcacacacctgcctctgagagcttgatgctgatcctattcggaaaccaagcagtgcagcagcctcacagaatagggcttcagccaaactcggacatgagaaacactgaggcctcagctcagataggaacagtaaccactgagaatttgtatttgctaaagtcaagaagaatctaccacagtcctctttataaaacatctgaaaatccttagacttgcaaatttacatgtaatttattcatcctttaaacacaaacacatagcatttttttaaacaccaaaacccccaaatatttattatttcacattttctgaggatcaggaacccagaaatggcttagctggttggtcctgactcagggactctcatgagattgcatttaagctgtcggccaggggctgtcatctcaaggatcatttgacactggactttacttccaaattcactgtcgtagttgttcataggtattggttctcaactcgctagggcaggaggcttcagccccttaccacacaggcctctccactgggtggcttacaagatggcagcctgctttcctcagactgagagatgagagggaggatccaaggtggtagcccaagtctttaacctcaaaagtgataccagggttgggcacacagtccaaccctggtaaaatatgatacgtagcattttacttcatagcactaatgctcaaagttgtggattaataggaagaacatgctctaaataaatgtatatgaatatactggggccaggtactgtggctcacgcctgtaatcccagccaaggtgagtggatcacctgacgtcaggagttcaagaccagcctggccaaaatggtgataccctgtctctactaaaaatacgaaaagtggccaggtgtggtggcagtcgcctgtaatcccagctactccggaggctgaggcacgagaatcacttgaacccaggaagcagaagttgcagtgagccaagatcgcgccattgcagagtgagactctgcctcaaaaaaaaagtatatatatatttttggtagagacggggttttgccatgttgcccaggctggtctcgaactcctgatctcctcagcctcccacagtgctaggattataggtgtgagctactgcgcccggcctgtactagacttttatatgaccggtgtgttgacaccagcatcaccacagacacatgcgtaatgtgtgacaatggctcttacatctccaggcaataggaatttctcagctccattatcatcttatgggaccaccatcatatatgtggcccttcattgtgcaccatcttacctggtgcagactgtactcaaattagtaattaaaatagaatgagatgaaacacatataaatggaagttacctgttttcatttccacctcaagagtcctctgagagcctgctggttgggcatggccctgtgtgcagcacctttgtcattacttagaattgttgctcatggaaaattctagagaatctcagtctcaggattcttgcattcttgggaaatcatgataggcttagagtgcaaccagaagagagaatctgaattaagggggctttaatgatcatacccaatgattattttcaagataaatagttttcctcattttctaggtcctaaggacagattaatgggttgtaattcctgttgtttccatcaatttgtcctctagaaaataagttccccaagtggctaagtctgtcatgttaattgatctcatctcttgttcatcagctattgattcacagacaaaactcgcactttgaattggtggaagcttttgattccacaatgaccagtgagatagattacattgtttaatgttggtttttcgtagttgttgttattgtttttgtttgtttgtttttgctgtgttttttttagacagagtctccttctgtttaccaggctggagtgcagtggtgctatcatggctcactgcagcctcaacctctcaggctcaagggatcctcccacatcagcctccccagcagctggaactacaggtgtggacaactacttccggctaatttttttttttttttttttttttgtagagatggggtttcaccatcctgtcagaggtgtttgaaccagagcaactccaatttgaataggagctgggtaaaataaggctgagctctactgggctgcattcccaggaggttaggcattctaagtcacaggatcagacaggaggttggcacaaggtgcaagtcacaaagaccttgctaataaaacaggttgtggtaaagaacctggtcaaaacccaccaaaaccaagatggcgatgaaagtgacctctggtcatcctcactgctcattatatgttaatcataatgcattagcatgataatagacactcccaccagcaccatgacagctttcaaatgccatggcaatgtcaggaagttaccctatatggtctaaaaggggaagaaccctcagttcctggaactgcccacacctttcccagaaaaacgcatgaataatccactccttgttaagcagataatcaagaaatgacatagccaacgaggagcccatgctgctgctctgtctgtggactagctattcttttattcctttactttcctaataaacttgctttcactgtctgatatggactcgccccaaattctttcttgtgcaaggtccaagaatcctctcttggggtctggatcaggacccctctgggtaacaatgctgctcaggctggtcttgaactccagggctcaagcaatcttcctgcttcagccctcgagtagctaggactactagaggcgtgcgccaccctatctggtttaaatcacattgattagttttcctattttgtggccaaccccttgccccaccgaaacaaacaaacaaaacaaaaaagacaatgcactggtttaaaatacgtccagtttatcaagagagtaacttcattgttcttggggcctgttcccaggcaggcccccctcacccccaccccacaaagggatgaataattgtgccagtttctccaagggtctaggggttccaggacacataacttaggctgctagaggctccaggaagaccaaggaagccctggggcaagtttcctcgcagcgaactgcctccattatcctgagattcccggggctacagaggaattgaggagaatgcatgagaagggagcaggagtgggtgtctggaaagggtggggcagataagggacttcaaatcagatcagcagctcctatgatgaatatatgacaaataagtagtatatgggcagtgactgaaacatttgcagctttaagaaagaactcaaatgagagccaagcccaaacatttttacctgctccaaacaatttccggaatcccactatggcttgggtgggagggaagagactcccacttaattatctacatggttttaaggttttggatgacaatatatttaaaga

SEQ ID NO: 1882403 - DNA, 4001 bp, Homo sapiens
aacagaacagaggcctcagaaataacaccacacatctacaactatctgatctttgacaaacctgacaaaaataagcaatggggaaagtattccctattttataaatggtgtagggaaaactggctagccccatgcagaaaactgagactggaccccttccttacaccttatacaaaaattaactctagagggattaaagactaaaacataagacctaaaatcataaaaaccttagaagaaaacttaggcagtaccattcaggccataggcatgggcaaagtcttcatgattaaaataccaaaaacaatggcaacaaaagccaaaattcacacatgggatctcattaaactaaagagcttttgcatagcaaaagaaactatcatcagagtgaacaggcaacctacagaatgggagaaattttttgcaatctatccatctgacaaagggctaatatcctgaatctacaaagaacttaaacaaattaacaaggaaaaaaacaaacaaccctatcaaaaaatgggtgaaggatatgaacagacacttctcaaaagaagacatttatgcagccaacaaacatatgaaaaaaagttcgtcactggtcattagggaaatgcaaatcaaaaccacaatgaaataccatctcacaccagttagaatggccatcattaaaaagtcaggaaacaatagatgctggtaaggatgtggagaaatatgaaagcttttacactgttagagggagtgtaaactagttcaaccattttggaagtcagtgtggcgattcttcaaggacctagaaccagaaataccatttgacccagcaatcccattactgggtatatacctgaaggattataaatcattctactataaagacacaagatgacttatttttactaaattataatttatgcatctgaaggggcatcagcttttcaaagtagccacttaaaccacggatattgcctgtgcttaagatatattgtaattgccaggcaatctgaaaagacttttcaggcagcaagtctttattttggatgctggatttgacttttgcaaacaagaaaaaaaatttcaaaagtatttattgtgttgaggtgaacatcaaaataaatgatagcattgtaggcaaataatatttaatgtaataagatgtttcatttgtgtgtgtttgtgtgtgtttgtgtgtgtgtgtgtgtgtgtaatgttattgagaagatatttcaaagggggagctctttagatattttgagtcatcacaagatccttaacattggtggatattgtcccaggtttacaacactgaaaaggacaaaggataccattagctatgatatgtccagtgacactataagtgaactaaacaaagatattcttttgacctttaaccacatttcaaatttttcttctatattcctgatattatagatgtggaatatgtgatacagaaaaactaagttcatttttggtaagagcattcctgaagacacaaacaagaaaaaaagtttgtttttttttttttttctctttgtttttactcttctaccttagaagaggcaataaggtggttgaatgttaaattatactatttttactatcattcctatattaaaaaaaaaaggttgaatttgtgtttggaaactcatttttaaagcttttggagaacatgtttacctttgcattggtaatttttaaatataagcaaaattttaaaatctgttataagtatttttttcagaataaaagaaataaattttaaaaattactgaagtaaaaaaattacaaaatctctatgcaaatagtgcaatttgttgaaacaattctaaatgctagtaactatttatgaaacagttcaacactggaacaagaatgtgatttccatgtcttctcaactccttttaataagtccttttatttaccttcagtatgtagttaggttaagcgccagtggtcaaactggaaaatcttgtaatttacggcaaaagaaagattatttgaaatatccaggttcacttgaaactagagaaaattaaattatttttatgaccgaaaaatcattactgaaatgaaaactctatgtctaacaaaagccaaacatattgaaataacttcccttaaattatacaaacaatacttaacaaagctctactgagaattcattttcttttaaaattcttatttcatttcctatttctgttcctcagaaaatctggcaaatctcatccagtgcagtcatcctgtacatgcttacttatggccatatatttcactggctgtttctgaaggaagaatgtaaaagagataacttatttactgctgcatgaattcatatttcccaagtcacataacagtttgctaacttggttggaatttatagactggtatgttgtgggtaacattagttctaccctaagaatgtcttttttgtagtaccctacagactatgcttaataaaccatggtttagtgttttgaataatttcaacaaaggaataattttagagtgatgaacttcacggacaggatagtgtgttgctactttatagctgtattcacacactgattttgcatctactagattccagatgttttcttttggaacatgttcaaattgagaagactgatgagaagccccaatctctgtaattaccagaaatgtaactatatgccaaaggcattgctgagagtatttttcatttattgacactgtttttttaatgtaagtaatttcagcagctatttcataacatatctttcaagatctgcccctttacatatttcttcctcaattatttaatcattattcaaatgaagccttttgattatataacttagagtgatgaatttcacttttaaattttgatgatgaaaggcaagagaaagtgataaataaaacaaatgaatacacctgctcccttcacataatgacagggtctaaaatctccaaaagctcttagaacaaagacaattcacatgcttgaaattattctctacaaaattctatgttgttgtctttgaactctcatttctgttacattttatcacatacatacttatctttatccatataatatcagcaacttgagttttccattttaacccaaaatatactataagacatttatcagcagataatagcctaagctgccatgacagggcaagaacttgtgcatttttttggcggggaagatttcattgccctcctgctacacactgttacatctcattcaagtccacattatccttctgttatttacttctcaacgttaatattttcagataggttcctgtcagctagttgacaaagattcatttatcattcaaacaattcagtgcatgcttggctttactcatattcccagattaaaagaaatgtcagcgaatgtacagttatgagatgacataatcagataagctaacagagatagacgttatatgtatgacaaacaaattattctctcagccattgtatgtatttctaaagagaaagttgttgaactaaatgaatggattcccagtgatgtaatacagtgagagaaagagaaatgggtcttcattctttctaatattctcaatctgtttccacaaacatttctcctgagctgaaaaactcgacccagctttcagctttccaaataacttcctgattcaaacaaaacaaaaatatctcaaaagagaaacttttcagtgcatgttctgtgaacatgaaaaccatcttagcataatttatagtaaccataactggaagatatttgaatatatttaatactttatgcaacattttggaagggggcatgaaatatatcattaatttttgaaatgaatttcataataaagtatttaaatatgtgtgttaaaatattgagtgctacaaaaataaagctaaattgatatggcactttctaggagctcagactttcatagtagaaactctgatactgaatgacaaagaaacattcaacttaatagttaattttacctcatctctttatacctcatctattt

SEQ ID NO: 1882404 - DNA, 4001 bp, Homo sapiens
ttaattaactgaaaattacaactgctggttcaactaaattcagcaaattttacattctagtgttaccatatgtacatttgtttgaagtagtaattaaacttctgtactagactccatattctgggaaaaagtaaacatattatgacacatggaatctaaaaatacacatttattttcctctttgacaagtacaaaagtgataagtgaatcttcaataaatgcccccaaaatttaaaattcagtaattgatttatgggtataactttgacccagccatttacaacttccatctaaaactatattagcagacatgggatacgttaacttattttaagcatatacattgaaacttgcttaagtttttaaacattatgaacagagtattaaactggacattatgatacatcttgtttttgaggaatatactaagaggaatacactaagagtgaataaaatttctcgaacgttttccatccagaattctttcctcagtattcttctcttctaacatcctcttcattaaaaaagagaaagaaaccctgaaagtactgctttgatctagaatgaacaggcaggagtttcattcagatctattttgagagaaaactgatgggctcaaaaatatacttcagttgaaaaaatgtgcagtcgaggaaatattaatgttctgataataaacagagaataataacacatttaagactgttctgcacttggcacagtattttacagaaagcaaagtgcttgacaaacactatcttggagggatcttacagcaccccaaggaggcaggtagagccaggcgtattgttctcttgtaacagagttagtcattaagagattggctcaaggtcaatccagaacctggatctgttgataaaactttatttcaggggtcatgttatcccccgaacttaatgtggtaagtcatggtgagtttcaatcacgaaagcaaggaggtaatatagccatatttttcttgtttgagatctctctcttctttccgttcattgtacagatcaccctttaaaaaatgtatttggtcatcaaaataatttataaagaaggaacatgccacatgtgtacaaaaatttttaaatgcacagtttattacccgaagaaataaactgacgtaactatttgaagtacaaataagtgtaattttattttaaaagatgcaaatatgtgttgccaaatactgttttcgtcatggtgtagtccactttcagtaaacaactcaatgaagtttataaacttcatatgaacagtaacaaatgagtcatcctattcaaatcaaataaacaaataactagtgtgcctattatttgtaaggtcctgtgatcaaaaggtacagtcgtttatagccagtgctttactcaagtcctttcttgatagatagatgggtggcagatggatagagatatcctacatatctatcatctatctctacattcttcttttccggtatttcatccaacttccactaaagatagtttgtgtgactttattatagaaataaagttcacaataaagatgatttacatacagaactcttatattttcattcatggaaaaaaccacaacatggtggtgccagtgacagtctgtgttttggggcaggatagaaactaacctgcttcagttacctgacattctagcaaacttattaggaacacaaacgctcgggtctctgaatgcaccaacctgagcgccggctgattaggcattgtaaagcagtgttctaaaaggaaaggccttcacttaaacagtgctacaacgtgtttgttcagctttctttcatacacaaacttttgccagaaaaggcgttttaagccgagggtaaagattttgtgcgtccaccgttcccatcttcaactctttagaataatagtcatttaagcaccggacctgtcttcagattcttactttgcgacacagctttggccggacttggcttgatctgggctccaggatcggtcccaccacccgggctcggagcggtttgttcctagtggatcagggcgggtgtgttgccggagtcgccttctattggctacactcccggggactggctgggctttccgacacctgattgggcggaacagccctctgtacgccgacatcattggagggcgctggagccagggggcggagcgggttccccaggattcttgaccgggcgcgctagtccgtccgctgagccgggcgcggggcgcaagagcggagctgcgcgagccgctgcggagggaagggctcctagccaattggggtctttgaggcgaatgcgaggctggggccggttgcctaccggccgcttctcgccgaggcagtccagacttttcccccggcggtgcccgctccaagacagcatctgtcaacgctcctcttctcccctcctcctcctgccgggccgggctccgccggctgcggccgagaggacgcgggacccggcgcggtgagcccatcagctgtcaggcgagcggcgaagcggctggagggcggcgagagacacacaaagaacgcggtgggcggcggcggcgaaaggggacggcaactcctccccgcgcccgccggtgccaccgccggccgtgcttgttccgaggccgcgcagacaatgcggccgggctcgtccccgcgtgccccagagtgcggagcgcccgcgctcccccgaccccaacttgaccgtctcccggctcgcccagccccctcccggggtaggggcgccccctccctccggtggccggcgaaggaagtcggtccgcggccgcagatcccggcaacttgcgaaccgggaaaagtttgcggcgcctccgcggggcggcgcgacgcggcccgcccctcgcgtccgcggtcatcgcgggtgactttctcgactcgtcgtcagccggggccgcagcgcggccggtggggactgcggggcgggccggagtccgtccgagggctcccgcacctcgggctgcgggtgagtcggctttaggcgccgtgggctcaagtggtttagggcacctgggcttgggaagaagtcgtggagagagcctttaatactttatggagctggcggggagaacaaataaaattgcggtagcttgaagggcactgacatgccactgacttgggaaccgtatccgtgggaactcttcgggtgccggcgcgaccaagggcctgtgcgcggctgggtgggagatggaaaggttagaaggtcgcggactagccctgcctgcgactggctcagcttgaccttggaccagtgactttaccacttagatttttctcgtgggtaatatgtggggccacagcaacgtggtctatgctgtcgtccagtttttagactacatctccgtttttgagattttcctagggcctcaacacggtgcgcgagttatcaagcgataggccaggatatgtttacatgcgcctggattcacctttcagcctactcagaagtaacttttaagtctgatgttttaaaacactaacatttaaaggctttccttcactatccattgcttattttacgaaccttaggattgtcgtattttgctgcaccatttggaatcctaggggccagggtggggacagagagccaagtctgagggtgaagtggcaggtgcccccgggcgatccctgccggatccagttgagggggagaacaaagcatttattatgcataagagagagtgaacagggcaggtgtttgtgtttttgttttctgtattatactgaaaactttttttggttgggggggtgcgggcagtggaggaggggacaaagaagaaaaagaaatgtcaaaaaagagaggaaaatgtcacttatacccaaagtaaatcttaaaactaatgtaagtcttccttacaggaacagcaacacataatgcaagtacatcttgatctaattttaatgaaggattgaaaatagctactgtgttcagtattactgacgccaaggcagctcacttacataatcttctttgttgagatgtgttagtggcatgtataattttg

SEQ ID NO: 1882405 - DNA, 4001 bp, Homo sapiens
atcctggggcagaaccaaaatctcacctacataacggaggtgatctttacttctgtttatttacttgtcctgaagaactctaggatttcaaacgtacttgaattcatcatgaatcctccacaatggccactttcaggagggaattcagtgtatggagttttctttgactccaaagaattgagcttaaataaagtgacattcacaaaaacatgcttatgtattcatgcatacgcctttgtatattctctcttatacccactctggctaaggccagtgtttcctcatgatatggtttggctctgggtcctcacccaaatctcacgtagaatcataatcctcaatgttggatgaggggcctggtgggaggtgattggattatggtggtggacttcccccttattgttcttgtgacagtgagtgagttttcacaagatctgcttgtttgaaagtgtgtaacacttccctcttcgctctctctctcttgctggccatgtgaaaatgtaactacttcccctttgatttctgcaatgattgtaagtttcctgaggcctccccagaagcagaagcttgtgcgtcctgcagaactgtgagctaattaaacctcttttctttataagttatccagtcacaggtttgtctttatagcagtgtgataacagactaatacacctcagtaatattaatagtaggctagtatttaaggctgttgtaatatctctgttaaaataaggacagcattctgaataattgagtttgatcacatgatatgtgatgtttagatgcctaatgctggctgcagttagtactcaaagtttacctgtactatacacatggtaaaagacaggtggctttgtgcagggtggaaggaagataggaaagaggaaagaagaaaaagcaaggaaaaatatacagaagcggaaagagaaaaagtaaaatagagaagagtatgcccagtgtctaatttctcaccaggttagatacattttcctttaaccattaagcttttagtctttttagactgaaggttcaaaaatctttgaagaaataaaatcaatttaatcaaataatcagttgtttgggagcataaataaataagaaattaaaagcacaattgaatgcaaacagccgtcccagagtgtgatatagcaattctctctctatggttgatacatttatctataaattaattagattttgtctccaaaagtgtttaagaatattatatatttatgtatgcatccttgaaaatgattatggaaacaatgatccatcctgaagcaagaatttttttgttttgttttttcttactcctcgccatcctctttgctgtttatctgaaattcatgtttaactgggcagcctgtactcctgtaaaatagtgacccaaacaacaaaaatacctgcccttgttgggcttatcctcaatcttccctgtgttgctcgcattctgatacaatcagctgtatttgactaccaagcatcagaaaaaaattcttttttttttttttctgatgctggtttatgcagagctcgcttcatggcctggtgaccagtgcattcatgcagaacctcctgatcagaagggtcttgctgttaccagcctgtgagtcttaataattttgtacatgcaatccctccttttcattttctcctgaactctgcaaagtatgtagccagtcccaggtttatgcattataatataacaaaaatatcaaaaataataattgcagttccatagagaacttagaacttacctcctaagtggtttaaatcttttgatatctgggacccccaaacccctagaaagtcagaagataattttttctttaatgggaacaatgaagtctcaaggtattaggtccgtgtccagctaaaagtctgctggggctaaaatccacctttcctaaacctcacatcacatttctcaaacttaattgcttcatccttgcactttcccaggtctttctgttttctctcctttgtcacagctgaggctgtcactaaaactgtggccctctcagctctgtctttatcattcttttcaactcagtctggatctttatcactttgaaggcataggtggcacttcacagacaagcacatttcagtcatcaagttttgtatgtttcccatgattgtgacatatttctacctcatatcctagttaatagaacacaggaagaaaacaggctgcacaggttatttgcatgaagggatgaagtggcaggagaaatgaagtcttcctaactctggcctcctgctgctacacaagccaggccaatgatgtggcaagtccaaggggcacatggcttttcagtgtcattgtttgaggaggccatgagtggtttagctggtggcctctgcttctttttcttttgagtgcttctgaatacatgactgtgctctgaatacagagctaccactgcggggtaaaccaagccacagctgtcctcttccaaggttagggtcgctgctcagcaggagctgatgtgctacaaggaatgatgatcttctactggtaagataatttccaaatctttaaaggtgaatttagagtgaggggtccccttacctgtggtgtttaatccatcctatcttaatatctaaaactttataatgccttcttgtctgtttgtggtgttgttgttgttgtgtgtgtgtgtgcgtgtgtgtgtgtgtgtgtgtgtgtgtgtgtttaaaggtcttggcacagatgccgtgctcaaaacatgttaactggattcaaatctatattttgattaatcagaaatacatacctgcataaacactgctcttggaaaagtttagaaaagagtttagccatctgttttctggttttccagtttgactttcttgtttgtagttccgctgaatggtatcattctcatcccttggcaatggttttgtagagttatagtttctggtaggggaagggcttcggttctaaagttagtgatcagattaaacgcaggtgagatgcaacaccagcatatcataattatcttattttctgctttgcagtccctaatatccagttaggtaaatcacaaggattcttataataacacctatgttctcccccaaataaaatggagttatcttccttttttaaaataacaaaatccacaactttatcatagagaaacaagcctactgagcaagatcactataatcatttaaatataaaaatactacaaaggcaaatacttcaccctccagccctaaatttaccttttattttttctgaagctctaaactttccctcttcattttcacacattgaaagcagtcccgaaattttcaggaacaatggcaagttttcaaacgtttcctagaaagtgcgtaaccctatctttctctttgatctactgtacttacatcggcagatcagtgtgacacttgcaaagccaggtatttttatcccagttcattcaaaggtggaccagaaataacacagctcctgggcttgaggggtggtgggggtggtgggggaaaatgtggcaggagaagctacgagaatcatagggcaagcaaggcggtccttgaggaagaaagctttctaaataacacactgctccattctttctatccctcttcaaagctgtttcgttcctaacccatttttcattaagtttaactcctttggaaaagtctcgtcactttcctagggaaagtctccaggggagcgagctttcaagatctgctgcggagtgtgtcctgccagtgcgtggaaggccgtttgtttacaaaacttggtgaatacccagatggcgcttccctgtgccctgcagctgctcaacaagcaaggagacttgcaggcacccacagaactcattctgtgaagccctttcttctcagaagagtcttcactgctattgtgacgtcctgcttgcccctcctgttttattccagaggcacaacgttaacacaaaatgttggagatcatgacagcgttgggctccaaaaacaggattgtttgttgttttgaagccagtccccaa

SEQ ID NO: 1882406 - DNA, 4001 bp, Homo sapiens
gagtagaggtagtcaggagcagcaccattccaattccgccttgtcggctgctgctaaggacaacaattgccaatgctactcttgtttaaattgagacacgccctcatgagctcttcatctctttagccagactctgttattttttctccaatacacattccctaaataaaaaacataaggtgataaaaaattgaggttgaaggttggaactgagcttctctgagaatgctcttcctacatttttattttacttttttttttggtgagacggagtctgtcgctcaggctggagtgcagtggcacgatcccggtgcagtggcgtgatcctggttcactgcaaccttcacctcccgggttcaagcgattctcctacttccacctcctgaatagctgggattgcaggtgcaggccaccacgcctggctaatttttgtatttttagtagagacggagtttcaccatgttggtcaggctggtctccaactcctggcctcaggtgatccacccgtctcggcctcccaaagtgctgggattacaggtgtgaaccactgcgcctggcctgagaatgctctttctatagagtagcttggtgtaaagaagaggactctggcttcagaaaaaaggcagactggtttagaccccggctctgctccctggtactcacgagaaacttatgaagctttgtaactccctggtcatcatttacctctccgtgaaacagagataaggataaactacaataattatatataattctataggcttgtaaaacaaaaaattataaagttataaatagaattaaatcataatataatttacaaacaaaattatatagtaaacgtgtacattcagtcagccgtctatatccacaggccctctgtatcctgcatccgttcatttaaccaacgtggcccgcgagggggcgcgagtgggtgccagggcgcagtgggaagggggccgcggagcccgcgaggcacatgcgcagtgcaggaccccgccattttgtcttcaccgcagccacggccgcaggtcgcgagtgcctgccagcaaatgattgagggagttgctgagcgtcgccgtcgctgctgtggggagaaagtcgagcaaagctaaggagaagaaacagaagtggttggaggagccagcagccatggatgctgtttgtgccaaaggggacgccatcagcaggcctggagaccctctggaggctttcctgctgttcaggaaatctgatcaaaaccgggttgaatgtctctactgagtgtaggccagggtctggactggagccagccaccatggattgggccttcgacctgaccaaaaccgataggcagaccacgtatgagtagagggagtggggctggaaggacagagagaaacgggagaaacggtagtcacccagcctggtgcctcctcgcttgagaatgcattgcccacctgttgcattttttcacttcccgtttgatgtggagtgcagaggatgaagtcctacgtgggaagcaaggtgcggtggaaaggcctgggggaatttcctcctacagagactgcagctcatggccaacaggacacagatgatggaggttatgttaatggtgttcaggcacaatcatagcacctaccaattcttcagagaagcctgcagtttgaaattgatgactcttcccccagcatgtctggttgctgtggggaggactgctcctataagatcctgagctggaggaccaagtttggggacagccagcatgcccatgcaggtgggcactgtggtggctgctgccactgacctcctagagccacttgcaaatcagtgtgctctcttctaaggcctgtcgtctcccttggtctcaccatttgccaggtgccctcagagctgtggcctcctcagccctgcacctgtcgggctgcaccccgagaacacggaacactgcctcccctcttctggaagaccagcgtgccaggagagaatgaagaggagagggaaaagtgagtggaggactgactgtgaagctcatcctcacagtgaggctcctgggccatggggtggaggttctgaaaccacttcgctgcagctcctagatactcccctcccccacacatacacacttgggaaaatggaatgtttattttcacctttgtgaaaatcttggagttctgggtctgtggtttggaaccccaaagaggaacgcattgggtgtaagatctgggcgtagagagaggcttcagagagactaaggctttcgcaggtggaatgctctgacggagactgtgggaagatattttgtgccaagatgcagggaagtgaggaaagctctttcctgctgtttttaatgaatccatggagtggactcagcttgggaccagtagccgctgggaggaaggctggctgtcttcatcgccactcgtcattgccatcgccaccgccactgaccatacgagagaggctgaaagtgtgtctggaattggtgggttcctggtctcactgacttcaagaatgaagccatggaccctcacagtgagtgtcacagttcttaaaggcggcgtgtccagggtttgttccttctgatgttcgaatgtgttcggagtttcttccttccggtgggttcgtggtctcgctggctcaggagtgaagctgcagaccttcgcggtgagtgttacagctcttaaggcggcgtgtctggagttgtttgttccccccggtgggtttgtggtctttctggctcaggagtgaaactgcagacctttgtgactagtgttacagctcttaaaggcagtgtggacccaaagagtgagcagtagcaagatttattgcaaagagtgaaagaacaaagcttccacagtgtggataggggacccaagcgggtagccactgctggctcgggcagcctgcttttattttcttatctggccccacctacatcctgctgattggtccattttacagagagccgattggtctgttttacagagagctgattgttccattttgacagggtgctgattggtgcgtttacaatccctgagctagacacaaaagttctccacttccccactagattagctagatacagagtgttgattggtgcattcacaaaccctgagctagacacagagtgccgattggtgcattcacaatcccttagctagacataaaggttctccaagtccccactagactcaggagcccagctggcttcacccagtggatctcgtaccagggctgcaggtggggctgcctgccggtcctgcaccgtgtgcccacactcctcagcccttgggtggtcgatgggactgggtgccatggagcagggagcagtgctcgttggggaggcgcgggctatgcaggagcccacggcaggagggcggggaggctcaggcatggcgggctgcaggtcccgagctctgcctggcggggaggcagctaaggccgggcgagaaattgagcgcagtgctggtgggctggcactgctgggggacctagcgtactctccacagctgctggcctgggtgctaagccccaagcccctcactgcccagggccagccggctgctcggagtgtggggcctgccaagtccacgcccacctggaactctagctggcccgcaagcaccgtgcgcggccccggttcccacccatgcctctccctccacacctccccgcaagccgagggagccggctccggcctcggccagcccagagaagggctcccacggtgcaggggcgggctgaagggctcctcaagcgcggtcagaatgggcgctgaggccgaggaggcaccgagagccagtgagtgctgccagcaggctgtcacctctcaaaaggaccaggaatgaggtgttatatgggacctgccatggggatgactgcttgtgtatgcttttggatgttgctgcattctaagcttaacctcttggtctcatggcagtgattgaggtttttattcatagaagaaaaccagaggttctgcctgtttctctctgccagttcccaccattcattatcct

SEQ ID NO: 1882407 - DNA, 4001 bp, Homo sapiens
caatacattttcagaatattaagacaaggagaaaatacagaaagtagccagagagaaagggttgatcacctacacaggaacaacaattataatgacagcagtgttctccacagagaaaaatggaagccagaagactgtggaataatgtttttaaaatgctgatagataactgtcaacctgtactcctgttctcttcctcccactaaaaacaaaacacaaaaacatctttgaagaatgagggcaaaatacagtcttttacagatacaagataatttacagaaattgaagggaatttactaccaaagcatccactctacaggaagtcatgaaggctacatttcaagaaaaaggagactgatctcagaaggatggtctagatacaaaaacagtgagaatgtaaatgataaacagaaatgtaaacattgtgtaaagtaaaataacaccatatattttatggtgttacaaaatacatagaaataaaatattggacaagtactttataatttcagtggaggaaaagttattttaaggtctgtatcattcacaaggggttcaagacatttttaaattttagactttgttaagttaaacatgcataatacaatttcaaacagaaccattaaaaaatagaaatagagccagtagtgagctggtaaatgtggaacaattggctctctgaagacaaagccctaatttgtggcatttgccaatttccatggtgtaaatagtcccaccatgaatgatttcaagctacctacatgaagtcactgaacttcatattgagcaaaggatcagaagtgaaaggaaaggaatcggaaaggatacctagaaggacataccaacgagatcaaaggaaaactaagagagtgctgtattctgaaagctaagttaataaagtgtttcaaggagggagggagtgatcatattaatggagaatattagtactcactaaatatccatgtttatttcattgatatgaacctccttatgttaggttggtgttgtgtgactagattctggctaatggggtggatatcacagtccttcctgactttaagtaattagaaggaaccaagggccaacctactgaaatagaagattcccccgtggctagcaaagttatataagactccaacagacattttatgatgtctactgtgtcctgggcacagtgctactcccaaagaataaaacagtgagtaaaacaggaattttgaaatgattgtgtagcagttatactcttgtttcaagtgttttcaagtcacaagaccatgtagctcagttctataaacaactactttaacagtggcatattcccaaaggatcattctttatgggtaccagagtatagcaatacatgtatgtcccttctcttattccttctctacatcaagcaaacatagccctaggcactgaaacatagccccaggcttctctagaaactaatttcttcagtgttgaaggccattgatctctactgcttttttgttttgctatagtgagtcacattgtacttcagtgctggcagtggttaggtcctgtatcaggtgagataaaaacacgaatacacttgcacattaatacatgaacataaatgtacacaaaatttcaatggcctcaagtcacataaaaatagattcatattcattagtgtagtgtatgaggtctggaatggacccacccagagtgtaggcttatcagaatggtgtctgtatagcttaccaaattccacatgagtagagctagaggaaatctgagagatcattcaatccagtgtttatcaaacattcttctagacacaatacatagaactatattttaagacacacacatgcacacacaaaaacagaaacacacacacacctaactgaaacaaaagtctcaggaaagaatataccatgcagaagaggactccagtctgctggctgggtcagagcccagctgaggcaggcaggggatataaggaagaaccagcacccctttctcctcaggcacccctacacccacactaggtctctcctgatgaattgaggtggacagtgacctcacaatgcacttaaagggcaggacaactgacagcatcctatacaatggactgtggagctgtgtctgggtggcactgtctacagcttgtaccaccttggctgggttttcttctagaagaagtgagatcaagaagcctggtagacctggggaagttgtaaaaacatcaatgaatgctggcttctgtgaacaccaataaaaaaaaaatgaagcagtgtgatattttctatcctgtcctgtcctaagctatcttatcctatgttccatcccatcccatcccatcccatcccatcccatcccattccctactttatcccttatcttatcctctttcctttccaagcattgcctgttgcaactgactaaattgactttatgtcccacaaatggctccaaatcacagtgtgaaaatactgttttagaccaaccccctaatttaatggaaagaaaaactgaagcttagcgacaacaaatagtttttcaaggtcacagttattgcagagctaggaccagagcctaggtaccctggtccagagggttttgttcttattggagggctatctgcacctctctttgaatctcttggaatagggagataaggagaagaaggaaacataaattgatggctatgccctgccttctccgttctgcttatccctggtcaaggttgccagagaattcaggcccttcagagccagctgagatgtgctgaatgctaagtgattcctcatctgattccttgctccagaatacagggacttgaagacagactacatttttcctgagcgagacaatttggtctcaagggaaaccaaactgtagcacagaatgtgaggtgagtttgcccttgccctttcatttatcttcctttaatcaaacagactaaacgttttcattggaaagagaagattgttatccttggctttcttgtgtctccagcagtatttttcttaggaatgtgttaatagctgtaaaaattttaacacgtcttcaagtgcctctcatgttaggagattcttctcagttgtgggaaaagttgttgtcagattgcccagtatttaagtgaaatcaaaatgtttctgacaggttgattatgctctttcttcaaatgccctgtcttttcagagtatgcagccagatgcttcggagggagagacatttttcttgccaatcccgattccttcagtcctcaatcactccccagaaagttaggctcaaaagacggttaacttcaggaaaagttaagaaaagatttgggtgttttcagtttcaagatagtgtggtgcttggcccttttgtaaagagcttatttgctctggtcaccaaacttctttacctttatgttttgtttaaagaaacaagaacatttaagtaacaaatatggagtgtgttacgtagaaggcagttccagaagaagttgagagccaaatgtgcaaatataggagggagattcctaaaaattgctgttaaagtttttgttaccccaaaatttattaattatttaatggaaataaaagaggaaaggaggaacatgaattcatctaagattacatattcctgagtgttacattgaaagagaaaattggctctgaaagtgggatacctttgctttgagagaacaattaagcaaagcccttcttcccctgtctgccttgctgagttttctctatgacgtttcctgttcgagtgtccacatgcttcccttctaacacctcccctttctttcttgttctacagagagagcaacaataggatggaatgcataaaatccttccccagagcaagcttctcccacttcttgaaaggctttatttttatatagcctctggaagccagacaaagtatcacttagaaagcgagcctcacagggcggctctggagagatctgaaggctgcgttcataagttcagaaagaacaaagtttatgctttaggccgctagaccgtaagctctttgag

SEQ ID NO: 1882408 - DNA, 4001 bp, Homo sapiens
ttgccgagcgctgagcttgacccgggctgtgtgctgggatcacttcagagctgcataaagcccggtgtccagggccgcatcccagactgactaagccggggcattcgggagcagaacgggctgccaggaggcgcccagcacgtggtccaggtcagggccggtggctgctccactggacaaatgggacaaacgggactcagggccaggtgctctcctgcctcactgggagggtgacagacggttgtggttgttgggacctctggcagagcagggaggggaccggagccagaggctgagacgggcgagtgggatcaataccagccagcaccgtgggcttcagtgcagggccctccagccaccctgccccagagtgcattcttgagctcctgctgtggggttctgagtgggggggtccctcctggcatcccccaggggctgtctgtgcctgcgttcctcctcttgccaagtcccggggacggggctacatctggggcttccggatccctcagacgctggtgagtgcaatcctttgcacacagaaggcactcagtaagaagtgttgaattggttgactattcttgccaaatttgtacatctttctttctgtccccaacaccctggtatgtggcaagccttggggttaaaggaatgagccccggggtgagatcaggaggaaactttgcccccctggaactagctgtgctcttgaaccagtcacttcgcctccccatttaaaaagtggagatggtgaggcagacggatcacgaggtcaggagatcgacaccatcctggctaacatggggaaaccccgtctttattaaaaatacaaaaaattagccgggcatggtggcgtgcacctgtagtcccagccacccgggaggctaaggcaggagaatcacttgaacccgggaggtggaggttgcagtgagctgagattgccccactgcactccagcccaggtgacagggcaagatcgtctcaaaaaaaaaaaaaaaaaaaaaaaagtggagatggtaatttctgccatcctcactatgttagaggctgtggggatcaaatgatagatttttgcaaaatattatacaaatacaaagtcttatcccgggcaatagcaccctagtcctaagcccaagctttgtacctgtcaggttctcctgggaggcctctcacacatccagggacccgcagccacgccaggcagggtgctttaggcatagctgcagcgcggcctggcctgctgtgttcggtcccttgagttctgagaacgccctgcctctgcctccccttggagcctggggtctgtttgggctcctcctcccctcagtccaaaccctctttaaagccaggttgatgctgaccagaacccagtgtgactgtgaccctgggcacaccgcgccccttaatttgtcaatttggggaattaatctgtggaagaatgagtgagagtcaggggtcaggcctgctggctggttgtgctccacagggggctaatgaagaccccccggcggggagggagcgaggccaggagggtgccctgcccccgtttcctgacggccggtcagcaggctgtggggttatctgggagccccacagcccagcctgcaggagtcgtggcctgtcctgagaagagctgcctctttcgggaagttcgagctttaactgtggaatggactctgactggcctgtccagggcagcccccacacaggagcaggcccaggagtgcccaggtccacctgcctagacaacagattccacctgccagtgccatgtccctggaaaggctgcccgcctgcctgagccacagccccagagggccactcacctgcccatgcaccccaagggtggcccatctgcccatgtccctggaagagccgcccaactgcctggccgcgcccttggaagggctgcccacctgcacatgccacgcccctgaagggccactcacctgcccatgccccccaagggtcgcccacctgcccacgcccccggaagggccgcccacctgcctggccacgcccccggaagggccgcccacctgcctggccacgcccccagaagggccgcccacctgcctggccacgcccccggaagggccgcccacctgcctggccacgcccccggaaggcagcccacctgcctggccacgcccccggaagggccgcccacctgcctggccacgcccccggaagggccgcccacagacatccttttggctgagttctgctgcctgaaaacttctgtcaaaacacagaatcgtttctggaagtgagacgattgaactggtttcttgccaacaggtgtcccagaaggagcgttcgcagctccctggaggcgggaacggagtcccccggggagagagtggtccagggtttgccctcaggcgtccacactgtccgccggcgaggctggtcctgttcccagcacccacgctgctagagccaccggatctcccaggaggagacccagctgcactcagaagaatcacgctggcctaggagatggacggcggcgtgcggggtgaggaataaaagtcctgctggtgctgcccgaggcccgggttgtgtggacggcggggggcggcaccggtctctcagtgcccgggttctgtctacgttctgccgcctccctggccgtacccgtaccgctattaagagggatatgttcaccgctgccccacccatagaaaacagactctgtggtgcccgtgaaaacacacgttggtgagactggcacgcccatgtcacgtggcctcatgatcactccgggctaggcccaatttccaaataagggtgtgcccacgggtgctgggtcaggacccctcgattgtcacccaagaagccgtgccgggctctggcctatgcgacctgtggtcgtctgttacagtagcgggaagcagcctggggccgtggagctgtgcgggggcagagctggctcctggggtttgagggaacgagggcctcagagggggtctgtggaagacgggatctgggcagccccttgctggacgctgagcaacgtcggactgcagcttcctgccgggacctgacatgcaaacagcagaaaccatgggggcgcgacgcacttgctggggcaggcggggtgggcagcctggcgccaatcacctcggctctgcagcctggagcggacggggcagggggcttctgctgcatccgagggccgagcgtggctttccattcccagccaacgggtctggaaagcagaccgcacgggtccaataatcaatcatccacttaatcaattaggagtatgctaatgcaggaggatggcgggcggcactgcacagggcccgggctggatgctggtcccctaatcagtggcaggtgaaggggctggggcgggccgggggcgtctccgtgcttagagggagaggatgcccggacgtgggcctgggggctcagccagccgcctgcccgcgagaggaggcgccgctttgtcccgcagttaccctgtagggagggctttcctgggttgtctgtcactcagcgccaagcgaggcagtttcagggaacattttcatcacttctaagacctggagagtgcactgagtccagcctcgaaacgatccctgcttttcatcacagagggtgagtctgctgacttttgcctgcaaaccctgagatgcggtgacataaaaagtgagaaaatcgccattccctctcagcagcgcaggtgagcttgagaaccgcctgcccccacggggccgcagcgcccgacccgtctctaaaacagcaacagcggcgcctgcaccgacgtctgcttctaggcccggataacctaatgcaccttaacgcactttgccaacgctgctgggagcacaaatgcggatttattataattgacaatgagtcttgtttccatcggtgcagtgtaaatatatgtgaaatttactaggagagacaccactttttgcaaactgtgatgctatttccctctgaattcagccagttggagctttttaaagcatctccctttctctcgg

SEQ ID NO: 1882409 - DNA, 4001 bp, Homo sapiens
ctatctgcatggatcagttcaataaatatgtgctaaatggcggaatgaagtatcagccatatgttgggaaacattctaataactttatatatagtgtttcacttaatccttacagccaatctttgaggtaattccttttattactcccttttaagtggagaaattaggcacagagaagttaggcaatatgccccttgtcacatagcaaataagccaggatttgaatacaagtagttgtccttccaaagtcataactcttagccagggaatgcagaaaaactgcatcgcttgtgtgtctcttgttttgtttcaagaagccaaatagcctttttctatttgttaattgtatcacttttgaaggaaaagtcctcaggaggaaattccgtggattggtttaggatggtgacactcattatctttctcacaattaactggacttttcttcacattctgatttgttcccataatgagagttagggccccacttcacctgtattataaataaaagccatggaggtccatacatacaatccctggatgcttttgctttactttgttttgtttcattttcactcacatcaggttaagctgaaagttttgatgttttttagaagtaactttgaatccaaatacatgattactgttataaagcctgccttgtatcgcccttcatggtgtcatacagcttaggacctggtgatgggatggcattgttttgacaactgttacctgttccttatttgtaagtttttagtaatgtgagcttctgtcttagtcttgtcatgaccattgaggtcccttctagctagcagagaggttgaggacaggctagtgtgttctaacgaactggctttgtcaacagagctggcgtttgcttacactctaaaacaaatcacctctcactatctctgcaacacttcctcagagctgaatttatgcctctttttatcttgataggaaaatatgaacaaaagattctgattaatatttatctcaatgtagccaaactagagccaaatacatctcaaaatggcacttgttgatgaaatcactcctcccagttatatttgaaggagattccccttctaagacacatgacttcaaatctctccactgcatcatgcaatgctcagcagccttctgtgagtacattggtggcagttctctttttctagaatgagccagaggcaaacaagcttttgaggttggaaaacagtgacgagaaattggttcataaacctacacttgataatcatccatgcttttgccaccagtattgcaaattctacgttacaattttatgttgtcttacatccttttggcagcatgtcttaaccacatataaaataatctgtagcaggaaaaaagttatcagtccttatctttttagctttgctaataaagatagtagaactgagattctgtgaaattatgtccaattttttccccaagggtagaaaagccaaacagcctggagataatgaatatgaccccaaatggcaattgtagcaggtctttctaagcagcagtcccaagtaaaagatctatgaatcaaacaaacaatttgtattttaaaagaaatttgctactccctctttcctatagaagagtcctgaaaataaaatcagggctgttcattttacttaatactctcaagcaccaagcaagattacaattccttgcctgcctatgatcccctgtaattccaactagctctgtgaaagcacagacctgttttggcatttcacgttctgctgcttcatcaaggccagctccttcactgcaggctcttacgacagcacatacttctcttaacagccatgttttcagtcctcgtttcaacagaagactctaatcttgtgatttttccgatgccataccaaatatagattttgctgacacttccctgattttctaggatttaaaacatttcaaacaaacttttgaagcaaacgatgacaatgtgtttttatgcttacataacccatctcagttatttcagactcaagatggaatcctagccctgtatcaagtagaaaacaaaacaaaacaaaagccagtgagttgttttagtcatcagagtagtgctgttttcaagtattccgcctcgttctcctaccacataggtaatcagactagcaaaagttaatatggctgttttaaattaaaggcattcagatgctgtttttttctcgaatttttgaatgtgttgtttaacacaccgaatttctgtgcagtgaaatggagagacttgatgagaggctattgtcagctttagcctggagatagagatgtgaccaagtatatttttctcaggtgactctccctttatggggaggactgtgtttaagaactgctgagagccagaggcagagatctgagctgggagatttaagactatggttgactatacatgtaacacaaaaacaataattcaccaggcatttcttcctaacaacacaaactttaaaagacttaacaacaacaaaaatcaacatttacttactggataatttaacttttgatgcgtatatataggttttatgtctagaattatttaaatttgtgggataaaaggtgatacttttagtagagttgtcttaagtgcaaataaaattgagctaaagttcaataaaagtatttatacagcaatttaaggtagtaagtatttttatgtaattgccttttctgttcttcccataagacattgaagtacatctaaattattatccccaatttatacctgagactcctgagattcacttgcccagaatacagccaatagaggtgttgtcaatttctctagttaaacccatgattctcttggggaggtcatatactaaacatctctgttatatcttccattttcttttttcttgcttactatgtttctttcagttcagaaatattttcttccaactctcctaaaattaaaaattttagatctagttcctaagaaatttatgttatgtacaggtgtatatgctggtggtggttgccagtatgagaaaaaagtctttgttttctgtttgtaacatggacattttgaagaatggatgcagtataagatgctactttagctttctatgtagatataatgaattggagcatacatggctatcatggctatttataatcactcctttatacccttgaaaaacaattgcaaaacaataacataccacatattcagtgtttcctgatgtacagagtcaatgtaagtttcctgaagtgaactagtgtgcaatctaattagagtgctaccctatatctctaacagttaatacagaaacacagaggatacgatcatacagcatatacagaatgtatgattccgtacgatatagggtggcactacaattagattgcacactagttgatttcaggaaatttacattcaaattaaggccctgtctctttatggcctgagccagaagggagccaggctctgccacctgcccaactgggcttgccaggcacaggggactaacaccatagtagggcaacttgagtggtagagcttgtggatgaggttcaaatttggcaccagggacttccagttgggctaaatgaagcacagaggggtaagctagactttaatcatgtcttgaatctgtcaggttggtcacatttcagggattcttttgatgggtatgaagtgacacacatttcaattgtggagtagtacctagagggcaggttttagagacagtttgacttgctttgcattgtatcctggatcattcatttactagtgatatgagctgggaaaagttagttacctttggagcttcagtttccattttagtaagtgtcataggattgctatgaagattaaagcatgtggataagccatgtaaagtgcttgaaacagtgcctacaaaagggtgagcactcagcagagcctatttataatgatgattattgttgttatatttaatttggagaggcataaataactggcaaaaattagcaaagtaatcaagaaggagtatatgctt

SEQ ID NO: 1882410 - DNA, 4001 bp, Homo sapiens
ttggactggctctccttgctcctcagcctgcagatggcctatggtgggactttgtgatagtatgaattaatacttaacaaactcccctttatatatatatattatatataatatatgttaaatatatataagtatatatagtatatataatatatattaaatatatttaattttatatatattaaattatatattatatataatttaatatatataaaattaaatatattataaatatatatttaatatatattatatatataatatatatatattccattagttttgtccctctagataaccctaatacaatgtcccaacttccagccttcctgggatggtagtgtcattccacagctttgcagagccaccctgttcctccagctatctgggagggacctgcccccacaactgtctgagagggccccacccctgaggctctatgtgagggccacatagctctatgccagatcctctttctctgaaaccaaggagaaaacagtcttaccccttgggcctgtggcaggagtggcagtcctgcctatctctgaattcacttcagggccattcttcccttttcttgaagaacagtgcatcttcacagccaaatacctctatggtcctgccctgtagaatccaagcagccttgacagccttcctttattttgtcccatctccatcccctttccttcaaactggcagagtttctgctcatatacgccacaaactctttgtcaagtgatagttcagccacacctttgatgttctctttagaacatgctttatctttttttgcaatatggatagactgaggattttctcaatatttaatttcccatatttttgggggttttttgtgagttggttggtttgggattttattgtttgtttgcttaacaattccttcttcaatttatctctctcttcttgtgttttactataagcagtcaggtgataccaagccactgcttcaacactttgcttagaaatctcttcagctatataaccaacttccttgctctcaagttttaccttctgcaaaatgtgaggacacacagttcagccaagtttgttactttataacaaggataacctttccttgagtttcctataacatgttcctcatttctatctgaaacctcaccagaatggcctctaatgtacatatttctaccaatattctgttcatgattatatcccagcccaaggaagttgggtgggacaggtttccccttactcatgggaatgtcagccttctgtcctgttcaggccctcaactaactgaatgagacccactcaaaatatggaggacaataagctttactcagtctactgaatcaaatgttggtttcatccacaaacaccctcacagacacatccaaaataatgcctgaacaaatatcagggcaccccatggccgtggcaagttggcatataaaattcaccatcacaggtaccttctattttacttccaaaatttgtctggatttattgacaggatatgttttttattgtctgtttaattgattcatccaacaaaaattcatgagttactattatgtgcagagctatacaatttcctatattctgtacaaaattctgactgctcagagaaagacttttttcatttaccacttaagcagaggagggaataattactttctttccctttaagagacatacgatatttgagaaaatgctggttagtggaatacctgttctcagcatggttttccaacactttagacttacaaataagtgacctgttacagacattgatgttggcaatatcagtaggtctgagacgcagaccagggtaactatattggaaacctacagtgaaaatcatatataaaaagaaaaaatattcacttacttgcaactgtagacacgtgctgatgagaagggagtgagagctgaaatcactggtcattccaaatggtctgagggcccagtctcagccctaaccctgccagagaagggcaggtttctaggggctgtttgatttgtggactctgactcagcagggcttcagcagcacttacatcatgtaaaagaatgatttgatgcaagcctcatttaaagggtcactagatagctatgatttttgacgtctgcctgtttctgctcaatgcgtgtagaaacaaaaaacaaaacattttgatcaatctagctcccttcaaaaaaaggtaagatagtagtgactgtacagataacaaggtcacttctcgataatatctagatgtagacaaaagaaaacagcaataaagagccatagtatctcacgacggtgagatcattgtgacaacacactgattcttcagggaatgtgcctgtgtctaagacactttctcagtatgtatttaggagcccattctgcagtgcgagcgctaagctatttcccattttagtggtatctataacagataataaaaatcactggatatttacaaaaaccttatctacggaaaggaaagaaccaagtttccaacaaatacatcagagttttgtgaaagaaaatcaattcagccagatgcagtggctcatacctgtaatcccaacactttgggaggctgaggcaggaggatcacttgagcccaggagttcaagaccaacctgggcatagcaagaccctgtctctacaaaaaataaaataaaatagccaggcttggttgcacatgccttattcccagcctctgactcggtggggcatcagcagtgatgccctctattcagaggctgaggcagaggaatcacttgagcctgagaggttgaggctgcagtgagccatgattatgccactgcacttcagcctgggcaaaagagttcttttcttttttttttcttccaaaaaaaggaaagaaagaaagagacagaggaaagaaagaaagaaagaaagaaagaaagaaagaaagaaagaaagaaagaaagaaagaaagaaagaaagaaaggaagaaagaaagaaagaaagagaaagagaggaaggaaggaaggaagaagagggagggagggagagagggaggaagagaggaagaaaaagtaaggaaggaaggaaggaaggaaggaaggaacaaaaaggaaggaagagagggaataaattcataggtaaagggggaactcagtaagtataatctcaacatccaaaagtccttcaaaagggcttattcaaatatctatcatggaaattgccttccaatgtgactatccttacagtctgtggtgactagagaaaaagattgatttatcagtaacagagaaatgccttgtgtaaggataaatgggcactgaaatagatgaaggattttacaccatggaagatcagtattctaactagtttcatgtaataagtaaatgtcatggaggagtcaggaggggaatgtagaagtttaaagatggaattaaactctttggagtagtgaaaacaccacattaatgaggagtacaggagatttaacttggtctaatgaacggagaaaaattgcagataaatttctttgtgagtaagcacaaagtactgcaattatagatataaacttacggacactgagctataatttatagcccagataatggttttggaaagttacgaagggtattgtgaagacgtgatgcttaaagttattttagcaatagataatgaatacataagtgaagaccctaaagatattggccagttgaggcactgtttataaagcccagaaaaatactgaatatcatcaaagccctcaaaccccaagcacatcttttaacatttattacattaccatgggttcaatattaatacagaatgggatcttatattaacatgtcatatggaaagataagtaatcagaccaagcctgtcattgaaagcatctaaaatttcctgaaagcatattttaagatatttctaaaagcactgaaaagctagcaagatagcattaataaaccaacacagaaacccaaagagacgaacagagcaccaagaccacttttgccctaaggacttcaagctaagaatt

SEQ ID NO: 1882411 - DNA, 4001 bp, Homo sapiens
gtgatagtatgaattaatacttaacaaactcccctttatatatatatattatatataatatatgttaaatatatataagtatatatagtatatataatatatattaaatatatttaattttatatatattaaattatatattatatataatttaatatatataaaattaaatatattataaatatatatttaatatatattatatatataatatatatatattccattagttttgtccctctagataaccctaatacaatgtcccaacttccagccttcctgggatggtagtgtcattccacagctttgcagagccaccctgttcctccagctatctgggagggacctgcccccacaactgtctgagagggccccacccctgaggctctatgtgagggccacatagctctatgccagatcctctttctctgaaaccaaggagaaaacagtcttaccccttgggcctgtggcaggagtggcagtcctgcctatctctgaattcacttcagggccattcttcccttttcttgaagaacagtgcatcttcacagccaaatacctctatggtcctgccctgtagaatccaagcagccttgacagccttcctttattttgtcccatctccatcccctttccttcaaactggcagagtttctgctcatatacgccacaaactctttgtcaagtgatagttcagccacacctttgatgttctctttagaacatgctttatctttttttgcaatatggatagactgaggattttctcaatatttaatttcccatatttttgggggttttttgtgagttggttggtttgggattttattgtttgtttgcttaacaattccttcttcaatttatctctctcttcttgtgttttactataagcagtcaggtgataccaagccactgcttcaacactttgcttagaaatctcttcagctatataaccaacttccttgctctcaagttttaccttctgcaaaatgtgaggacacacagttcagccaagtttgttactttataacaaggataacctttccttgagtttcctataacatgttcctcatttctatctgaaacctcaccagaatggcctctaatgtacatatttctaccaatattctgttcatgattatatcccagcccaaggaagttgggtgggacaggtttccccttactcatgggaatgtcagccttctgtcctgttcaggccctcaactaactgaatgagacccactcaaaatatggaggacaataagctttactcagtctactgaatcaaatgttggtttcatccacaaacaccctcacagacacatccaaaataatgcctgaacaaatatcagggcaccccatggccgtggcaagttggcatataaaattcaccatcacaggtaccttctattttacttccaaaatttgtctggatttattgacaggatatgttttttattgtctgtttaattgattcatccaacaaaaattcatgagttactattatgtgcagagctatacaatttcctatattctgtacaaaattctgactgctcagagaaagacttttttcatttaccacttaagcagaggagggaataattactttctttccctttaagagacatacgatatttgagaaaatgctggttagtggaatacctgttctcagcatggttttccaacactttagacttacaaataagtgacctgttacagacattgatgttggcaatatcagtaggtctgagacgcagaccagggtaactatattggaaacctacagtgaaaatcatatataaaaagaaaaaatattcacttacttgcaactgtagacacgtgctgatgagaagggagtgagagctgaaatcactggtcattccaaatggtctgagggcccagtctcagccctaaccctgccagagaagggcaggtttctaggggctgtttgatttgtggactctgactcagcagggcttcagcagcacttacatcatgtaaaagaatgatttgatgcaagcctcatttaaagggtcactagatagctatgatttttgacgtctgcctgtttctgctcaatgcgtgtagaaacaaaaaacaaaacattttgatcaatctagctcccttcaaaaaaaggtaagatagtagtgactgtacagataacaaggtcacttctcgataatatctagatgtagacaaaagaaaacagcaataaagagccatagtatctcacgacggtgagatcattgtgacaacacactgattcttcagggaatgtgcctgtgtctaagacactttctcagtatgtatttaggagcccattctgcagtgcgagcgctaagctatttcccattttagtggtatctataacagataataaaaatcactggatatttacaaaaaccttatctacggaaaggaaagaaccaagtttccaacaaatacatcagagttttgtgaaagaaaatcaattcagccagatgcagtggctcatacctgtaatcccaacactttgggaggctgaggcaggaggatcacttgagcccaggagttcaagaccaacctgggcatagcaagaccctgtctctacaaaaaataaaataaaatagccaggcttggttgcacatgccttattcccagcctctgactcggtggggcatcagcagtgatgccctctattcagaggctgaggcagaggaatcacttgagcctgagaggttgaggctgcagtgagccatgattatgccactgcacttcagcctgggcaaaagagttcttttcttttttttttcttccaaaaaaaggaaagaaagaaagagacagaggaaagaaagaaagaaagaaagaaagaaagaaagaaagaaagaaagaaagaaagaaagaaagaaagaaagaaaggaagaaagaaagaaagaaagagaaagagaggaaggaaggaaggaagaagagggagggagggagagagggaggaagagaggaagaaaaagtaaggaaggaaggaaggaaggaaggaaggaacaaaaaggaaggaagagagggaataaattcataggtaaagggggaactcagtaagtataatctcaacatccaaaagtccttcaaaagggcttattcaaatatctatcatggaaattgccttccaatgtgactatccttacagtctgtggtgactagagaaaaagattgatttatcagtaacagagaaatgccttgtgtaaggataaatgggcactgaaatagatgaaggattttacaccatggaagatcagtattctaactagtttcatgtaataagtaaatgtcatggaggagtcaggaggggaatgtagaagtttaaagatggaattaaactctttggagtagtgaaaacaccacattaatgaggagtacaggagatttaacttggtctaatgaacggagaaaaattgcagataaatttctttgtgagtaagcacaaagtactgcaattatagatataaacttacggacactgagctataatttatagcccagataatggttttggaaagttacgaagggtattgtgaagacgtgatgcttaaagttattttagcaatagataatgaatacataagtgaagaccctaaagatattggccagttgaggcactgtttataaagcccagaaaaatactgaatatcatcaaagccctcaaaccccaagcacatcttttaacatttattacattaccatgggttcaatattaatacagaatgggatcttatattaacatgtcatatggaaagataagtaatcagaccaagcctgtcattgaaagcatctaaaatttcctgaaagcatattttaagatatttctaaaagcactgaaaagctagcaagatagcattaataaaccaacacagaaacccaaagagacgaacagagcaccaagaccacttttgccctaaggacttcaagctaagaatttaaagttttagagagagacaatatattatagaaaaaagtaaccagctaacttg

SEQ ID NO: 1882412 - DNA, 4001 bp, Homo sapiens
ctgtagtcccagctactcgggaggctgaggcaggagaatggggtgaacccgggaggcggagcttgcagtgagccgagatcgcgccactgcactccagcctgggtgacagagcgagactccatttcaaaaaaaaacaatactaggattgaagtttgcttcctaacttccagtgacacggttttttcaatctaggatttaaaacaaaaattatgctttacagcaaaggagagtttgggttttcactcccggaggtgttcggaggccaccgcagcccacaccacgcccaggtggagccaccacctgtgcctctgcagccactgatctgggagctgcccccagaggcagctgtgcagatagcagatactgctcctggttgaggaccaaaatatgaataaacgggctcttcaaggacagcgtgacaatattaaataaatgttgcataatgcaaacactgcacctaggtaaagccacttacaaaattgatttattttgatctgttttaaatttaaaggtttgtaatgtggaattaccgtgctgggtaattgcccacacaccacattctactgagccgaatgacattccatgtatacttcagagctgtatctaatttcttaaacacaaccttttttttcaaatttatgtcactccataaaaagcaactcttttcacagtgacaattgtaagtaaaaaatatgaaaatattttccgtaccttttcccaaaatttcactaaatcttgaaaacagaccttaagaatatttttcccgcacttacatatctctctcctctgccacctctgctgcaggtcttttggacttgaaggccttggttgtattgggattaataaaatatgtttatatacatgatttataaaaagtaaaacaaggtcgggcatggtggctcatgcctataattccaacactgggaggccaaggcaggaggatcacttgaggccaggagtttgagaccagccttggcaacatagtgagatcccatctctaccaaagaaaaaaaaattgttttaatgagctgggcatggtggtgcctgtggtcctagctccttgagaggctgaggcgggaggattgcttgagcccaggaggttgaggccgcaatgagctgtgattgcacccctgcactcccgcctgggcaacggagcaacaccctgtgtctattttttaaaaataaaaaagtaaagcaagacaacactatgactctccatcctaacacaagtcaagtcctgagcttctgtagaaagagcccaccacggccatgcaggacctcatggagaatcagcaggtgcacgggtgctcactgcagctcccgtctgcatcctggaagctttgggtcttggactaatgaggactaagcctgcgcagtcagttctctcagccagagactgaaaccaccaccaaagaaccttgaggaaacgcgcccatccttgctccttgggaaaatgtggatagttaacgtgaccaagcaggacagcgcggcagcctccctcgtgttaaacccacgttgtactcatcctgggggtgcctaaaacgtggcagcctcaattcctcaatggctctgggattcttgggaaccgaggggagggaagggtggtgctggctgcccgaggctcagccctccaggccttcccagagcgccagggccgccactgccctccttggagcagcgttgcatggctccacgaggaccagggttcgaaaatttgaggtgctgtctctcaagctcggagtttgcgggagcccttgccccgccggctgccgtaaaagctttggttaaatgctctgaactgaaggtccttcccgcgccccctcagagactccagaggcacactcacccccagagtgaagcagcagacagaacccaggaccttctctgcactcacacgggagaggagcatggacgggcctgagcctgaagcgtcgtttcctaaaaagaaggcgctgctcccggcccccgcacgaggccctgccggagtctctgccagcactgcgcctgccgctcttccctcagccccatcggcaggaagtcggctctttaaagagttttaaatcagcagtaaatcacagtttctaaagctgtagcactgattgcagcgaaccctccagactgggcatcacgcgtgcccgtcaggagcagcagccgctgagactgtgattctcctgcagctgtggggaaacagaagtccagtgtttatccagatgcatcatttgcaactattcactcgtgtgaattaataacaaggaaagcacacatggtggggggagcccgagcttcgtccccacacagtgtgcccctgctgtgtgacctcaggccagtcccttggcttctctgggcctcagcaactcacgctttttttttctttagggacagagacttgcttgttgcctaggctggagtatagtggtgcaatcatagctcactgcagccttgaactcctgggctccagccatcctgccacctcagcttcccaagtagctcggactacaggcatgcgccaccacacctggctaatttgtgtatcttttttttttttttttttttttttttttttttagagatggggtcttgccacattgcccaggctgggcttgaactcctgggctcaagcaattctcctgcctcgtcccaaagtgttgggattacaggcgtgagccacggcacgattctactcacacgttttgaagcttgccacactgacgctgtcttctattctattctctgcactaaattatgagaaagaattgagatttttttcagggatctaaaccaaattgtacagcactggtctacacacatgcacacacacgccctgtgaaacagcttttacctttcagagcataatcgggacattgtaaggtgttctatgtagttttaaaggagtggagaaggtactcacatccaccagcaaagacgtgagacaagggattcaggggcagggtgacatttggagggaaagggaagggtccttcacccacaggccctgcaggaaacgctcgcggtgggaggacctgggctttgctcatcacctcccttctggtcaggaccccacagcaggacagcgtgagcccacgtgcttgtgttctgagcaatgtcacctcagcagatacacagcagccaggcggtcccaggctccacaggcagagactcaggttgggtgttggctgtttcttttttccaatatccacctcccttgaaatcaggactttgaaacttagttttgcagagattgtgtttccctgcactctactgaagtaattaccaggtttttcctgacctttgctgaccccagggaagtgtttttattcacatttccattctgggatttctgcgatctcctggatccactgcctgcaattccttggaaagacccaaaccggaggaggcagagggttcccttcagcaaacacgctgggcccctgcagtcacaaggcacagagagcacgagggtcccacgttctccgcacggtccctgcagtctggaggtgcagggagtgtgtagctgttacacatccgatggcaagggcgtcgactgtgatcacggggcctgatgaaatggatttagaatcagtttccccatctgtgaactgaaaggctgggagaggtgatttctccacccagggggcctccagtcctggtgcattggggccattcttggaacacccaggggcccttctaacagcagattaaacatgcactcaccggtccctgccacacagaacatgacacttctgcatgagtgctgaggggtctgggtgggagccatgggcagctgacgccatcagaaaaagcttccgcatgcaaggcaggaggaggaggaatacagctgtgtgttctgagagatgcatgtgaggtgattttgtcactgtgttaacatcactgaggacacacacacacacctagaaggtgtagcccaccgcacacccaggctacgtgctggaggccgaagctccaggctacaaactcacacagtgctgaatactgcagccaat

SEQ ID NO: 1882413 - DNA, 4001 bp, Homo sapiens
atgaggattgttatgaaaacataagttgtaaatttcttgcacatttgggagttgtttcgggaaaacagaaagttggtgtttttaaaacatttttagtaataattgtatggtgttatttatgaaaaaataattcactaggttttaaaaattaaaatctgtccttaattaaataactcagtactcacagaaaggattttgaagaaaagtgtcttgtagaatttctgtctttacaaacagagccctgcagttgcaatggattgatctaatcagtcaattcattgattagaaactgaaccaagtatttgattctgtatctttaaattagtctaattcatccataatccatgtgatttactggtagcaagttaaaaatgacaagaaacccagcctagtttgtggcaactgtcttgagctcttccactttgattctaccatttacccactcattcatttaatcagctctgaatgagactctactatgtggacagcaatgagtaagataccattagttgctgtgtctgggtgcttattttggtgtaaacagacctttgactagttcatttaggttacatttcaacataatgtaatatgggctatagtaggagggagacctgacctagactgggattgccaagagaggtcacccagaggaggtattggatacctaagctgtcatgaaggatccagtaggtgctcgctggggagggagcggaacttgttccagccaagggtagcagcttgggtgcacagatgagagggcatataaggactttattttgggaaatagtgaggaactctgggggattgggatataaaatgcaaagcagaggggtgtgtgtgtgtgtgtgtgtgtgtgtgtgtgtgtgtgtgtgtgttaggtaggagagttggaggagggtaatgtcaagagttgacaggagttctaggcttagaaccagcaaggactctggggggctttaagtaataaactggccagactcctgaagctggctgctgggctgggctgattagtcttaggacaagataggcttcactggctgccagcctgggccaggccccacacacctcaaacacaagcagggattgaaggagaggaagatgcagtaggcactgaccttctgaccttggcgggatgcttgaaccattctgccctttcagaaggttctgcccctctgagctcatttcccctcctcaccctgtgatgacagtcttagcactcaagatgtggtgacctgtcgggaagcgggggcaggggcctgctgtctcctttttaactcggtctccagagcccagaagattaggttgttgctcaatgtttgttgaatgaataactgaatgtgagaagttgttggagaagaacgttcaggaagaaattttgtggtgatcaccacccaggtcctgtggttgaagtctcagccttttggaggaaggcgttgcaaggttaatacgggctggtatacagggttgctgtgggcccagagtgcaggggagatgcctggtcccctcctccagtcagtcctccctggagctgggcatagtgaagtctctggggagggcagcacccacaggctctggcctggcctctgcattcccacagaagtagtggtgagaggagtcaagttaccacgtgaccttgaatgaaagacgtttgaggggagtggaaggacaggaatggagactcccaaactcatggggacagctttgctgagtaccagaaggccagtaagtaaggcagtgagccagggagagctgggttattactgcttgtgtgatctcacccttcaccgccagctcatgaagtctgaggaaattcaggttgcctttgatattaacctccatgaagactatcactgattgaatgatagccttcggttactctctgttctccaaatacatcctctctttttgccccatgtcttgacatgagtggttcctttgcttggagggcctcctgtctcttcttcatctgacgcagagcttctgctcattcttcaaaaccctagtcagatattgttacttcactgaaaactctcaccgccagccagagttccttgttcttccctttgtgacctcgtagccttgtcacagtgctctctgttgtgttggaataatctgtttacttgatgtattaggccattcttgcactgctatgaataaatacctgagactgggtaatttagaaagaaaagaggtttaattagctcacagttctgcaggctgtacaggaagcacggtgctggcatctgcttggcctccccaggcctcaggaagtttacaatgaggctggaaagcaaaggggaagcaggcccgtcacatggccagagcaggagcaagacagccagagactgggttggaggtgccacttacttttaagtgaccaggtctcacgagaactcactcactattgcaaagacagcaccaagccatgaggaatctgctcccatgacgcaaacacctcccaccaggccccacctccagcactggggattacaatttaacataagatttgggtggggacaaatatccaaactatatcacttgactgcctctccagtgtgactctgagtttcaagggtaataatcctgtcttaaaatttatgtatatacaattcatgccacagactctcattgtgaaagaaaaaagcacattaaagaacatatctaaggcattggaaatagatcatccacagttattcctaaaaggtaatgagtagttgaattaacaaaatatggtatttatgtacatgagtattatccagccataaagaggaacatatgctgcaacatggcttgaaaacattctgctcaatgaaataagccagacacagatggataaatattgtatgattccacgtagaggatttacctagaataggcaaattcctagagatagaaaatagagtataagcttctaggggctggaggaaaggggagaaaaggagttattgtttaacaggtttggagtttctgtttgggttgatgaaaagttctggaaacagtggtgaatgtacgtaatgccactaaattgcacacataaaaatggttgatgtagtaaattttattttaagtattttttaccacaattctttttttaaaaaaagcaacaagaagggaagaaacaactgaaaaaattagcagtaaagtgttccaatgacccaaatgcagagagtagttcaaaagtatgtaaaccagttacgtgtgagacagggcactataggctttttatcaagagaagaaacccgggggctcaagcctgtactcccagcactttgagaggccgaggtgggtggatcacgaggtcagcagatcgagaccatccttgcgaacatggtgaaaccgcatctctacgaaaaattaagccaggcatggtggcacacacctgtagttccaggtactcaggaggctgaggcaggagaattatttgaacccgggaggtggagattgcagtgagccaagatcgcgccactgcactccagcctgggcgacacaaactccgtctcaaaaaaaaaaaaaaaaaaaagaagaaaccctgtgttctttctcttgacatagtgtttagggaatcagtaagattccatcaacataagcatcatattctcttatttttctgcaaaatcatcagcagcaagtgctttttcctaacattaaaatatatttattctggctgcgcacggtggctcatgcctgtaatcccagcactttgggaggacaaggcaggtggatcacttgagcttgagagttcaagaccagcctgggcaacatggtgaaaccctgtctctacaaaaaaaaaaaaatacaaaaaattagcagggtgtggtggcgcacacctgtggtcccagctatttgggaggttgaggtgggaggattgctggaacccttgaggtcgaggctgcattgagctgagatcgtgtcactgcactctagtctgggtgacagagtgagatcctgtctcaaataaataaataattgaaagttaattatacttctgtctatggaatttt

SEQ ID NO: 1882414 - DNA, 4001 bp, Homo sapiens
ccatacaggctttggtctttgatttttattatttattgacttttatttatttatttatttacttatttacttattttgagacagagtcttgctctgtcatccaggctggagtgcagtggcatgatctcagctcactgcaacctccacctcctggattcaagtgattcttctgtctgagcctcctgcgtagctggaactacaggcacacgccgccgcgcctggtgaatttttgtatttttaatagagacagggtttcaccatattggtcaggctggtctcgatctcctgacctcaggtgatccacctacctctgcctctcaaagtgctgggattacaggcgtgagccaccgccccctatctttgattttgaaatgccagtctgcatcagctagaaccttccctacactggggtactgagttgaggaatgaacttccctctgtgttgtttgctctgtgaaacttttgacctgtctgtgtaatccttagatgtatcgaggtttaaagtatgctctgagatttgggagagaagagaaggggttttaaaaacagaagcaattgaagcattgagcgtcaaactttacctctagaaacgttccagcgattcccacgactctgtcatgccctggagagaattttggtatagtcgctatgcatcttttcacataattataatcacatacgcaattttaccctttctaaattcaccatgatattataaacacttattttctgttgttacatattttcctttaccttgatttttttaaaaaaatccataatatccaggccttcttccttggaaaacaaaaccactgagtagtgacactcaagagttaagggaacagaatcccagacctggttttgccaccaactagagataccaccaaaggattgtcccctgagttccctgagttttctcctccatgaaatgggtaccataattcttacttcacaggactgttacagagatgagatgaattaaggttatagggcccttgtaaactctaaattaatattcaaaaataaggtgttaatgtctatctttagaggcagtaagcaaagctgtagaaactaggtagttagttctctctgctgatcaaggctatggtactcaaaccttgaatctagagcccaacacttaaggagggagaacctgtgtgttcaggctgtgctccagctgctggctcagggtagggggtcttcctcccacatataagcaagaggaatcactaaagcagagttcaaatattcaatccagaaagcaatcagtaatggaagaactgtaactctggtttctttataaatggagctgagaatcccaggtatttctgataatttaatgaaggtttatgaaattttcttagtcttcccatgcctttgtattttgatttttagaatgaatgtacttcaagcttagcacgtcccttatacactgtaggagtatgatagatctatgttgacctgaatgaaggtatgagcagaggggaattatccacgcaagtatggtattatttactttcctcttattattgagctggtgattccagtatttccacggaatagtagatcaacaggcacatttcggatttgactaatcagagctgcagatgtggtctgacagttcctctcatccactcagttctgctctcttggttgctttctcgattcctattcccagatatatttctccctggagactgttttcttctggactagtctcttaatcttcccaacccatatttggagagatgtttcgtgctcacccgtgaccatgagaaagtgttgcactttctggcctcccttgcagttaggcagggctatgtgattggttccagccagtgtgggctgtgagggaaagaggtgtgttacttgtgggctgagacagtgagaagctcgtgcataattctccaggctttctttcttcacctcatcaactgaggagaccacaagttcaggaatcatagccacaggatggtggagccgccattggcctcaactctgagtcaccatggcaacagtctccttggagaatcatgtggcccacaatggactttatgtaattgagaaatccatttttgtgatgtcaagccaatgatatctggggattatttgtgacagtggcacaattgtgtttattctgactacacattccatctctaaaatggcctcagtctgttctctgattttaaacctttcttgtatgtggggagtacatcctgaaaattttgatgtatttatattatttagattatattgccatattttccaaactgtggcctacataccactggtggtatgtaggatatttttatgtggaatatagatagacatacctgttttttaaatatttacatgtataattcttttccacttatggcaagtgatgtgtctttcccattcttagtggttgcataaatgcttcttttacaataacattggagaaaatgaagtgacttaaggagaaatatccagcagataaaagtataattgatgtgcagatatggcaaaagtctgagaaatgctattcaaatgactgaagatttgggaagtgctgcgtgtgataagttatatggtggaatgtcttaaagaaatctccaccagaccaggagattttcatttttgacaaccagttcacagaattcgattcagtagatgtttttgaatgagtaaacattactataaaaaatgtttaaatctaggaacctaaataataaaagtcccagtccaatcctttgaggtcaatttcattgtttttctccttattctctgctcttaagagattctgtttcccttaagtgtgttaggctcaaatcagatttaaccaaagatcagcattcgtggcatcataacatttaagaatttaaaatgtgtgcatgacatttttagaaataatgatttgctttgctgatattaaaaaacgaggttgctgttggtctgagtcacaggtgaagccccatttgtttttccattcagccacccgctggccctaatcacaaatgtctttgtactcacagtcatcttatgcagggtttgtacttcggcttctctcactgtgctggagattaaaatgtgagatgaggagtaacacacttgccagtgacatggaagtaaatattattgtttttggggggtgacatcgactgcatttcaaatacagccatgaaaatgttctatcaatagctttctatcgattggcagttttgtgccttttcagttcagctcccagagctggtcctgatgaggtgactggcaactcaccccaggtgtggcaggcccctccccactctcctggggctctccctctccccgcttgctctccttccctaatccccacacctttttatgaagatcagtcctttgcacagcagccatggccagcgtgaggtgcatgtgcaagtggagaagtagcaggttcatcgactcgttctggtagggggcctctatcttattgagcacacttttgacggtggagatgccgctttattgcaaatccctccccggactcctcctcttcttccaaaattcaggctgaagacaattgccctgattccctaacctaagggatggctctgcaagtggtgatcgatgtttatcaaatgcccctgagactcgaagacgcaaattatattcctatttttcatgaaatttaaaaaactttctaatttaagatcatttaacttttagctgctgcaaaactggtacatggagttctcgtatactcttcacctggactccccaaatggtaatatcttacaaaactgtagtacaacgatggaaatcaagaagggaatgtaggtaaagagcagtacagtacagtacttctaactaatctgcagctgtcattcaaatttagccaattatcccactaacaattatcattgttagtaacaattatcattgcggtgtttgtcagatggtgactttctagttatcatccttctgcatttatcaattggaattctactacaatgaagagctacctcttctgagctatttattca

SEQ ID NO: 1882415 - DNA, 4001 bp, Homo sapiens
aaacaaaggtaccacacatttcaatgctaacattgaatgtaaatggcctaaatgctccacttaaaagacacagaaccccagaatggatagtaactcaccaaccaactatttgctgccctcaggagactcacctaacacagaaggagtcacataaacttaaagtaaaggggcggaaaaaggcatttcacgcaaatggacaccaaaattgagcagtggtagctattctcagagaaaacaaactttaaagcaacagtggttaaaagagacaaagagggactgtgtataatgataaaaggccttgtccaacaggaaaatatcacaatcctaaacatatatgcacctaacactggagctcccaaatttataaaacaattggtaatagacctaagaaatgagatagacagcaacacaataatagtgggggacttcaatgctccactgacagcactagacagaaagtcaacaaagaaacaatggatttaaactatatgttggaacaaatggactaaacacatgtatacaggacatttcatccaacaactgcagaatacacattctattcaacagcacatggaactttctccaagatattccatatgataggcctcaaaatgagcctcaataaatttaagaaaattgaaattatatcaagccctctctcaggagacagtggaaaaaaacctggaaatcaactccaaaaggaacctgcaaaaccattcaaataatgaaaattaaataacctgctcctgaatatgagcattgggtcaaaaatgaaatcaagatagaaattaaaaaaatatttgaactgaatgacagtaatgacacaacctatcaaaacctctgggatacagcaaaggcagtgctaagaggaaagttcattaccctgaatacctatattaaaaagtctgaaaaagcacaaacagacaatataaggtcacacttcaaggaactagagaaacaagaacaaaccaaacccaaacccagcggaagaaaggaaataaccaagatcagagcaaaactaaatgaaattgaaacaaaaaaatacaaaagataaatgaaacaaaaagctggtgtcttgaaaagataaatgaaattgatacaccattagcaagattaaccatgaaaagaagagagaaaatccaaataacttcactaagaaatgaaacaggagatattacaactgataccactgaaatacaaaagatcattcaaaactactatgaacaactttatgcacacaaactagaaaacctagaaacctagaagagatggataaattcctggaaaaatacagccctcctagcttaaatccagaagaattagataccccaaacagaccaataacaagcagtgagattgaaatggtaattaaaaattaccaacaacaaaaaaagtccaggatcagatggatttacagcaaaattctaccagacattcaaagaagaattggtgccaatccttttgacactattccacaggatagagaaagaaggaaccctccctaattcattctatgaatccagcattaccctaacaccaaaatcaggaaaggacataaccaaaaaagaaaactacagacagatatccttgatgaacatagatgctaaaattcttaacaacatactagataaatgattcaagcaacatatcaagaagataagccaccatgatcaagtgggtttcataccagggacgcagggctggtttaaaatatgcaagtcaataaatgagatacatcacataaacagaattaaaagcaaaaatcacatgatcatcttagtagctgcagaaaaagcattagacaaaatccagcattcccttatgattaaaactctcagcaaaatcagcatatgagggacataccttaatgtaataaaagccatctgtgacaaacccacagccaatataataccgaatggggaaaagttgaaagcattccctctgagaacgggaacaagaccaggatgcctactctcaccgttcctcttcaacatagtactgggtgtcctagccagagcaatcagagatgagaaaaaaataaaggacatccaaattggtaaagaggaagtcaaactgtccctgtttgctgatgatatgatagtttaccttgaaaaccctaaggactcctctagaaagatcctagaactgataaaagaattcagcaaagtctccgaatacaagattaatgcacacaaatcagtagctcttctccacaccaacagcgatgaagcagagaatcaaataaagaactcaatcccttttacaacagctgcagaaaaaaaaaacaaaaaaaacttcagaatatacctaataaaggagtcgaaagacctctacaaggaaaactacaaaacactgctgaaagaaatcatagatgacacaaacaatggaaacacatcccatgctcatggatgggtagaatcaatattgtgaaaatgaccatactgccaaaagcagtctacaaattgaacgcaatccccataagaataccaccatcattcctcacagaattagaaaaaacaattctaaaattaatatggaaccaaaaaagagcctgcatagataggcaaagcaagactaagcaaaaagatcaaatctggaggcatcaaactacctaatttcaaactatactataaggccatagtaaccaaaacagtgtggtattggtataaaaatagtcatgtagaccaatggaacagaatagagaacccagaaataaacccaaatacttacagccaacaggtctttgacaaagcaaacaaaaacataaagtggggagaagacaccattttcaacaaatggtgctgggataattggcaacaaatggtgctggaatataggagaacaaaactggttcctcatctcttaccttttacaaaaatcaactcaagatggattaacgacttaaacctaagacctgaaactgtaaaaattctagaagataacattggaaaaacccttctagacattggcttatgcaaagatttcatgagcaagaacccaaaagcagatgcaataaaaacaaagataaatagctgggacctaattaaactaaagagcttttgcatggcaaaaggaacagtcagcagagtaaacagataacacactgagtgggagaaaaatcttcacaatctatacatctgacaaaggactatatccagaatctacaatgaactcaaacaagtcagtaagaaaaaaatcaaacaatcccgtaaataagtgggctaaggacatgaataggcaattctcaaaagaagatatacaaatggccaacaaacatgacaaaatgctcaacatcactaatgatcagggaaatgcaaaacaaaaccacaatgcaataccaccttactcctgcaagaatggctataatcaaaaaataaaaaaacagtagatgttgatgtggatgaggtgaagagggaacatttctacactgctggtgggaatgtaaactagtacagccactatggaaaacagtggggcgactccttaaagaaccaaaattagagctaccatttgatccagcaatcccactactgggtatctacccagaggaaaagaagtcattatttgaataagatacttgcatacacatgtttatagcagcactattcacaattgcaaaatcatggaactatcccaaatgcccaccaaccaacaagtggataaagaaactgtgagatcaattgatctatctatctatctatctatctatctatctatctatctatctatctcacagttatatatatatatctcaccatatatatgttatataaatatcatatatgttatataaatatcatatatatttatatgatatttatgtatcatatatatttatattttatatatttatatatgtgatggaatactacacagatataaaaagtaatgcattaacagcattttcagtgacctggatgagactggagactattattctaagtgatgtaactcaggaattgaaaaccaaacattgtatgttctcactgatatgtgggagc

SEQ ID NO: 1882416 - DNA, 4001 bp, Homo sapiens
acaaagaagcccatgaaagaaagtgcccagagaaaccagagctgtggaaggctggctcgacggtgcccctcactgcccctgagaaaacagacccatttcctctctgcccacctctttccctgacatgtccccagcagcagtcctgtattcccagttcctctcaagatgttctgaatagtctctgggtatcctctcattgccttcaactcaagatatctaaaaccaaaactcattgtcttcccactcaaaacgtcctcccctttctgctgccaaccccagtcagtattgtctgcaggcttccaggcttggatccttgactcacggccacccaagcttccttcccccgtgtgcgattagtcagtaagtcttagtagtgatgagggcttcctgcaccgtgactgtccggcatgctttttcctctcccatttcctcagccaccagcaattccaggcccctctttacttcgtatgtattctagcgagatcaactggcaagacaaagctcagacgtcacctccagaaggttttcatggcttgtgataatctggcttcacctgtattctacttcatgagacaactgactatctcgtggcctcttccctgtggcctccatctctctttgcagctccagtccctggcacatgcttggcacacagctcactgcagctgctcaatgagttttgtggactggatgtttgcttgtgggaagtggaagcagggaccagatggatgggcagaaggattgtcctattcaaatatgcactggtggtcctgtcttgtgtttgggcaccagttgaatccaagagctctcaacctgtggagtgtcggatgaaatctatggaatccctcctcagaaaagcaaatgaacccacacaatgatggcgcagtttcattgtcatcagcctcctgaggcgtatccacaatcaccaggtcagaaaaccctgctccttccttgcattcaattgggcacatcactatcaaattaatttttctgaaacacgacaaaatctcatcagaaatataccacactttgttgtcccaaatgcttgccaccagaagtgttttgtatttcagattttttggattttggaatctttgcattatacttaccagtttggcatccctaatccaaaactctgaagtcagattagcgatattaaacctgtactaaggagagcaattctgaattttttggcttggcagccacggttatttttgtgcccctctaaatatacctactacctactatccccagtgtgtaatcaggccattgatgccagagagaggtgtgagtagaatgatcaccagtagtgcctgccctgagaacgtggccactggtgcccagagcagagttgtctggggactggctggaggcccatagagaggcccacacaagagctcacctgtgttgaccagctctcttgcgtgctccaattcctatgctgttgccttgactcagcatgtggttctcagtggggtgattcttccctgcaggtgacaagtactaatgtctgcacacatttacaactagggagggagtgccactggcattgagtgggtggaggccagggatgctgctgagcttcctgcattgtacaggacagcccccaccacaaagaactttctggccccaagtgtgcatagaaaagatcctggtctgcagagccctgtccacccatggtcaatcctgaaactctcctttgagtcccccagactttcctgggccctccggtcttgcaggatcttctctttctttcacacctgtccttcctgggcaacatttctccccgacaaaccagcgcctgacccttgagcaggtctcacccaatcctgcgcttgttttaaccatatccttagttaggttctaaggtcattgcgggcagggaggttcattttcctataggcctgagcacaaggtcagcgtgtgataaatatgtgttgaccctcatagatccctgaagcacagaatgaaaaataaaattgcttaaatttactgatttcaggatatgggaacaaaggaattgtgtttaaatgtaaaaaagaagttctagaatttccacagaatttacattcttcttgttgtaaggaatatgcctggtaatggaactcaaatatcagcttggatcgccctggcctttgaaatttgaggtaaaattaggcttaagccgtatccagcgcacaacagaaacctcagtgtctcccacccagggactgtctcggaggctgtgtgttcagatgtcacttctgcctcccggcatctgctcctgagttttcactcttcagcctcccctcccaaggcctccttcctaccctggcactgggcttcttgccccgtccccctagaatccgtggcacaggggctttatctgtgtggagtctctacagacggttagaaacacagagtcagctagaaattaagcagtaggcagctgtgatgttttttgacagcctcatttctaaaaccccttcagcaaccccagtcaaggagcttctccctctagactccagcctcctgctgagtcacctgcaccgtctctgccttcctccccttcctcacatcctccctggccccatcttccaattcctctgaacttctgcagagcagccagctcttcctccagcttcaacttccccaccccaagcaggtggggcatcctgaccctgagcaaaagcagttctctccctaagaaacaccggtgacttttgttcatggcactccatggatgcaaagctctgagttctgttgaacagggactcacctacgagtggtggtgctatcagctgagacgggaagcagcactcagtagaagaagaaaaggcctggactggtgtgggcatgcactggctcgtgagaagcagggaaggtcgctcttatgggtcccgtttctaagtgacgttcacggcctggctgtgtgttgtccaagtgtttttctttcttaccaaaccttggaggtctgggagcaccatatatgtcacacatgtgggcaggactggccgtcggggccgatgggagctgcctggcgcacaagtccctggggatgcccataagtgcctcacgttggcactgaagaaatgcagacagtgtgccgctttggggaaggcttgttgttgctgactttacacacacacacatatatatatacatacacacacacatatatacacatatatatgtatgtatacagagtgctataaagttattcttattttgtgagtgatacaaccttattatttaaaaattaggaagaaagttaaaaagagggtaaaactcatatctcttcatgagaaatgatcactgtgactatttcagcatacttcctctggctctgagaagaatctttaggaaataaggagcttttcatctccagggagatgccagggtcagtttcaccccaaggcaaaacccttctcattttatggggccagatgctgaagatcagaaacagttcgatcctgccccgagaaggtgtccgcctcatccttggagttaatgtggccacttcctaggcaactcagaggctttatgggtcctttcgcctcttaaaattaattgagttattcagtaaatacaggttaagcatccctaatccaaaaatacaaaatgctccaaaactgttttagtaccaaaacgacccttaaagaaggcactcactggagcgttttggatgttggatatcagattagggatgctcagccagaatgaattctgcaaatattccaaaatcaaaaaaaatttgaaatctgaaacacttctggttccaagtatttcaaataagggacactcaacctgcacttagtgagtgatgccagggagtggtaccagtcactgttctaggcactgagggtgcgttggagacaaagtgacagcaacgtccatgcttcttcctcgcagaggacagagccatgaggagggagagtctcttcacttctctgggccttagtttcctccccaggcaaataaactgaggaggctgtacccaaataaacatcgtcagagcttag

SEQ ID NO: 1882417 - DNA, 4001 bp, Homo sapiens
gagggccagtatagtgaagttaaaaaccagtttcacacactgtgatgaaattctataaactcaggattatcctgtcaaatcaagatgacatgcgtcccattgtttaaaaacattctaatggatggaacttagcaaatactgctaagaacagaaccagccgggctatgctgcagcgtctcagacatgtttccactcgctgctgcgatgtgtttgtcaaagagtttacttagagagctgcagagctatcagagaggagaagagaagcgcttcgccctcacttgaagaacagtaactgcagtcaagcagaagacacttcaaacaaacaaacagacagacagacagacagatctccccactcattctactggtcttgtgcttacctttcatttttcttggcctcttgcttcccctctctctgatggcatcttaaaggactcaatgttgaaatggtagcaggcagcagcccatctgaaggtagcattagcatttgagaggaaagatcttgaggactgagtgtgcttagccactgtgcacctcgaacctgcattgttcctcggttttcctatggagaaggatccccctgtgtgggactggcatcctctgaggactgcaggactgtacctgggtgatgagaaaggaagccaaggccatagcactataattgcagtgctctgccttaaagtccagcctcgagcctgcggctcgattttccagtaagctgagagcatggagaacaccagaaagccatttcggtttctgcttatttcttctctacagattttgagggttgaaaaagcacattccagaaaaggcagtggaaaattctaaaataaaagtgaggcagaatcagagtgaggggcatgttgagaatgcccctaccatcttgaacggagcaaaagatggctcatatgttgacagctcccaatcccccacttctggagcagattttccagggggaaggacattacagagtccagatgcctcttccatgattccagcacctctaatgttgtaaggccgtgttatgagcaccctaaagatggcacttcagcacacagttctcgaaattctgaccattctatcttcttttaaatccctctgtttttccaaatcctaaagccctgtgacacaccagcagccggtaagcgtctttcgagagaaggagcaggccagcagggcccccacatcttctttcctcagcttcatcccagatgcctggtactgtctcaagactgcaggcactgaaacgtgaccccggtgtctcaggctgaaacagcaaactcccaaccgagttttaaattctcaacaatttgtggaaattatgagatttttatgagcatgtattttacaggacttcctagaatgcctttttgagaaccctggaaggggaggaaggaaatatcaccctaggggaagcagaattaaatgtgtactctctcctgtctctctttttctctccttccttccagcccattgagaaatctacaagccatccatcgtctgaccccgtaaatttgtctttctgaggtaataagatgacacagcctttgccaggtcagatgctactttcataaaaagtgctgagttggtgacccaatgccgtgaataaggatataatcaaatttcatatttcttccttgagcttcagcaatgacgcccacttttcatggattgttactcagggaggacgcataaatgcctctcagaatcacctaattcaatcttcataacaacagtctaggtgagatggctttgtcccgttgcaggcgagttccaagcacagagaaccaaatggtttccacagagaacatgtgtagaagggattgtaacccacaactgtctgaacccaagcactaagcttcaaaccagactctgtgctgcttctgctttatacacaggccctggctgaaaacccttgactttaccaggcatgcaaggagatgctaagtccactttggctgcaggtaagaattaagtaggactaacctgggtgttactaataaggagttcaaccagggcccagcaatcaaggagggcttcgtggaagaggtggaacttggagtggcctggaagaatcgcatagaatcagcaaaaccatggaaacgacaatgagcagggaacacacacaggtcccactgtgacagaatgcacatgggtgatgagcagacatgtcctcagatgggtaggcaggaccctggaaaacaggaaatggagtctgtgtttgacagcagaagcaacggcaaccactgtcatctcattcattcatttaataattgtttattgagggtatcatgtcaggtgcagttcttagtgatagtgacctagcagtgagtaagccaggctgagtccctgccctcaaaaacctcaagatccagtagtgggccagatggacattcatgatgtttaatagatcaagtagagttccccttcattgatatctatttctaaagatgtctgtcttcccttctaacagatctctaaacgaccacggcccgaagtgtcagtttcaaatgcttgtttcagctctgccctccccacatcaaatcccacctctctcacgctaaagcatcataatatatttgtgctgagagttgccttagaaatcattcagtattcagttcacgggggaagaaacagaaagcccctagaggtgacctcattagcctacagttgccctgagaactggtggcagaagcagattggtgtccagcctcctgatgtacatgccagtgctctttcccccaagccatgtgtctcctggtcacgccctttgtccttgctgtcctctactattctcttctggaagactcacgatgagagagccgacttctccaagctgcactcctagctctctgggacccagcagggaccgctgccttccagccagcagtttgaagaaggacagctaccatcaaacacagacttacagcctccctgatgccctggatgccaggaaatgtctggaccagtcaagataagagcaaggcagagccaggaagaaatggggacaggagttcctatttaaatatataaagaatcctttcctaggtagagaaaagtcatctagcaatgtgactgatcacctctccgtttatctgtttgatcaactggaatttctatacagaaggtttatacaaagaagccacaaacaaccattgtcacaatgacccctacataattccttgtgtaaatgctctggaaatgcacccagaagtctggagaaggtccaatcaaactgggtggcaggaagaagcaagctctgttctcagatcttcaacagaatcacctggaccctggggttgccaccacgctaagccaaggaggcctctgaatgcacgggagtgcagggtctgaagggagttgttaaaaggtgtttcttgatccaggaccatgtaaagacccaggagaaataggtatcccaaagagaacagcgtataagattcacaaaccaatgacaaacacgctgggttcgctgctggtctccacagttggttggttctgtagggctcagctgcctctttctctctacttctggtttcagaaaacacgagagagaagccgagtgctcatggagtttcctcaaagactcagcaaaaactaggctttgtgttctgagatcaggaagtaacagtgagagtccaaaattttcttccctgacaatgtctcctactcaagcagggcctggaagtcaccccctagaatcaaagccttgacatatgcaagctcatagtttattgcttcttctcccatctgcccgttgacagataaatcccagagggaataaaaacacattgccctcagcagattattcttcactgaagaataccagtcttttaacactccgctacagaaatagctttctgccggctgatggcttgttgcgctgcactaagagagcccgcacacctcgaagcttcgtcaagcaaagcctatgatttcacagacccagaaatgttttctttctctaagccaataacatatgcttgggtttatgccaactc

SEQ ID NO: 1882418 - DNA, 4001 bp, Homo sapiens
tgcttcctggtccctctggcaaaccagaagggagctgcctccctgcggtccccaccctgtctccaagcttcccagcagagccccacatccagcaactgggcccagctttaaccagacggaggagcagcctgacgtcctgccagccccagagacagatgtgggcacaggaagggaaggcagggaggagaggaagccaataaaaagtgttagcatccgtcagggtgaccctttgcagaacctgcgtcagcctgaggacgcagggaaaggctgcgcgggagaagccgctgttagcatctgccagggtgaccctttacagaaactgcgtcagcctgaggacgcagggacaggctgtgcggagaagccgctgttagcatccgtcagggtgaccctttacagaaactgcgtcagcctgaggacgcagggacaggctgtgcggagaagccgctggcctttgccgcttgaaagctgggtccctgcggcctcctcaccccagggctccctcagagaaattctcatagaacccctaagcaatacgcggggaaagaacggatgccacccggaagcatgccgaggaagagtccattcatgggaacttccagagccggtcacagaggccagatccacgatcaggtgcatggcaggggcttgtccgcaggaccggaaccttggtgagcatcagcgatgggcactgtgtttccccaagagtgacctggggtgccttcaggccaggcgcagcttctactcctcatttatctccaccacgcagagcaacgtgcggcacagacgaagcactcagggaacatttaaatgagtccgtgggatgcacctaaaagaaatagaggtttccaaagaataagcaggtacaagttagaccccacaaaaaagataggcaggcaggcatttgttaagtccatttcatttcaccctagggttttaacatcaaagtatccctgtaatgaagaggcattttgttacccaaattctcatgttcttcaagagggagtagaaaggaaaaaaagatgaaaagggagaaacagtacagcccctaccttcaaacttactacccccaccatacacacacacagacacacacacagtaaatgacatggatatttatccagtctgccataagacacctggccccaccttataaatgagggaagcctgggccagcacagtggctctcaactataagctcagtctttgggtggtcaagatgggaggctcacttgagcccaggagtttgagactagcctgggcaacatggcaaaaccccatctctccaaaaaatacaaaaattagctgggcatggtggtggcacattcctgtggtttcagctactcaggaggttgaggtgggaggatcccttgagtctaggagttcaaggctgcagtgagctgagattgtgccactgcaccccagcctgagcaaaaggagtaagaccctgtctcgaaaaaaaaagagggaagctcggtgctgggtatgtcagagatggaaagactctttccagtctttatgtctcattggacaacgtgaagattcaacttccagggctgctcagtagagccaagtctggaaaacaagctcgtgggcaccacatcacaagcacgttttccctggagcccgcgttgtcactactgtattcccaactccactccgagggcctttcagggtggaggagagagctgtggccaaaggcagtgagaggcagaacccccagcccaaaagccagatttcagcctcagggacgagccagggctcaccacccccgcgacaccgcaggcctctgtgcggagactgtgctcaggcccagcgcttgcgctggagaaaaggcggagacattcagaacccaggggattccaggctgccttctccacaagggtcaggtttgtggaggagaaaggggaagattctccacccaccaggcgcctcctggactgtcaagaactaacagggactagatcacccgaaatagcagatcaaattgaaacagcatacttagcttttggaacgaaccacgaagcaggcaggaggaccggagattgcaacatactgaccttccgagtcctgtttgggtcagtttgttaaaattagtttgtcctccctggagacacggccaacgcagccttttccgtggcaggagtccaaacacagtctctgctgctctccacgcacggcaatgggaaggcagccctttcccctccatcactccggggagctcacgtgcggacggggtcctctgtagcatctttaaattggaggtgactttgtaccgttggagccgggggcagagtcagcagtgacctcaacagttaggaccaggataagttccttctgctgaaagaggacgttaagatgagaagggcttggccgggcgcggtgtttcacgcctgcaatcgcagcactttgggaggccgagaccatcctggctaacacggtgaaacccagtctctactaaaaatacaaaaaattagcggggtgtggtggcgggcgcctgtggtcccagctgctcgggaggctgaggcaggagaatggcgtgaacccgggacgcggagcttgcagtgagtcgagatcgcgcccctgcactccagcctgggcgacagagcgagactccgtctcaaaaaaagaaaaaaagaaatgcttttagcgcacttagagcatttagagcaatgggatgattaattccattttccatttcgggcctcatctcaagtatttttatttctttctcttcctcaccttcctgccaccatttgtggtggcaaatgtgacatttcacatttacaccattgtccagtttctctaacagcttgactttctgtgctataaacataaacacttcccctttatcccctttaacaaactgctgtctctctaggggtatctgcaggcctctttgacattttcaacattaactttaagctactgagcaaaaaatgagcaaaaaacccagtcagggctagagtgtaatcatgacgaataaactgggggtttcatgatatttctgacacctgtttgactacagagacactgaactgtcctctgccaggtccagcctgggctctagagcctgcgtctgaggcccctgccccactcgttgggagcagctccagggctcccccacctcccttccctctcctgtttcaaaagtattgactttgaggatcagaaatggtcctaactgttgctttttcattttaactaaaactctcaaatttagagtgtttttcccttttcaatacacctttttaatattgcttttttttttttttttaagatgaagtcttgctctgtcccccaggctggagtgcagtggcgcaatcacagctcactgaagcctcggcctcctgggctcaagccgtcctcctgcctcagcctcctgagtagttgggaccacaggtgccaccagcacactcagctaattcttttaaaatttttttgtagagacaagatctaactctgttgcttattgcatttttttatttcaaatgtttataccaaatttttttctaagcttctaagaaagagctgaaattcacaaaatccaattcatactaattctagaagaaacaatacttgcccttctgcaggtgagcaattcctattgtaagcgtctgacaccagacgcccttccccccttcttccttccttcctctctccccccacaggtcagggtgggacagcgcaagagagaaagttggagacaccacgaatcccgtcacaaacactcttaggccacttccataaaagtgtaagaggttctaggcatcaggctaaagtactgctgttgaggtccataatgtctacaccagggtgccacttgggggtttggcaaggcaggctgaggagcaggaagtagcagattctgatcctgtctctgaaaagtgattttatttgttgaatatcccagcactgagctgtgaattaagattcactaaaggaatcaaggttcttgtaaaatatccaggaccacaaagcagagatatttttccttatggttc

SEQ ID NO: 1882419 - DNA, 4001 bp, Homo sapiens
tttttattagtgttctttttttctctttttaagggtttttatggacaatttggtgggcattagggaatgggtgctgctgattggttggctttattagtgttttggaaacaaacctgcatgggtttttagttgtctaagcccaactctatttttttgtaagccctggtgtttttgttgcatgattttgcagaattcaaggtgtttgttgttttttttttccaggaaaataatatgttgggttattgcagaacacatactttattttctctaaaatcccataaatgcttggttccagaatttcaagcatcgtttttttgtttttgtttttgtttttttttagagatgaggaagttgaggccaagaaaagtgaaagtatttagttaaaaacacatagtaagtgactgagctgcaagtaaaccagtctcccagctattcatgcagtaaaatgactgaactacaaatgggaatgagaacagattaaactaatctggagccagagttgtcagaaagttctctagggaaatccatgagcatgtccccattggttcaaggatttcttatgcagagggagagaaataacgtgatttctctcacatgaactcaggggccaactttggatagaactgaaagctgtacctgagaaacaaagagaaatattccttcctccttcattttatactatttccagcaccaaaaccttttcttctctctgcctgcccccttccacacaaactgtccaactccattctcatttccccactgaggtggatgctgtggtgccctgccctggtcactccgtgttggactgagacacacaatcaaccagctgcagagagtgttggtggctcagggccctcagctgactccataccatgaattgttaaagagccaaagagagccctgttgcccaaggttattccacctctcagtgagtggaccacatccaatgactggaaaacataggtgtaaaggtcctggaccccttgcacaaggtacacaactctgaagggtcaccccagttccagagttcattgtgagactgcattatatttcaacttttccttctgtctatcctctttccttaacttcctcaaggtattgatgctgcggggctctccagtggatgtcctatagtctatttctctggaaccaccaaagacagggattcttaaaagtgtggtctgaccctaagattctttcaggggatccatgaggtgaagacttttttttttttttttttttgagatggagtctcactctgtcacccaggctggagtgcagtggtacgatctcagctcactgcaacctctgcctcctgggttcaagctattctcctgtctcagcttcccgagtagccaccactcctgcctaatttttatatttttagtagagatggagtttcaccatattggtcaagctggtctcaaactcctgacctcaggtgatccacccatctctgcctcccaaagtgctgagattacaggtgtgagccaccgcacctggccaagacaatgtttataatgatactaaaatgttatttgtggctgggcatggtggctcatgcctgtaatcccaacgctttgggagaccaaggcaggcagatcacttgatgccagaagtttgagacctgcctgggcaacatggtgaaaccctgatctctacaaaaaatacataaaattatctgggcatggtggtgagttcctgtagtcccagctactcaggaggctgatgtgggaggatcacctgagcctcggaagtcgaggatgcagtgagccatgatcacgcctctacactccagcttgggtgacagagtgagaactctgtttcaaaaaaaaaagaagcgagaggatcacttgagcccaggaattcaagaccagcctggacaacatagtgagacccccatctctatttttaaaaataaataaataaattttttttaagttatttgcctcttttactcacatactctcacatgtgtgcattggagttttccagatgttgaagacatgatgacatcatccctctgacacctattggaatgtatgtcacaatgtgtattattgtgtttaaaatgctgtgttttaagggccgggcatggtggctcacacctgtaatcccagcactcagggaggccgaggcaagccgatcacttgagcccaggagtcagacctggccaacatggtgaaaccttgtctctatgaaaaataaaaaaattagccagacatggtggtgcatgcctgtaatcccagctactaggaaactgaggcaggagaatcacttgaatttgggaggcggaggttgcagtgagccgagattgtaccactacactccagccagggcaacagagcgagactctcatttaaaaaaaaaaaaaaaacctgttttatttatttatttgagacagggtctcaatcattcgcctaggctggagagtagtggtgccatctagactcactgcaaccttcacctcccaggctcaagtgatgttcctgcctcagcctcccacgtagctgaaattacaggtgcatgccaccacacatagctaatttttgtatttttttgtagagacaaggtctcactatgttgcccaggcttgtctcgaactcctgagctcaagcgatccacccaccttggcctcccaacgtgctggagttacagatgtgcaccaccacacccagcccagttttaatttttaaatgctaagtgttgatagatataactcacataaataaaaactctctgggattctcaattattttcaagagtataagaaggtcatgagaccaaaacatctgagaattgctgctctaagataaccaaatctaccctgggaggaaaaggctgaggttttaaagcacaagttattttcaaattatatttttagacattaaacacgtgtgcatgcacgcacacacacacgtagagaagtcagtgagaatggttaagtgaggacttctgaaaatccctccctccataaaagcagtaaacactggcaaagattggcagaaaaggccaggtgcagtgggtcacgcctgtaatcccctgcactctgggaggccaaggcgggcgaatcaactgaggttgggatttcgagaccagcctgaccaacatggagaaaccccatctctactaaaaatacaaaattagccaggcattgtggtgcatgcctgtaatcccagccactcaggaggctgaggcaggagaatctcttgaacccaggaggcagaagttgcagtgagccaagatcgtgcccttgcactctagcctgggcaacaagagtgaaactccatctcaaaaaaaaaaaaaattgccagaatcaactttctcagaactctgtaaattaacctaaggcttgcagcaatcagagtgaattttattcaagaaaaatggctgaacctcagtaagaacagtacgttttataggcattttaacatgtcctattacactaccaccaccccaccacagctctgcagtagcctagaaaccaccccacaatcacagtgaaaaacagcgcctgacagtcactggagggaatagaaaggggttggggctccttcaaaaccccattcctagagaattgtcattactagacatgcctggttgttccttgtgtaggggagggaaaaatctgcttctctttacccctctaggttatttggctaggctattaattaaatttatctaaaacagattaataggagaaaaaccattttaattacatgcatatgtacaggagtccctcaaatctcaaaatatgagactcaaagaagggccggatgattgaagttaatatagcatcctgagctacagaaaggaggaagtcagggcttctgggaaacgatggagacaaattatgggatggtgagagaagaaaatgtatggtgagtaaaggttaccttgttacagataaaagttccccaagtggtaaaacttgtctcaaagcagttctcttcctggtataaatacctctactagtaaaaatttcttttatagatgtaaat

SEQ ID NO: 1882420 - DNA, 4001 bp, Homo sapiens
ctgcctctaatctctctgaatcatttgaaggcagaaccagaagaaatgggccttaggtgtggcaggagggagttaggttgcagccaagaaagaacactttttggaggtctttaaagaacaggtgagccttacctgtgcttaggaagtgagggttgcagaatcggctccatgggatggaggggccagtaactctgggtcccaccctggagaagggcagagcaaggaccttgtcttgagggatttattctcagatccaccaaagtagcctgggaacctaaatgacagttcccatcaggcagccgttttctgctcggagttcagtggagatgcgatggggttgcatggcagtggggaggcttccatgggcttctactcacccctcaccacagggagttcatgtagtcacccaccttggggctaaatagagtgccaggaatgatgacccttgaggagggctgaggacaggaatagaatggccacccaggagtgttgcttgttccctgcctgctgcctagggtgtactgggccaaggctctgagtgggcaggcctggctggccgcagcatcattggagatgctgtttccctacctccttccatcctgggtgcagcccaggacccagagccttctgtcccagttctcccaaaaagggatcagggccaggtaggtgaacacctgttctggtgcagcatgctcagcactggctgtgggcgtggccctagtttggagctggccacttgcctgttctgcaacagagagtggggacagaagttgcggggagaccctggtggggaagagggaagggtctggtctcacctgccccatcctagtggtggggatcaagacctccacaggtgggctcacatcctctggggtggtggcatcttctgactccagaggacctcacaagccgcctcatatccctggggaggctgagaggtgatacttccaaatttagctgaaaggcacagacttacccacattttaatcctggagttttagaatggtaaatccgaatccctttaggttacaaatgcagaaacagactaaggcaaaggcgatccctttctcctccaaggtcactctggttagaagggtctggagccccagttactagatgctgtcattgttctgccgccaagtccttaaagaatggcagaacatgacttaaaccacctgctaagtacaagattctatgctggagatgcaaaggtagctgtcctcaagagcactttgtcaaacaggtaaacttcagggcaacatgcagatgctggaaaagggtggatttgcctcaagagtctgtgcatgctttctaagatactcccctccttttcatcctctgatgcggggagggaaccctacctgaagaaacaccccaaggcccaggggtagatctagggtggagagatcacatatgggagggcccggaaagaaaaggaacagggttgtcaatgggcataccccaaacacctcacccagaaatgccctaaggccccagcccggaaatggacctctgctgccctctaatggtggaaaggcagcctctggagctacctgctggggtccccccttaaagaagaggagatgtgaaggacacttctgccctctccccttttattccccttctgtcttatgcttcatctcctgtggtctctaaagcagaaccttctctttttttttttgaaatggagtcttgctctgtcgcttaggttggagtacagtggcgtgtcagctcactgcaacctcaacctcccaggcttaagcgattctcctgcctcagtcccctgagtagctgggattacatgtgtgcgccacaatgcctggctaatttttttgtatttttaatagagacaaggtttcaccatattggccaggctggtctcgaactgctgacctcaagtgatctgcctgccttggcctcccaaagtgctgggattacaagtgtgggccatggtgcctggccccatctgttctcgagcactcctggctgccccatttcctgaccactgccctccatcccattatctccccagtttcctttgttgcctaggttccaattctggtaccctggttcctgaccctgccagagttctggttccggaaggccccccacaggtgccttgggcctagctctcacctgggcccagggcaacactgaagacatgggcaagagcatcccccaatacctggggcaactggacatccgcaaaagcgtagtcagcctggccacaggcgccggggcgatctacctgctctacaaggccatcaaggctggcataaaatgcaaaccacccctctgtagcaactcacccatctgcatcgcccgtgagtgtccgggccctggggagagggctctgccccaggaggcacctgctcccgaggcctctgctgtgggagggcccaaaggtgatgcctccaagttcctctttcctttgtctttctcttgtccatcttcctcaagcccaccctgcagcgtcctaggcaaggccctgccagagatgctagctcagggtccctggatctcactcaagtggatcctcagactcatctggcaggtctccaaatactacatttcctctggctcccaggattccacttcttggaaacttggtgtcggcagctccccccatcccttttctgccctaggaacgtgaggctttaaggaaagggaagattggaggacttactatatgcccagagcttccactagtccacatgttcttttgtgcagagtaggaaaatgagccccttctgcaagactctttattgccatctgctggaatatcattgccacatactggttatgatgaaatactacttgttaccgccatatgccagacagttgttagagtaaatggacaaatctatgatggtacgttatggacaatacaacattagatagggtgcccttgtgcagtaaacattcgttcaactgtacatggtggtcctgcatatggcgagaaggcttctccgaaaaggcaaggcagccttgtccccaagtccctgtcccctacttcccaaccccattctttcatcacttctgagtccacagcctgaactgggctggggtggctgtctaggcctggcagtcgagcgagagcggcacgggcgggactcaggtgagctccggaggctcctcaactctttggagtgcaaacaggatgagtatgccaagagcatgatcctgcacagtatcactcgctgtgtgtacttgctggaggctgaggtaagggaagcaggaggtcccccctagccggcctggcccctgggggttacggccgatccctgcccctggaatggccagactatatcctgggacctctctctggctgatagcggtggggggggggtgtgcggagggatcttggtgacatggggggcagtgggcccagaacacccgcttctcctgcctcttccatctctccccaatactccaggcctctgcttgtactacggatgacatcgtgttgctgggctacatgctggatgacaaggacaacagtgtcaaaacccaagctctgaatacacttaaagctttctctggcatcagaaaattcaggctcaaaatccaggtgagcccagggatgcgtggtggggcatgcaggatgtctatagtccttaagtcctttaattgccataggataaatggtcatgttccagaagtttgtttgggtgtgaatttgtaacccagaaataagtgggaaaacggtggtcagattcccagcagggtcatgaaggcctttgaatttcaggatgaaactgaattgaggcactagtggtatctctcaaccccaaagagaaggacccccactaccccacaagctccctaccactgccacgttttttctgacaccaattcccaacactggctgggtgttcaacaattcaattcagttcagacactatccatagttagggcagacttcacaggttaagggctgagtcccccaagacttccccccgacttcaggtaccaatcataggtctgacttctgactggcc

SEQ ID NO: 1882421 - DNA, 4001 bp, Homo sapiens
ccggaccactggcatctctgtggatccgaggaggcagaacaagtccaccgattccctgcaggccaatgtgcagcgtctgaatgagtattgctccaaactcatcctcttccccagaaagccctcggcccccaagaagggagacagttctgctgaagaacagaaattggccacccagctgacaggaccggtcatgcccatcaagaatgtaaggagaaagcccgagtcatcactgagaagtagaggaattgcaaagctttcgctagtctccgcatggccggtgccaatgcttggcggcaatgctcggctcttcggcatatgggcaaaaagagccaaggaagctgaaaaacaggatgtgtgaaagcaaaaataaagccctcttggggacttgtaataaatacgttttaaaagaaatctataaagtttaaactgattcttcctctgacagagaaaggcagtttcttaacagatagaaaacacgtgaaactggtggtcggtcacttcccaataagatctcaggagtggggagaaataacacaagatttaggaactatgccaacgtttacgaccccaggtctagaggtcaagccgtgcacttggtctctcaagtcgcctgcttggccctcttccaagtgtactttccttcattagtgctctaaatattttcaataatttttcacccctgctctaagacttgcctcggtctctccttcggcattatgctcctcaatcgaattctttccttctcctgaggaggcaagaattaatgttgctgcagactccttacagataactgccaccgctaatatgttgagatgttcacacatgcatgtgtgaggcccttcaaaatgtgagctgcggttagaattgggaagagaagggagtggggatatgtatctttgttttctgattgccttccatatcttttaaaactagctaagtgctgcttcaagtcagccagatacgaaggcttcaatttatttaacacaataaagaacttctatttggatccaaagcttacattatgctttaataaaagttaccctaataaagtcagaaacaataacaatgagtcaaagaaatgcatacaaagtaggccaggcgtggtggctcacgcctggaatcccggcactttaggaggcagaggcgggtggatcgtggatcacttgagttcaggagttcgagaccagcctggccaacatggtgaaacccccgtttccactaaaaaaaaaaaaattagccgggcatggtggtgcatcatgcctgtaattccagctactcgggaggctaaggcaggagaatcacttgcatctgggaggcacagcttgcacgtgaaccgagatggtgccattgcactctgcactccagcctgggagacagagtgagactcttgtctccaaaaaaaaaaaaaaaaaaagcctacaaaaagcttacaaagtctaaaatcggacgaacaagaggacacctgatgggggaaaagaaaagagattgcgatgggaagagagtggtggggaaatccgtgggacagttttcctattttctgggtctgtcccttgaccaaggaacagctcaaaaaagaaaggatctaaaataaattgtaaaaaattacctgtggtttcgcatttgttttctgtctttttctttcttgcttgatcttcgataatactgggaaatgtaaccaatgtgattgggcttgttaatttggtgccttgcttgtttttcgggttttggaattctgccagtctgtgcttccgcggcctctttcattttgtctttcatctcttgacacagccacccagggtggtgtcaaagccttagagcagaaatgcatcaatattgaaagcaaaacggagcttgttttccttggtttccatgtgaatttgaagaattgagagagaatgaaagtgccacaaaaacaaaagaaaaaaaattgaggcgagtcgtggacatgatagacatgattttgcaaacaaggcacatctaggagaaaaggcgggagaaaaatgaagctggaggtgccggggattgaacccggggcctcgtgcatgctaagcacgcgctctaccactgagctacaccccccaacgctcaacgtgggccaaaatatttctatgacctgttactattatcggtcgtgccaagaagcatattttgtcgaacttaattttgaattcgctatactggatattgtttcctgactgcgctgagagaaggaaaactgaatgttatatcgaaagtcccgtgctgggcctgggatctcccgctgcaggtcaccctctcggacggccgctcgacaaccacctatcggggtttataagggagccgtcctgcctggccgccccccagagaaaggtctgtgatggggtgattctgcttggaaaggttgccaggaaaccgcgagcataacgcagaaagataaaacgaaagccctaaacgccgccgtgggaatttaagtccaaggggcagagaaaacaggaggggaattgcagatcggcttgtcccggtcgtagttactgcccctgcaggttcccgcgcccagcctcgggatggagaacctggcacgctacgtttcgcgggctctgagactcgggtggtgagagtcgccgagatgcgcactgggaagagaaaagagccaggacgcacctgcatttatggcgccatcgcccgggcggaatcctccacggaataaaaagtatgcagaagcaaggcgatttatgactgcataaaccctccgtgctcctggagagttcttagacctctccactccttggcacaactgacctctccactcttcgacaaactggcaagcgcttgccgccgttcgccaaaccttggtacgacagtcaatccagaaatgagcttctggaacaaatcctaaatccttttttgtctgtcttcttctgattcgctctcatccttaagggacctgtttctccttcaaaacctgaaaacatctaacctatagtaccaaccccagatccaggcctggccttcctgaccagtcaaagccagttggactgtgcgcctagaagtggacagacatgcgaaatgccatactgtatacgtacaatgcataggccaaaggcgaccctatgacccagagattagaaagactcggacgtcttttgactgggttcaggtcacactactcccaaaatacgacacctcggcatttgagaaaacagcagaagcagaaacgtttttctctgggcccttgttccgtgaagcgggccatgaaagctacctgatcttccaattaaagtaggtgataagaccgtcaattcagaggggagaaaatgtacttggaggaaataaacgaagacacagagatgccaaagagaacctgaataaacaggctttgctaagttcaccccagtttataaccattagatcatacccccttttatccaattatactgctatgggactatccacttcatcaaacctaagcataaaaatataggaagtcctcacttattgtcagttggtttttggaaactattactttaagcaaaataaaactaattctaccatagactagactaattgatttaagagttaattttcttggcaaatgtctgatcacaaaaacaccaaatttctaaataaggactccaaacacttctaacactaaatattgaaaaaaatatgagctgcacctcaagttaagatcagcaaaaacgacatgattgatttatttttggtgaatcagtgactgcaattctagtggtggcaggttatatcaaggaataaatgtttgtgaaatagcagttgtaaggagcaactcctactaacacacaattcgtaaaacattgtgtccggaattggcgggttcttgatctcactgatttcaagaaagccacaagtcctccggatgagtgttacaatcgttagatgcggtgtagccagagttcattccctctgacgttcggatgtgttatagagtttcttccttctggtggtttggtcttctactggctcaggagtgaaactgcaaaccttgg

SEQ ID NO: 1882422 - DNA, 4001 bp, Homo sapiens
ggctttcttgcagccagagagcttcttcctgcaagcaccagctgttgagcaggactgtgacaaagagcaacaaagagccacaaagagcaggctgcgggcgggaccatcgggaccatcacagaggcatcagccctgccccggagtggctgcagatgcatccctgagggagggggctggggtgcaggtgctccctcccgaacagggggtttgttagcttcatctgcaaggccctgaagccaggctcttttcaaatcgtcatcatgtgtgcaccgtacactcccttctgactctgggggcctgggcgcctgcttagtgcagccttaaattttttacgtaccagtaaaaatactgcatgtaagattctgttcctaggaggataaagggatggccagagctggctaagcggagtctcgacggactaaaggtatgggaaaatgaagacgtggacctaccacgttctcttctacctggaacttaggatttgtaaattgcatttagatgtcatttgtcacattggtaggctgtgacttaatacactcacaaagaggatttttccaagtatttaaactgtgtagatgctgcaaaaaatcagactgaggcaaagccctgcagccaaccccagcagcaagaggtgaggaccccctgtctgtcctgggccccactcaggcactatcctcatctcttagaatagtttgttaccttttctttcctgaagcctcatcaaatgcaactttttctatggcattcaacggactttaaagcaaagattacagagaaattcttatgcaagtcagaaaatctgcttattatgggtttgataaaccaaattgtgttacctgtttatagacatagatttctatcagccagacgtgtgcacagcacagcacaaaccatagccacccccgtcgaagtctctttctgtgcatttcccagccacgcccccagcttgggcccctggggtcacctcccactccggctagaaagagagaaggagacagtgaattcctcggaagccgctcgccctgcacccaagcgggacttgcaccacaagcagccccaggaaaaaactctccatttctttctcgtggaggctccagaagaaaagctgcgcatttacccggcgcattctaaccgcctttgaggttccctccggcagccatgggagccgtggtggggcaaagcctgggctgggagacgctgcaaggctctggggagcagtgaggcgccgcgccagctcctccgttcccgtcatagcctcacacgggcttcgctggacacgtccaggacgcagcgccggtgggcaccaggcgttgagcgcctgccccgcgtctgtgctaagacctccctttgcattattgcatttattccaacgatggggtgaggtaggtattcttatttccattgccagagtgaaacactgaggctcatccaggggccggtgtggaaatcagggctcagccctgggcccctgctgcttggagccggtgcggtggccaccgtgacctcacgctttccctgccagtcgctctccgccgcatcccggcctcccgccccgcccccggccgctttccagggactgaagcccgagttggtgctgcgtgtccccgcggggattattttcaaacagctcctcctgccctggctcccacagcgcggccccaggcagctgcaccactttctcctctcaccaattaaagccgaatccagggctccttagcatatgaattgaggcgcatcggagccctcactgctgggccagcccctcccgggctcctccggttccgggaggtccacagcccagcagcagctgcccctgcacgttgtcccctccgtccagcatcccggggccgaggagacagtgcccctggccgggggctgcgctggcttcaacttcccatgggcaaaacggggtcccgggtcagtgttcacagagggtctcaaaccctgcaggaccctgaaattgtctgggatccacaccagtcggaagaaaaaaagaatagaaaacgcagggattcacctcctctgcaggcaccctcatgccgaacactaaacaggatgatgttgaaaaggatttggagatttatgcaggtcacgagcttgaggaatttttccattgaatgcaccatgccttgggtttcccgtttcccactgaaaatcccatggctgacactttttttatatcattaccttgggagatgaagaaaaactcatctgttagggcagctctgtgaatgcagatgctttgggttgttttgaatgaatgactgaatgttctgaaataaagcaggaaggtgcctgcgggataatgactggtttcgcaactcttggccgggagtctagacccctctgataatcaatagaaatggatgtatattaaatttagcaatagaaaaagtatagatagttgagtatgctacattattttcctataaattaacccgttaccacagtctttaattatcttccccttgcgaggcataaagaagagactgcttgaggatggagggttttttgtggtctgaggtctgcagactggccaagtattccaatattaattaccacccatcctggccgtaggctcaccccgctgacctgagcagacctggtgaagcaagccacaacttctgctggaaattgctccactcttccattaagtgaggattagaaagccctttgtgagaattttgcccagagtctaagttgagcactttgtcacttgcacgcttcattttccagcataccgttcgctcagctcagtgtctatccaggcactgaaggttcggatgcaagcactctccagcgtaggggctgaccaagtgaaatgcacactgagcaaccgtgcagctccaggtcctggcggctcttcacaaccagacattctccctggagaccctaagctcctcttcctctgttgggggagcacaaaataccctataagggctgctttgctgcctctggcactttcttcatcaggggagttacatccagatgtagctgacaggtcagggccccttctcctccaccatgtctcagggttatcttttccaaatggaggaagtcaagggtatgcaggcgctccagtttccctgccttaccctacatatccataacagacttcaacacgagaaccagcgtttcggatgtgtctagcagagtgccaaagtcaggctggagtgtgccctgaaagtcagggccttctgagggacacagacacggtttgtctccaagggggctgtgtgtaaggcaaatgctgaggcctacaaccatgtgttctgagacggtggccattacagaaacaggcagtccccagacagaagcacaaagggcaatctcaaggaatcaagatctgtaggcagggacccacactgaacaatctggacaaagctaatgcagaatgaacagtaccgccgctacccagcgacagtcgggctgatgttctaggagaaccacacgcttcacacagcaagggagaaattaggccgtattttaatcccttccagcttcgtccaggaggtgttgtgatttgagtcactctcttcctctaactcctagcccatccgcagtaataaataactttgcagtgaatggatggttttcttagacctgggggaacaatcctagtttgataaagcagctcaggagcgtgaatgctgaggggcccgcctattagctgccaagctcggtagccaggtcaggccccactggaagggaaggggcagttgcccagggtgcctgaggagcaacctggcccctgttctcgggtgggagaaggagcacctggcactgaccagccctggaactccgcctgctcactggacatcacagcacatgagcgggtgctatggatggaatgtttgagtcccccaaaatttgtatcttgaagccctattttccaaggtgctggtattaggaagcggggcatttaggaggtgattaggtcatggggggccttgtgaatgggattagtgccctgataagaacagagatgacccatctctcag

SEQ ID NO: 1882423 - DNA, 4001 bp, Homo sapiens
tgtgggggtaaaggaacatgaaagcaacaatttccccttatgtcctgcccgatgctatatagttgcttcacagcagcctcttcacaccagcctctcatcttcataccttctctgagggtcttgctcatggtggctttgtcaggagatgctctgggggaggaggaagcagagcaaagcccaccagtgacacagagtgaaccataaaggtgaagacagtcatgcccagagaaccagggatgcagaagttcatggaagctggagtttggggcaggaagcatctggaaaaacatgagtctcctctttccccgccctcaccatcacccccaaaacatggatatcctcagaaatatctgggaggatcctggatttcccacatgcaaagataggggatcaggtccagaaggcacagctgtgctcagggtgcctgtgttttgtgaactaactcaacaacggacagcgcgagatacacagagccacactgtggctgggagcctggccgccgtcttcctgatccctggggccgatggccagaagggctttcttaccaggtgcttcccaggagcctgggaggaggtgacgctgagcacagacaccacatcctgcagccgtccttggtcccgtctcagcaggcattcccaacagagaccccaccgagagctgctgggaaggcaaggagatgtgggtcatcgtcatcagctaaatggagggtggcattctgcttctaccatccagccagtgccacagatcaaagagaaataagctcggcaattttcctgccatcattttgttttgagataaggaaattatccacaatccaattatgaggtgtaatgtcacattctttttttttttttttttgagtcgggggggacacggtctcactctcttgcccaggctggaatgcagtggcacaatctcagttcgctgtcaccttgacctcctgggctcaagcagttctcccaccttggcctccaaagtagctagaactaagcaatccatccaccttggcctcccaaagtgctggaattacaggcatgagccactgcacccagcccataatgttgcattctaatgtgataacaaattgagtcaaagtgtgtccatttcctccaaatttgtttggaacaaagaaagtctttcataacttggtcatattagatatttgtaaaatacagttttgatgaacacaacccttagtggcccttaacggaagtacttgtggctgacaacaaactcaacatccctgggaattttgctcaaagagttgccacagtgccaggatgagtttaggggaatgccatgctggccacgcctgctcacctctgtccattccactgataaagggccaagtccaaaggattcctgccttctgtagctgaaatctaaaaatggaaacgctctgtgtgagtcagcatcagatgtacaattgggatgtgttcgcacagccgcttcattccggcctgagaacaagagcactttgtttcctgtttgctaaggaggtcaaggtcccctggccgtctgcgtgtgggtttccctgtctcagacaactgtgctgtgaaagtttcttcagtgcatgatactggcccccctcctgcctctggacagaagcctgtcattattgtcaccggtgaggagacatttgtcccccatcacgcatgagggacggagaagagaactcctggcattccacaggggatggagggatgggggtgcagagccacccgctggccctcagccctgactcccagcctctgaaaaacaactctacgacaaatcctccttctgagcctccactcagtgtgcacatgagtggctcctgtcagcgggagctccatgggaagcttctaaatacggaaaaagtggaaatggcatgttgccatgcaaatgtggccccactagacgtttgtcccaaaatggagcatcctagagtacccattcttcatctctgccttgggaagatgttcgcccaagcgcttgcttgatttgcagatagaaacgttgtccccactcttgtgtgcagttcaaagacttcacacttgacaactgagagtccaccaaagggagaagtcggaccagcccccagccaaacacgggagaaaataaggacttaggaaaaccagcactgaggcctggaggcctggagctccaaggggcaggtcccatgagcatcccgttccacgtggttttcaccagcttaagtcccatcattggcacattcctttctgaaaaaaaaaaaaatcaattttcatggcagctaaagcacgatgcatagttcaggattctgtgtccatccaatgctagctgcagatccaagcccgagtcccctcccttcggtgttgaacatccacactgcgctggaatgtggtcagcagcgttcacagttgtatctttaaatgaatcttgtttctggcactcaggagttcatgtccaggagggctctgatgggagtcaactccatctaggaaaagtagaaacacctgaaacatagtactttgcaaattttaaaaagaaaagacatacctgtattaatccattcttgtgttgctataaagaaatacctgagactgggtaatttatagagaaaaaaggtttgattagctcatggttctgcaggctgtacaggatgcatgactggggaggtctcaggaaacttataatcatggtggaaggcaaaggggaagcaggcacatcttcgcatggtggagcaggaagaagagagggagtgaagggggaggtgctacacactttcaaataaccaaatctcctgactcactatcacgagaacagcaagggggggaatctgcccccatgatccaatcacctccctgcaggtctctcctccaatattggggattacaattcaacatgagatttgggtggggacacagagtcaaaccatatcaacaccgtttacccgaccgtagccagattgcagcagagtccagacccaccgcggtgtttgttcaacctcaggccttgccactgcctctgcctgctccaccctggggtgcttgccagataacaggcaaaggcaatgagcacggagcctggaggagggtccccggggagttcccctcagccacacctcaaataaaccccacagaaaccaccaccgtctggttctacccacctggaatgttttcctgctcttctgttttttggccctgtcgaaacctatccccgaagctcagtccaggtgcagtttcccaggaagacagaggagggacacttacctgccaggggagggatcgcctgagcacacctgctcccagctgccccgcatggcctcctcctctctgtggtgacttgtcagttagccatagactgcccgcacgcagcagtgcttccattgtggtcctgagaaatggtctcttttcactatttaacttctttaatgctctgtatcttgtgtctaaaatggtatcttgtgttttaagcttctggaggacacagcccatgcttcccgaatcttcctgtcttccccacttcctagggtgcacctagcacatatgggaagttcaagaattctacaggcttcatttttctgtttttttttttttctgtcactgaaatatattccccaaggggcacactttccaggcacgcttttgaccttaaagggaaaatttcatcttgctgtcgctctctgagttctatttttccctggcttcctcctcaatgggaactcggtaagaagcggagacagcaggagcacctccctttcctctgaagaagttaacatggttaacaacagcggctccatcctctggtgtaacctcgagagcgagtgaggagctctggcagtcaccacagttacttgagcctcacggaagaatcttgcctttggggtggcagtggccacatctcggatgtctcttccccaaaggccagggctggggtgaacccagcacatgccccccgtggccaccccatgccccagggctcagggagggagggctccgggaagattttgacagtggaagttagggcaggtgagggga

SEQ ID NO: 1882424 - DNA, 4001 bp, Homo sapiens
gacctgtgggcttctaagatcctattcagccaaggtgagcactctcaagggaacaattccttatacttggctttcacttttatctggaaaatcaaggctggggccataacacagcagttgtggcaaacggtgtctagatggtcactatccactattccctaattgactgaggctcttggagtcttaggaatgtagaagcagtgatgaaggtgaataactagcaacagctttgagacattcccacagttttcttggatggctgctagaaccagactccagagacaataaacaaaaaactggtagtaaaatgggaggagataatgttctgagctaaatacagtctgaaagactccatgtctagaaatagggttttatatgccactcaggagttctttggatctctttttgaaaaatgaactcatcgtctagcatttgaggcacttgttctttgagccaatttaggtctgccttgaagttctcccattctctctgatggatagctctctgatctttattgaagatcaaggcagtgaggaaatagggttgactatggtatacagagcttgaacgagaaataaagttagaacatgggttgccagagccaggcatgcaatctatgcttgcaggtgaggagacaccaagatctcattacatggatggtttgcatatttggaagggaaagcaagaataactgacatgggaaggaaaggcaaatctagagaaaagagtaaatgcttggaattgcttctgggagtgaggaccaccaattcatggtaaactgtcttaccctcttgagttaagttgctctaattaagcttccagaacagaaggtgttgaaggagttagaaactagatcaccaaggttttcttgttgtttaacctgatttgcatgacctctagaagatatgtttagcattacaagcctctatgaatagatattttgtccatttttcctgaaaaggggtgttatagtttgggttcccaggaatcagactctgatacactgagatttgtgtacagtgggtgtgttgggaagggttcttggcaacaatatctttgaggggtaaagaatgcaagattaggcagagaagaagctggattacaaagatgttgcaataaaagtcttagctattcctatggggagtgctggagctggggtagtccttgggccgaggacgtcagttctttataaaaatcagtcaccagatgagcaagtaaaggatttttatccctattgggcagataaagaaacaggcacagggttgaaaactaactgcccaaagtcacataacttttaagaggaatagctgcaggttatttctgctgaggcccaactccagacacatggttgagccagataatacatcacccctggcagaggggtacaggatatggtctcccatcgaacagtgacctaagtaaaataaatgtgcctctgaatttctgtaaaatttaaatgtgcatatcttttggttttgcataatatagaaaattttatatatttaataaaaaattatttttgactggtaaaattttcaaacaatttttttgacaccaagattttgtcttttgacttatagcttaatggtaacttcagaataatactcttcttagatctcatgttagctgaccttttcttaaaaatagatcagaagaccatctcaatgtgctaaatactgtcccttgaattaaagtacaccaaaataataaatgttgtgtaacttttatagtttatagagttctccacataatccacacagtgtgggtttgaggtaatgttgccagagcataaatgtgaaatccatggctgtgaaaagttgtgagatttgcctgaggttacagtcattgcaggtgatcccggcctcctgtacaccttacctgggtctgcatgtcccatgtgctccatacgctgcctcactccagcgaacattccgcgatggctctgtatccaagaagtagggtgttgtacttatgaatcaatggaaggaccaaggcccctgtgctttcagtgtgagaggagcagccaaaaccactgcaaagaggggttggaaatctgatctcccatgagagctgaggaaaaaaattgcttctggaaagggatgaaaggttttaatataactcattatctgttttctttggatgaactttctgctattagtcaacgtgatttgggcttggataccacattagaaccggtaacagaaaatattgatcctacaacttgtgagaagcctgaaatgggtatgagtttatctcaacacttccataaatggcaacttgcattccagttatttgaaactttctttattattattatttgaaagggatccagctaaaacataatttgtttggattcttgggtcaacgattttacttctactggcaaaaaatatactacataaaatggctatgtatatttttcttaactttcctttcctttttggtcacttagccagagtgaggtcctggagaatattctgcacatgctttagtgtggggaaaatgagtgtatgtgtgagagacagagcaagtaaagggagctggctgcatctcaatgtgttagataacgatgagcttggcttgttaaatagaccaaacctgtgaggaacagctctgaaagtgtttggctagggtttgctctcacagcgcttagtaacactaatagtgctaataacacttaatagcacttcgtaatactgcttaataagtgtgatgtagtgatgtgtgtatcaactagtaagtgttggaagatgacttcctggagatagtggtcgagaccatggcagcacccagactccttgtcctccagagtggttgtcatggaaagtgccacaaggctgcagtacactgctaggtgggtctaacctctggtcaggccagggtagtgccacttttgttggggacaatgaccaaagttgtgttgctgccaataataaagatagacatttttagagcagatgaacaggacaagaaaagatgatggacagttcctaggttctctatggttacaatgaaagcagttttgtatagagttgaaatgtccatgggtatacaaaaaaatttactaagtgttgtcaacgagtgaaagcactaattataacaacttgggaaataaaataccagtgttagaagtcttatcatatgacaattgtagtaattttaaagagaattaacaggttttggggcttgagggttacagaaaatattcagggctgaatccaataattgggttgcaggtgttagtgctgaaaaccttaaaaatgttcataaacttgattgagcagttgcttctgggaattaatcctaaataaataatgaagaatacatgcaaacaactacaagaattgtctttgaaacttgtttatattagttaaaaattggaacaacgaaatgttgaaaaccagagatttgttaaataggttatgatataatagaatctcatttagtcattaaatatgatgagatagaaatatgcctagctgggtgtgatggctctcgcctataatcccagcactttgagaggctgaggtgggtggattatttgagcctaggagttcaagactagcctgggcagcatggcaaaaccctgtctctacaaaaaatgcaaaaattagctggatgtggtggtgtgcatctgtggtcccagctactcgggaggtgaggtaggaggatcatttgaacctgggaggcagagagtagtgagccgagatcccaccattgcactccaacttgggcaacagagcaaaaccctttcaaaaaaaaaaaaaggcttagtatctggggtgacaagaaatctgtaccacaaattcctgagacatgattttacctgcataacaaacctgcacatgtattcctgaacctaaaataaaagttgaaagaataataaggagaaatatgcctgcttacatgttacatacatatgccttataaataactttgagatatttcaaactcaccaaaaacttgaaggaatggtgcagtgaatatgtgttaacaacatg

SEQ ID NO: 1882425 - DNA, 4001 bp, Homo sapiens
taaaaagcaaagcgagattgagggaagttcagagacgccatgaaggaactggtgaccagagtcccttgctgcttatggaacccacaagaataaagatagccgcttttcggaattacgattctaattcaggatttgtggagtttactctaatttggtgctgttctggaaaaggctatgtcgaaaagaatttgtttctagagattttcaggaaagtagccaattcaaactgctcaaccctgtgagatcattcctggctggtagcaagaactttctgtcatgtggggcttgcttgagagtgaagagtacccgcatatccactgcttctgaattcatacctgttggggcttatatgcacacgtacacaccagcatctgggtcttcatacccgcttttcacactgatcgtgtgaactgattcacaagccttcaagtgtcctagttagaccaatttagtccagctctgaaagaacagataggtaagatagactgtcacattccatcaagttaatttctaatttcacaattgaggttttaataggacgtctggcctattaaggtcttttactctgttcaagagcaaccaaacaccgctgccaattctatcattaagatcaagctgctgttcagcgaccctcccctcggctgcccttccgtcttggggccttcccagcctgcctatggttaggagccgtttaaaaagttgcactcattctagttacaccctgccacacctccaagcctgtggatgatttcgtctgagttcccagcagtcttaaagctttgccaacagcagacggaggtatcacgctgagctctgtggagagaaagctttgcactgtgcaagtgacccatttggcaccagagagggggaggggaagagaaatcctgatgggctccagggactcctcatccatctacttctccccgggatcctctcctggagggctcttgcaaacacagttgccccgccacggtggaggatcatcaacagaaacccacgaaacaaggccatgccccgtggcactctgagtcagtcccgtagcgtgatttaccagctctctgaaaaaagaaatctgctaggacctgggctggaaccgtaagatgtaaagatgtcaagttgaaaaacctagggtgggcccaaacctccaactccccagccccgattcccaccctgggaaaatcattccagtgtaaacatttctttttacatttagtatatctgtgcaagaaaaactactttattactcaacattaataacattcactttgaaccttaattctgaaaaccacagaattttttaaatgctgtaaatagctgacacgggtgttcttcccttgctttcaaaggaattgtttttgtaattactgagcagggtgaagctgaatttcccctgcagtaaacaggagagtgtgtaatgagatatcttaactaaaaacattaatcatattcagattaattaataatagaaaactttcaggacattcttaatgctttaaaaacaaaaaagcttttattttttgaagttgttaggtctccattctagttctgagtacaaataaatgcctgacatatggtctaagccaaattccaaaatgtagcaaaaacagtgcctgcatatttggcaggaatttaaaccagttcaggtcagtgtctctttctgcccaaagaagagtttctgcatttgcactgagctaggaaaataacacaggaaaacatggggaacaacacggaatattgtaagctccagtacccggctggccaaagaataatgtttggggcaactctgaaattaccgcccaggctgcagtttgggtttgcataacgtcttggaggactgtgagcaagacagaaagtaccgattgcattgttgtaaggaaattgccttcccccttctaaagctctcaccttgcaaatcaccccctcttagcaaaagcacatcttacttgttaactcttcccctgctactaaccttttcaatcatcccccttcatcattgcagaatggcctttggaacaaagcagcattttaaagcctttcccactaaaagtttgcccctccccccctttaaagaggcagtgtgggggtaattttctttcttcctttctttttttgtgttttttttttgtttttttttgttgttgttttttaaatttgtttttctgcagtgtactcttgtgaggttgtcattgtttgggggttgatggatatttcttcagagataccatcatatcgcttgttattgtaacacttattggtgataaagttcagactaaaaattaagcagctgcaatgtagcagcacaaattagtttaatgtaagcagtcaggagcagctggctggctcaggacttgaatttagctgtggggggaagggttctgtgacgctgatgtgtttttttcctctacataaacatttttggctgttgcagcttttgtgctgatcatgtgacagtgtccctaggcagataatttatttctgtggctttcatgagcaatcattaaccttcagacacccagtttgcttttgctttgtggcatttattattattattttattattattattattatttttcgtatactaactagtttaattcagaaagtgtcaggagaaaattacaaccaatttacgatagactgcaatgcataatacttatgtttccattaaagcagaccttgcttataagaccattctcatagctttgagggtgtttgtgaatcaggataattattttcagtgtgtctgtcgttaggatgctcctttagtatcctcttctgattgccaggcctctgcaagctggccttggagaaactcaatttggagatcaacctttggcagtcttcgtctactcgctaggaggctggaaccccagaggggttagaaattgggcttctggagacaggcactacttcggtcccttcttccttcaacaactgacacgccagccttcagtaaacagtgtggccatttgtagtgaataactggagctggaatatattggggttgaaaaacaaaggaaattagaaacagtgtcctgcataaatcagaagggggtgggggacagaaaagtatcatttctgacatctactaatcatgctgacctgttttctgaatttatctgttttgtccttctcagatctgtttgtgttgctcagccatttctgccaaccagtaattcaggagtgaaatgcacagggtcactctttggtgtctatcatacatgatatcttcagacactttcagaatgccgattatctcgtgggtattgtgtgggccctgttagatattcatttattcattctctcatggtgcagggttggtagggggagcactcgggactacttgcacagagggatttgataaagtgtatttataagccccagtgtactgtgtttggtgaaaaataacagaaagacgtaactccttttctgttttcttcatttagaatattccaatcatgagagttatttcataattaatacatagaatgcagcatgaaaattcaatgtttccaaatgtttgattcaaaagctaaaaaaaaaataggagaaattgatcattatcattctttaaacattttaaagcaccctcaacagactaggtactacgtacgctgaacgggaagaagagcttgaccactgaacgatagaaatgaggatgcctcagtagccgggtgatctttgatgagtgaatgcgtcccataggtgtaatgaatgtgatagggcacagaatgttctatgagttgcattgttgctggggtgggggcaggagggtgggtaggatatgggaacttctttgtcctcacccaaaagagagggatttctttcccaaacatagggcgctagcgttcaggaattttctgtacttcttcctaatgttattttcttgctcactggattccagctcacacaattgtcagcgctgcattatgacttttgtggcttgtctggtggtaagtggtccacttgctttgcttttgcctttgtgggcctcttcctcca

SEQ ID NO: 1882426 - DNA, 4001 bp, Homo sapiens
caacctaaaagacttgactccacacctctcaccaaggccacctttcaagaatatctccacccagcagccctttgatgacagagaagagtgcagaggatgatctcatactcccgagagaagtgttggttaccaaaaagctcctggagaggcaacatcccagagggcctttttttttttttttttttgagatggagtctcgctctgtcgcccaggctggagtgtagtggcacgatcttggctcactgcaagctctgcctcccaggttcacgccattctcctgcctcagcctcccgagtagctgggactacaggcacccgccaccacgcccggctaattttttgtatttttagtaaagacggggtttcaccgtgttagccaggatggtctcgatctcctgacctcgtgatctgcccacctcagcctcccacagtgctgggattacaggcgtgagccaccacgcccagctccagagggccttttaataatgaaggtagataaaaactgccagaccaccgaactatcgagccaagtcagaaatacaataccaggcatagcttggggtgccaagtagaacagaggagattctgaggcttcacaaaaagcagaaagactgcatgactacgtgaacagtatgttgaatgtacacagaagtgggaagcaaaggacatataaaaaggatggagaagcatgctggcagactcgccagagggaaggcagcaggtgcagtctacatccagtgaaagagctttgctggcttgttcctcggcaggattccctatcttactttctcagactggatggatgtgtggcattcagcagcagaacagaggaagacgatatttataaatgaagaactggcgaatggatactgagaagaaatagactgggtgtaccattctgtaacgccctgtttatagaccaaaagcaggtttgtgttgacagaacatatttggggttgttatgcaacagcagtagtactttgggagaaggggaatgatggggtggaggtagggctggtggacaggaggactgtcaagttccagtacttaaatactagactgcaaggaatagtttgctgtctgtcctttagtgaagaaatcagatgctcattttctgttctacatccaccttctccaaaaccttagcaaagtctgtgataaagatatggcactgtccccatgctgatcagcctcctgaatggtcctgtctgcgatactgcccagctgcttatctgagatatttatttggaccatcatgcacagcacccttaacagctcatcacgagagatcttgttatctttatccaaatcatatagtcgaaaagcaaactgcagtttgttgcttcggctgttgagtggttcaggtccattcacaactttgctcttttcattatcctcaatggtttggaaatgagccagagtttgcaggaatccacggaagtttacctggtcctctccctctggaaggaaggcattgatgatccagtcccccactgggttgatggcaagttctggaatcccctggaaatcgtcctgttctctcctttgtccaggttgctgaaccggctgtacagacgtgtgatttgactgtgggaaaagccagtctccttcttgatctcctcaaactcttcatcgtgcagtaaggtggaggcctgagaccccatcactgtgccaggagctcctccaggaacagaagcaacggcaacaagagggaaggcaagaatttaaccttgcccaaaaagagggctggccttgctccttggctaatgacaggatacggagcaggggctggccatgcagtacctgagtgatcaatggaccaatcctgcccatgtcagagccccgggaaaaactctggacaccaaggcttggggaagcacctccggctgatgatactccatgtgcactgccacacgtgggtgctgggaacacaacacatctgattccacgggagagctggtgggaactctgcattcaattccctcctggactctgccctgtgtgcatcttggttgattttaacctgtatctttttgctgcagtaaatcataactataagtgtaactgcttccagggagctctgtgagttatggtgaaagggtaaatctgaagttggcttgggaaccccttcagtgtgctgttgctgtcagaagtgaggaacccttgtgtggactccttgcatgaactctgctgctcccaacctttgtcactggctgaaaatctttgtggctggtgctgctgggtgccaggaatgcagaggcgagagtgcagggtaggagacggacatgtccacacacagatggggcccagagacaggcggtgcggctccgctccgggagggccccacattctcgcttgggagtagctgaagcaggggctgctgaatggactgttccacagggctgatgtggggaagcaaaccgcccagcagctccacgtcctgatgagagacagctctgccctcccgaaggaatggcaagcctcaggaagagatagaaacttcatttcttcatgaaagatgaaaagatgtcttaaaactaaagctacttcctggggctggtgaatgaagaaagtgaaaaggtctgaaagggattttatttaccaagaatgactaaatgcgcatgcacaagcactctgaaagctggggatcctcaaaggtctgctagacataccacttgtgaacgtggaggtcttatgtgtaaccagacaagtggccagtgctgcgcgatggagcgtgaagactcctgcagacacaccagcagtatcacctgctatgagaaggtgggccttcccaggaggggcactggaggtaggtttggaatcctgcagacacaccagcggtgtcaccctgctatgagaaggtgggccttcccaggaggggcactggaggtaggtttggaatcctgcagacacaccagcggtgtcaccctgctatgagaaggtgggccttcccaggaggggcactggaggtaggtttggaatcctgcagacacaccagcggtgtcaccctgctatgagaaggtgggccttcccaggaggggcactagaagtaggtttggaaggatgaggaaggtgggccaaggcattccagcaccaagagcagcatatgtaaacccaccaggttacagggtgactttgggaactagtgaataacctgatggctgaggcatgtgtaggagcagcagcttgcaaggctaccctggtacatgggagcctctcagacatcttcaagctgtgtcagagagagcctagactttccttctctgcatgatagggcccctgaaggcttctgaaacaatccttccttccttcctttaatcaagatttaccgagcactgggaaagaggacagcaagagaaggcacaacctgtgacatgcaacatctgattctgaatgactgaaggattcaccgaagtgtgaggaaggcagagaacagagaaacacagagtgctagctccgtgctgtggagttatgcaagtgaatgaggctgatcaactttcccatcatcaactcacccagaaagcagaacattcactttcccagttctattcaggggccacaggtgctatgagcagatgcaccagggcgctgtctacaatctgtgaccaggagcagcgatgctgacccagcttccctccatcaggtgctgccgtcgtggagatgcactcagcaccagggcacggagcacctgctccttctcggcgatgcgctcagcaccagggcacagagcacctgctccttctcggcgatgcgctcagcaccagggcacggagcacctgctccttctcggcgatgcgctcagcaccagggcacggagcacctgctccttctcggcgatgcgctcagcaccagggcacggagcacctgctccttctcggcgatgcgctcagcaccagggcacggagcacctgctccttctcggcgatgtgctcagcaccagggcacggagcacctgctccttctcggcgatgtgctcagcaccagggcacggagcacccgctc

SEQ ID NO: 1882427 - DNA, 4001 bp, Homo sapiens
aatccaaaaatcagaaaaattacttctgatagaagaaactaggtttcaaatgcgggtcttaataatacaactggattccgattgcattacattggttttctcttccaaataattggcaaatgaggacaaacagctcatccccatcctaacaggaaggtctgaatctgaagccttaccatcggtgactcattaggaccccattaagagccagaaaacttgcctaaatataatacaaatcgaatcttcaatgaggactacacatttgtaaactaaatttgaagtccccaaacatttacaagtacatttgttcttcataagtacagtcgtaaagaaaagcccagtcagtgacagtcaaccttgagcaacgttggaatatgaggtttgaaagtgaaaatagaggtcggcgcacaatctagttagtgcagagttgcattagacacaagtagtcagtgaccccgatgcacggaggaaattctgaaggttcaacatctgtctgaaaataatcgaaaggccctgcctagcagcacaagggactttcaagaatgggctttcctgtaaattttggatttcttttcttagagaaggtaaaaatgacctgctttctacttttcttctgattggactgcaatggccaaaaatatttataagaataaaagttaacaaaaacagtctaacccgtcagttcagaaccctagtaaaatttgttttggagcctagaactagaattgggcaaaagtgtagggctctttctcttataccaaaaagcccactcaaatgttctgtgagcccgctccaaagataaagtcagaaacaacttaacaacttcgtcttctttcactgattacttccctcgtgttctgtctattgctgatgatgtcctgacaaacagctccaagcacactcacccagtgcccgtgtgcagcatgcagaccacttgtcacccaatccatttctgagggatgactgtgttcctgaaacaactgaaatcagaaatcccttatttagcatttattagaatactgaatttaaaatattacatattatcatttgaaaaacaaaacaaacaaacaaaaaacctgttacttagattcaagttaaaagagggactatgtattcacccttagtccaggagaacagcttaaaatatgagcaccttttcctaagccattccacttaaatggacactagacctcaaaattgcaaacaataaatacataaataaaagcaataattaaaaaactaacttcaccatcatcccttcccgccaccccccaaacctacttccttcccaggcttcagatgaaatttctatgaatgatcccacccagtctcattcctcagctcagtgtcaagttccagtgtcctctgatcttccctttctctgacccccacacctttatggcgagtggccccccaacgccacgaggcctttccccttcactgctatggccgctttctgcaccacccttgggggaggtcacagcctctctgtgacctaagctctctcctctctaaagagaaggcatccacttaggtggtttatagggtttctcctagctcaaggatcttgagtgtatcgttgagctaagatacactcacgagctgagacctcctgactcaggcactgtggctgcactccaccaggtgacttatctgtggaccacactccacgtggccatctgtgcctatgctcttcctccacccatccaccaaaatgccatcttctccactcccactcagagccatgacgtccctctgcccccaggttgtccaggatcctctcatcttccatttccagccaccttttttctctaaaccctgtaacacttcataggagtccctcccaatgaaagccacaccccgcctggtgtctcacaccccaaagcagactgtaagcttcctgaagactgtcctgctcctcaatgtcccatcccctcccgaactgaccagcggtgctatctacggggaagcaccggggcagttgttgttgaattgatttcagttaattcagtttttaactgaatcacacaaaggatgtcacaagctagcttttataactaaagaaagcacagttgtgcagctgcctccagagtctctgggggttagagggaatgaaatagggaaagtccccagaagccagctgactgctgctcaaaccaggtgcaggttgggagaaaatctgtagtgaatgaaggaaaatgaaatgcacagtggaaaagaataccaacattcttgcaaaggaaccttaaagtattatttttgcaaagaatgcaaggattatttcagttcccttgttgactgttttgtatggtcttcctacagatactttcagaaaaagatctattgtttgtttttctctgtgctgacacagtatccattgtttagaactgtaatcatagcacacatagttgaaaatgtgggctcggggacaagctgtattttcccctctggttctttagacagtgaatactgtgttctttatctcttatcacagctcttttgtcaaacatttaatgattttttcccccagacaaatttgtagtttgttatcaaccataaaaatgtctattgccttatttttaaacatttaaactttggtaagtgtgtctcaagatgagcatgaattaaggtgtttatttcattttaaatacttttttttatcatagcgtacaaagctagagttctctgacatggatggcttatgtggatctctatttagacttgatgagagaacattttatttttgtactgtgtgtatttgcagggaagatggttaggctgactggctcccaggttgggtgtgttgggagcatctgtcaagggttggacaggtgcagacatctgtgacgtcctgcagtaggcagccatcactcgatttcctgcttaaaaagatctgacacacttcttcactccttggatctccattttttccaaatgcccgatacttcttaccattctacaacccttaaaccggatcccaaagtctgtgagagataaaagccttttttaaacccaataaacagtcactctttgttgttcctggttttaaaatgacaatttattgcttgatacagacatttgaagcctataattcaaatgaatatttataaaaataaatttcaagcacactggcatgtaactgcagggtaatttttaaatattcatttttaaggtggtgatagagtctagaaaaattttaatgtgccacgttatattttataaatatccaactatagaaatatgccttgtgtgctaatcatttccataaggcttcacttagattgagagagtgaaaatgggtgtcagtctttcaaatatccagaggaaaaactttcattttgttttaaatttgtttttgagggctgaatttaaacttaagacaatgtatgaagagttaaggtcagagttggtactttcaccactattccatttgtattgctttaaattctctgattaagtgtggaaaactatcaacaaggcgattgttcccaggggctgcccggccagaaataccgagactgaccatttttaagaacccagtgctatgtgcggaacagggcggcatggtggcctcctgagaactgggagggaaacactaaatgaagacgtgaacacatgggatttctttctttctttatttttattaaataaaaaatatttttattttgttatattgaactcgacaaattttcctcagagataatttttgtttcaatattcaaagttagaaattgtaccagcccgtcatagtttgaaagtattcctaaaagtaattcaaataaaaatgtattttaaatgtagtacacattttaaacatattggagaaaacatagaatcagagactttttcaaatccatgttggactaggaaactgtttctttttgtttctttttttttttttttttcctgagatggagtctcattctgtcacccaggctggagtgcagtgccgcgatctcggctcagtgcaacctccacctcctgggttcaagcgattctcc

SEQ ID NO: 1882428 - DNA, 4001 bp, Homo sapiens
tctgctctaggatctgttccaacagaagggtaagtggatcaatcatccagatttgccaaggactaaggggtttggggactttcagggctaaaaccagaagtaaggagtttcctaggaagcaggactgtcagtgctaaaaccacagctaagggatttcccaggatgagggacttttagcattaaaactgggacggttcagtttcccaagatgtaagactttcagtgctaaaacctggacaatttcttctgagaagggggttaagtagactctggttctaattctgtttggcatttcttagtagcattacccgaggcaggttctttctttctgagccacaagattctaccacaggtggaatacacaaactacaggtgcacaaaatattttatcccctccaaacacaccaccctctacctaagcctgacttcccaattttctccaaaacagaaatccacctggtttacctcaacacatataaatcggtcctcactccctctgaaccttttgtccatgctctgagttttcttcctggcctgacagtcccagtctaagacttgcttcctccagacataaagctgcgctacagggttggaatccttgctgttccacgctttactcactatgtggtctcttctagttgcttaatcctctctgcatcttagtttttccttctgtaaaatggcactgaaatgcttatctaagaatctttgggtgtttttctaatccttatatgtgaagcatttagtgcaggggcccaaacaggtactaaatgtccactctccccttcctggaccactcccgcccatatatttaatacttttcacttcccacttaatccatacaggaacaagttcctaaactctgcttcccccagtgcacttggccacatgcagctcagacaaaatgatcatgatccaggaatgccttctcttggaaatgcaatcctgcacacacagacctttgatggaatacacagcttaccttctctacgggggctgcagctttcaagatagcaaacgtcaaccctcttggtcttccagtgttgggattcattttgggggatggtccacgacctcttcaattgtggtgaaacagtcttttgggtcctttttgctggtatcccagctctggttcattggtgagacgaacggtagggtgagacacatggccacgagaagtcttacgacaaagccatgcgcttagaaagtcttacaagaaaggcaagagtttgggagggctggatttcccaaagctttcactgggaggattacaaataaagctaccacccatggcaaagtgtctacacccacccactctgggtctgcaaagattctacctccgacagctgttcacaaatctactctacctccttactgagatccaccttggtcctaacagaacttaacatcaccacaaacccccagggtgggagaggaaaaggaaaggcaacctctcagggcgcaggccccatgcactcgtcacaggtggaagttagtctaaaaaccctcttatcaaagggctgtcgtctcttctatccctgtcttccccggcgcttaggtgtcgctctcaaggaactcggtcttcctgggcagagcccgcggtcagatcctgactccgagcccaggtggagggaaggagagaagaggaagggagggatgggaagccttgcccgggtcggagcgcacatcctcctcccgagtctccgctctctcccctgggcggctcctggacggcgcagacgtcgatcccacaggtccagccaactcccacagcacctgccccgcgtccccctagttcttgccgccgttctggttggccttggcgccgttctggccccgccccggcgacccgccgtcggcggctgcctcgtatgggttctcggtggcgcccgtagtccccaagaccttcttcctctaacttgcttctaacacacccggcaggggagcaaccgcctcagcctgggacagcccggctttgtgggagcagcgggcgcgctttataaggtccgagttaggggacggacccaccttgcccaaactacatgtttattggctagttttgcctgacactcagccaggcaccgctgtcccattggccgcgctctaaatcccgcggatttgtcctctagcaacgtctcagagccaggaccctggagagggtccaagagatcccgcggaaggattgcaggggcaggtccagggccaagaggctcccatgcgccctccgcccgccgagcccgcagcctctcgaccccgcgcgtctgtgtcaaggcatggccaaagtgagaaagagccaagacaaaacaagttcaaatagcaatagcaaaacaaccaaaaggaaattcaaggaaagcaaatataaatgagaaaaatataattaagcaaaaatgaatgttcgcaaaggcaagacaaaaaaccaagtcaaggagtaggttcaaagaaaagatgaaacgtgaatataatttaggatatttataccgattcctattgaaatctcgacaagtaaaaattttactgtcagtgaatcaaactttcatccttcttgcctttcctatgaaagggcagcagggggcactagatgctagggtttgattcggctaggaaaggcgttttagcacgttatttgcaaacacaaaatagtgttctgttaaagttcagagatagttataaaagttaacaggaagtggggaaactagagtgatggtctacaatctgggatgttaaagagactgaatacagtcacaggttcttagtttctgtttctggctgggccagtaaagccccttcctcatccctcttttcagcttcattagagacagaaactaaaaaccacggcttcaggctgctaaaagcctaaaacaaaacaaaacagaacaacaacgacaacagaataaggcgggttggacaagcttagtacatagaagaatgtgcgaaaaaggtatatgatttctgtacaccctgttggctaagtagtacagtgtcctgaaatactgggagggtggcaattacaaagagtaaggggcagtttttcagaggtgagctctgaaaaagatgcaggacagtggagagtgaccaccagggcgccaggctgactctctgtcctcagcctgccatatggacccgttttgaacttttaccaaggccatgggactttccatgctaaaaccaggaccgagggtttcccagacaagggactttcctataagcaataatggttacaataacaacaacaacaaacaacaaacacttaatgagtacctattgtgtgccaggaactattctaagcattttacaagtatcaactcttaatcttcacaacaacccttgaggtagatactctatcctccctaccttacagaggtggaaactgaggcaactcaccaaaggtcatgcaaacagctaagaagtgtcagatccaggctttttgcttgttttttgtttttgtttttgttttgagaacggagtctcactcagtctcccaggttgaagtgcagtggtgcgatctcagctcactgcaacctctgtctcccagattcaagcgattctcatgcctcagcctcgcgagtagctgggattacaggcactcgccaccacgcccggctaatgtttgtatttttagtagagatggggtatcaccatgttggccaggctggtctcaaactcctgacctcaagtgatctgcccacctcggcctcccagagagctgggattataggtgtgagccaccgtgcccggcccagatccaggtttaagaaaagtgtaggtgtgcaggctctgctgtcattctgtccgggtttaagtcaaagctccaccacatacattaatacaggaaaatacataacattatgactagcacgtaagagatactcaatagtatttgccattattattaaaaagagttgtccctggtatccagaagcttaaactttagtggaagaggttcataagagtcttaaagcagtagtagtgcttattggatgggtgaatggaatagataataa

SEQ ID NO: 1882429 - DNA, 4001 bp, Homo sapiens
cttctcctgctttgtattttctttgatactttgttgaatggcttccactaagttcaaatgtattttactctaaagtcaatttgtaaaattttatctggtaatttatatattaaattgaaagcatctacacattgcttatatgaagaactaccatgaaaacgtatggttccatttatatgaagtgtccaaaataggcaaatctataaaagcagaaaaatacatttgtggttgccagaagctgcagacgcagggcaacagctaaggagagtggagtccctttttggtgtatgaaaatattttaacatttattgtgatgatggctgcacaactctgaatatatttacatccattggcttgcatgccgtaaatggatgaattagacctcaataaagctgtttaagaaaaacctattagtgagaccaaggacccccatttttctaagagatggtttaattttttgtgtgttttttgtctccccagctccccactttatacttggccctttagaattgcaaatatggctttttacctccccttcatctgaatctccctacagggcaagtcatctaactatgtgcttcaagatggaactcctgagttcacagttgatttataaaccaaagaatgtccactacaaaactctcaccctccagagacttgtctcaagcgacaacatcctgttcacaagggcaccagcaggcaccagctggtggataaggtgccaaagctagcatggacccctgaaccattgcttgcttcctcccctgccttttaaaagtaccactttctgctccaaaagtgaagtggtaaaacaggactcttgtatttcttcccctaagctagcgttggaagtacatcactttctttacaccagacttctctcttcttaattagattctgcaagtggcaaataactaacctgctcttccgttacactgggatgtgtttagattagtttttcaaaggttagaacaaagttgaaaaagtgagaagagccctagattttttttcttggaaatctggcttaaatcctggttcctttatttccttgatttgggaatttggtctctgggcaaataacatcattttcctaagtctagatttccttgtttataaaattgggatgaatatgctatgctatctacaccatgagctcaataagctactgtctgtaaagaaatcacactcacactgacatgtacacacagatatgtatgtacgtatacaaatgtgaggacctaacccaagcactgagtgagtatttgctgagtcactatctgcatacagcatctggcaaatggatgtgtgtaatttctccagggataagaagcaaacgtatacctatggaaagccttattcaggccataacaaggagagaaatgctgagtcccactccatgaatgggtcaaggagcagaatatattcaaagagatatttcattgtttcaacttgaaagtgaggggagcatggcacctgaacagagatgatataaattaatgaaactgagaaccaggtgaagagcttgaccatcctttgcgtagttagctacattgcctatttttttctttcaactagactggccatgatgtaggcacactcttttagattagaaacaccacccattatgcccattcattccagcaccctgacagtcttcatgtggaaattaaacttagttttttaagaattcctcaatcttatacaagattttgaactggcgattttatgaatcaaaaattaaattaaatgaattgcacataaagatatggcatatgtatttttactacattgtgggagaaaaaataattattacacaaaaaaaactatgtcttacctgatttcagaaataacagaagtagaagaaccacttccttatgttccattttgggactggccagcagtgcccagaaagtgtgtcccaatcccaggatgttgttgacttacatgagagtaaacgcatccacaaaccagatagtcaaattaagttaatgattctctcagagacccatgccactggctcagcagagttcaaacattacctgaatttttagaagcccttttctgaatccaaccatccctcagtcccctaagagtggccagagaagaaggactccactgagctgacattccagttcagtaagttgtagggacagttttttaaaagaatctgtaggtaggggagcaccaacccataacatactgtaagcctgcagggttctccagcccagtcccttctagaacccttccctgtccacaaccagtgacggattattccaaacgttgttcagtttcatttgacctagtttgaaaaccaagttccaataatgaataactatgggagcttgggttgctgtattcggtctctgagtagcttttccacctacccaggccacaatcaataataatcaccattgaacatccttgaagcaattcttttgaaattactttgcatcaaagattgcacaagaactgctttaagtagaaggactgatgtcagcaatcaagggtcccaccgagggctgcagatagttcttgaccttcacatgggaaggcgtcattgagttctgacactctggcaatcctctaggactcaactttctgataagctaataaatggaaaggtgaaattagataaagacattattacctcatgggacaactaagcattagaggttagtctaaacatgctcttttagaatctttactacactactagctaccatttattgtaggtttgtctatctgtgccagatacaaacaacactatgaattacccataccatgctataatcaccagatttttctctgttattcccattaccattttatagatcaggacattgaaatttgcttgcccatagttatatcaaaggaaattgggaaagccaggttccaatgcaaatatctcaaatgattacttttttttttttgagtcagtctcactctgtctcccactgtggaatatagtggcacaatctcagctcactgcaaccttcatctatgggtttcaagcgattctcccgcttcggctttccaagtaggtgggattacaggtgtggaccaccacgcctagctatttttttgtatttttagtagagatggggtttcaccatcttggccaagctggtctcaaactcctgatttcaagcaatccccccacctcagcctcccaaactgtggggattataggcatgagccaccatgcctggcctcaagtgattactttcaaccactgcactacaatttactactgggaggaaagaataataataatagtaatggctataatttattgattaatggctatatgcttggcattgtactcacttttgaagttttaatttataattgacacatagtaattgtacgtatttatggggtacagtgtgatgtttcaatgcatggatacactgtataaggatcaaatcagggtgattagcatactcctcacttcaaacattttttctttgtggtgagaagattcaaaattctctcttctagttatcttgaaatacacaacacataatcatgaactatagtcaccctagtgtataatagaacaccagaacttattctttctatctaactagaaatttgtacacattgaccaaccccttttcattctcctctccctgactaccctgctcaccctctggtaaccactattctactgtctaattctgtgaaatcaagattttactaagttttattgataaataataattgcatatgttcatggagtacacagatatatttcaatacaaatgatgtacagagatcaaagaggggtagttagcatatcaatcaatcacctcaaacatttatcactcatttgttttggaaacactcaatatcctctttctagttgcttgaaactatacaatataatattgttagctagactcatcctacagcggcataaaacactagaacatatttctgatacctaggtgtaattttgtagcctttaacaaatctctccctattccccctttccccac

SEQ ID NO: 1882430 - DNA, 4001 bp, Homo sapiens; identical to SEQ ID NO: 585411

SEQ ID NO: 1882431 - DNA, 4001 bp, Homo sapiens
gcctgccttgccagtgacctgggctgacacggggcatcagcaatgggcatctagaaaagacaaaagacgcagaataggtgttctttatgaggttggactctgggcaggtgcctccccaggccttgtgaggggtctgtgaggggtctgctgagagatctggggtctctgtacaaaattaggttctcgggcatgtctcaaagtgtctgtgcaggtgtttccagggccgcagtgatggcggggggtatcctgggttgggggctgcagatccacggaagctagtggaggaggtgtcctctcccagcgaagctggccacaaagaggggcagggaggcgaggaggctggtgagctgctgtggggaagcggctatgttgcacaggtcctgctcgcagcagtggtgccacagagtgtaggagtgcagccagtaggtggcatagcctggcagagggcactgggcccttgagaggcagctttttcactcagtgatctcactctggtctgtgggatgaaagaggcatgctgaggcgggggccacaggaaaggccggatggatggaggtagggagcctcctggagaagggccattggaccagagtcctacctgaagtgccaatactgatgccacaagcttcatcgtcccgacactcggtgggaacagggtggcagggtttggtgaagccacagatgtagcagcggagccttccccgggcaggggacatggtgagacctgttgaggcagcagagattaggagagcaggagaggcaaaccctccctgtggggcaggcagaggccagatccggagagggatcacagagagaggtgacacatgaagcagagagaggaaagctgtggaataagggaggaaagctgacagaagtagaaaaaatagctgggcgcagtggctcacgcctgtaatcccagcacgttgggaggccgaggcgggctgatcatgaggtcagaagattgagaccatcctggctaacacagtgaaaccccgtctctactaaaaatacaaaaaattagccgggcatggtggcacatgcctctagtcccagctacttgggaggctgaggcaggagaatctcttgaatctgggtggctgaggttgcagtgagccgagatcatgccactgcactccagcctgggtgacagaacgagactctgtctcaaaaaaaaagagggagacgatgcaggaaaagaaacagagatggaggcaagaggggtacagggattgagagatgcgcagacatgaacagaagccacaagaatcagagaccaacataaaaagagtgagacaaaaagccagacccagcagcagggaagttgagggggtcagtgaaaaagttaagtaaatggcaccagagacagataggaaaatagaaattgacattgaccaaagggcccagcacagaagcaacacgtgaaataagggataggggagacaggggcggatcaaagatgcagcaagggggagacagttattctcaaatgccttgaaaggaaactcttcctttcccacctcatcaggctggccttcccagtggctggtctccctgaagtcccccactcccccagctctcttcttggcctcttccagcacccacacccctctcctccccagccctcaggttcctccacatgcccttgtccccacccccagccccctgaccactgaaggttccccagcccacccttacccagtgccccacagaggaacagcacgcagaggaagatgctggaggtgcccatggccagacacaggctcaggaatctgggagaggtgatctgcaccccgagatcccgggatttgtagagttggagcatttgagcaagacagtgaggaaccagtaaacaaacacacctagggagtgaatctggggggcggaaccatgaccagattcaccagcctgacccagcaggcagcgggggcccccagcctgcccctgcaaggagtctgcccttgcctggagggtctcctctgctctctcagcatgttgtctctgtaacttagcttcctctcctgctcctgagttgtgtctgtcgccttccctcctactcctccccctccctccccatgtctcaagctgctccctggctctctcagcttctctctgtctttgttttctctgtctttccccctcagtgctttcatgtctctcaaagtcaccctcctaaacagccccggcgtggatctgtttgagtgtagaatcaacaatacccccacccacacacccacatgcacacacaaagcccagctgtgtaagggcggaccccacccagcttcagatccctttgatccccccaagcttcaacattcctaccctgtaattatccctgccagctttactaccttggaggaaagaaataaccacgggtggggctggagggcctgctgatgtgcttgcactggggagaaatcactagaaaggaaggcatggatgggatttggggtaggggggtggtgatacagcctggaaggctggggttgaagagactgggaaggaggaaggcccatctggggaatcagagccagcatgtaccaggaggagtaagactaggaacagggagtgaagataggggagacacaggtgcccaggagagcagctcttttcaaaaatattgatctcaggacctctttacacttttcaaagttacttaagactctgaagagcttttctttatgaggttatatcaatatttactacattaaaaattaaaacagaaaatttaaagtaggtatttattgatttatttaaacaataaaaataataaagtattacatgctaacaaaatacagttttgtgaaaaataactattatttctccacagcacagtgagaagctgagcattgctttacatttttgtgaatctagtgtcaggcttcgtgggagatgcctgggttttcctatctgcttctgcattcagtctgttgggatatgttgttttcgttgaagtccagtatatgaagaaaatctgaccttacacagatagttgcaaaaggaggaccctcaaggaccctgtgaaagggtatcagggatcctcaggggttcttgttggtccacagactgctgctgaggataaaggagtttgaggactccagaggatgctgagagcatgctgtggggcccctccctgtccccactggggcccttggtgcctgctgggggagactctttcttccttttttatagccctataaagctcaaggcacgggggatataaggcaggcagagccgggctggggaggggggtgggcaggaggtagaggcggtcctgacacgggcagactgcgatgaaaccccagtttgttgggatcttgctcagctccctgctaggggctgccttgggtaaggaggcggccagctagcttctcacacaggccttctgccagccggctccaccgagggcccaggtccagcgcctcttttctcctgccaggaaaccgaatgcggtgctacaactgtggtggaagccccagcagttcttgcaaagaggccgtgaccacctgtggcgagggcagaccccagccaggcctggaacagatcaagctacctggaaaccgtgagtcctcagtttctccctcttccagcagcctttccctgcctccagccccatgtcaatccttctggcttccagaaccctccaggctcagtctggctctgggcagatggtgcagctgttagaggagagcagtctgtaccccttctggctcctggcacggagcccctgagaggcccacagtccttgtgcccccacttccccacctccttattctcctaaaagaatctcataggcccattagctcacaaatgaagagctctggccctgaaaggccaaagttaaaaccaaacttcaaattttcggcattagttaaggaccagggaggggtgtgtgtgtgtgtgtgtgtgtgtgtgtgtgtgtgtgtgtacatgtttttaatattttattttaacataattttggattgacagaaaagttgcagaaatactcaacttctcctaat

SEQ ID NO: 1882432 - DNA, 4001 bp, Homo sapiens
atgaatgtccaagaaaacttttctagaagagatttgattgttgctgccctttgtatgcaaaacagatgctgctggctgctctcctagagctcttcctcacttctggcagggttcacatgctgctggtttggagaagcctgccttcgagggcccacatgcccgggggagaggggagcaggggcagtttggggtgtgctggattcacccactataatgctgtcctcccttgggtggaagccatagaagtcaacaggacagacagcaagggagtgccacatagaggccaaggaagaaatattgaaaatgaacagtcttctatttcgtgatgaagttttgacttctttcctcaggtcatttgctgaaatacagtgaagtatctggaggaaacacttatctctgcccttgaattcccagaacgccaactctgattaactttccgatgttattgcttcagaaagtccaaagtcagatgatccgtcttacatgtattaaaagttactgaggcaagggtccaagggaaagtctctccgctctcagcctgtccgtcactgttcatactgtagaaggagaactactttaaaatgcaacctaccatcttttatattggtaggtgattctgaggcatttgcaggataggtaaagcctggaaattgatacagtgattatttaaagcagtgatcgccaccaggggtgagtttatccctcatggatactttggtaaggtctagagatatttttggtttcacaactagagggtatggggatgctactggcatctggtgggtagagaccagggatgcttctagacatcctatgatgtgcagaacagcacccaccacaaaggatatccaaaacaaaatgtcaatagtgatgacattgaggaatcctgctttaaggttctcggcaaatttactacaaataaccactactattcatccagcaaacaatcactggagatttagtatgatattaagacattatgtatagccctggcactggggagttagctttgcagtatctagtggaggaatgacagaggtatacaaacaaatataatgtaatataaaacatgcaaagtgcctgagtggaaatgcaaataaatacagagaaggatatgagtttgagagggtggggttgggggaggaggaagaaccaatgtcactttccccaagaggaccacaaactgcatgtttacactcaaagatatcactcttgcatataaatttgaaataactgctaggaaagctcaccaaacccttaagcgctttttaagcaatctgtctttctgcttttatatacatatcctcagagagatgcagcctacagctttctttgtgactttgttctttattgagattattttcctaacaacaatgtgtttctagtaccaagaaaatgctttatttccttctcccgcccttagttgattctttctatctatacctttaaaatattgataaacatacagtgtaattctatagctgctaatcaacaacacaatacgtacttagcctcttttattttgcctggatagcaacttaaatttatccacaattttgaggattcaccttcctaagcatctgttcattggcttctgtctttttcaatactgagtgccaaggatgtagcaggaactatcgtctccaaccccctgctcctattttccaggctgaaagaaaccctgggacagcacagagatacttaggaaggagtccaatgagcataagacaaaagggctctttcccacccttaggaaaattagtgactggaccaaaggggttttgatcaaacaaaagtgtacttacgttagatttgcaaggctgaaattgcctagtgatcatttccattgcagatatcatagacaatgatgcatcttccaggtcagcaatgtggatgataaaactgtctggaacactacattggcaaatgtgagctcatagctaagctgaaatggaaatcagttatgaaacagaactaccagatgccatatgcctgcacacaaaatattctgggcaatcttacaaatcaaataagtaacatatgtagttgaggttctactttgtgagtttcactgcacaatacccgggagcaatttgtttgtttgtttggttttaactctggctttgaatcttgactctgacactttctagtgtggggatctagataagttaatacaacatctccgagtctatattttcgtaacagtaaaatgaggtaaatcatacctatctcttcagattattgtttattctgcaggtctgggtgctgtcaggaaaacgaagaccatatcagttattttaacagagagaatttgatataggaagttggttagagaaccagttgctggagaaccaaaagagcaaagaaaggacccctgaaggctgggagagcaaaaggcagaggttgtggggattagaaactggatgcttgacagaaggaccctgtggagctgagacacaggctgctaaggaaagggtgacagcttctgatgtgctgttactgcagtagcttagggccccgcagagctgagtctcagctgaagctgggaaggtgcaagagagctggaaactggaaccaactgccactgccaacatgatgggccatcaccagtgacactcccagcaagtactcacgaaggagcaagtcccttcttcgactccagcctccatctctctgctaccttgactggcagacagtgaaggagaaacatgattaccgagagcccagtgaaaaagcagaggaaagagggctggatttggagctgagaaacagccccaatatatggcccatccattcactcaacatgtacatttatggagtgcttactgtggatcagactgtgaggctgtgaggctctctgctaggtgttggggaacctagagaattaaatggaaaacactcctaaagtacaaggctcagctattagtacaaggtaaaccctctgttaaaaatagctctcctatctccagtccagtgggaaacataaaggaaaaggaaatggaaagcaaaacaaacaaaacaaaacaagaaaccagctctggcctttaagaaatctcatgtttagattcagtgttgcaggataagccacgtagcaaagtgcagagtgatacatgtttgtacactttaccaagaatgccagacatcgctgttttaagagttcaaggaagcaagagaatatatgggggcagggaagccttcacaaagaagatgggaatgagcaagacctgaggatttagataatggccaaaaagactaagaccattgcaaatgggagaaagcacacaagcaaatcaaacatggtgggaatgtgctggtgtgtatgttgccactctggcctcaaggaatgaaggatggatttgtgatgtggaggatggaagttggagccagtcgctcatttctggactgtattctgaggcatagataagccattggagctttgtgaatgagcagaagttgtatgcagaaaatattatctttatagcccctatcatatctaacacaataccttgtacatagtggaatatttggaggaggaagcattacattaaatgggatgggatgggatgggatgggatgggatgggttgggatgggatgggataaaatggaattagaaaggcaggtcttaactttgaaaatctttttagaaaatattttgagcctaagtattaatgtctactcaagctctcctaacttttgtatctccctctgttttgataataataatagatactttattaaatccgctatgcaatccatgagcaattttaaggccaaacgttcaggaactaaaaaaattcaggcaatgataaacattttctatgataaaaacattaacaagtaaagatataacccaactagcaagaccctgtttattccatggatggaggccccctgttgtcagagtgaacatgatgttggctttgaagacacgggggggagctgatgaaaatatcatgggcttattttaaaaagtgttgggcaatatgcttttgaataaat

SEQ ID NO: 1882433 - DNA, 4001 bp, Homo sapiens
ctcatacagcagctgtttcatcttttgaggaactgaccgtctgttttctgaagtggctacaccattttacattcccaccagcaatgtatgagggttctgtaatttctgtacatcttcaccaagacttattattatttctctttttaattacagccattctagtgaatgtgaatctcagggttgttttttttttttttttttagagactgtctcactctgtcacccaggctgaagtgcagtggcacgacctcagctcactgcaacctccacttcctgggttcaagtgattctcctgcctcagcctcccaagtagctgggactacaggcaatgcaccaccacaccaagctaatttttgtatttttagtagagatgaggtttcaccatgctggccaggctggtcttgaactcctgacctcaagtgatccacctaccacagcctcctaaagtactgggattacaagcatgagccactacacccgacctcatagtagttttgatttacacttccctaatgattgtgtccagcatctactggccatttgttagtggtttttttcttcttttaagaactgctgagacatccataaacattttcaaaatgcagggtatgtttttcagtgttaaggcaactgttctgatgtgtttttcctttgctctctatcaccaaatactgtacatataaatagtaagactgggctttgtgttgtccattgttaatcctaaatgcaacaaaacacatggagactttgaaaatccttcagaataatgctatagttaagattttgctaaagcaagtgttttttctaactccttgagctgcatattgccttgagtaatcatcatccggattgtatcctgtagaataaagtgaaatctggttatagttttacctggttaaacaaggtatagctataccattttatctgttaaaatcaagaaccaatactacctattggaactgctgccttttagaaaagctaaaagagttccacatacatacatataaaatgtacaacataaaagtcaagtgatgatgctgaagagtgtagatactcttttatctacatattttaaaatactaaattttaaaataataatttaaaatcggtaacattacaagcaatgatcaagatataccagctcagtggcactatattccaagatgtctgctaaacttaaaaaaaaaaattcactgatcaataaaaagggttaggatctgtcctcaccatgattttgttctcacctcttcggtggcacttttgtttcttctgaattcttctcttgcccaatctttcaggtatttgcgatcagaatcatttggaacttgccgaattgtttgcaaaatccttctgtagaggagaagaacttgttgccttcttacgaactgtaaaagggaggagtaaatagcaattactactgcacaatcgccagcctggaaagttctacttcagcaaaccaagctgtaaccagagtacttctcgttggtcaattttgaaaaaggcaaagaaaaacttttttttttctttttttggccagatgcagtggctcaggcctgtaatcccagcactttgggaggccaagatgggaggatcacttgagcccaggaggtctaagctgaggtaagccttcattgcgctactgcactcagcctgggcgagagtgaggccctgtctcaaaaagatgttttaaagaaagcatcacgaggttcatctgatctttttgcttactgctctgtcaaacctaagaaccattaaaaaatcaggagctgcctaccgggctgaaaagggctgccggtctcctagaagttgttattacaacgacagcactttttctaaattaacagttgttcaaatctttggtaatctcatttgctgtttgccacagctcagtgcaatagacttttaccgtgggcactgggcagctgaggcaccgggactcagggaaatcaagcgcctgacgctgtctcacgcgatcgcaccaaaccaaggaagcagccagtgcctcccgtcaggccccgcggagcgaagcaccgccccgcaggcatcgggccaatctcagagggcgcgcacgccgcatcaggaccccggaacccgccccgttggggatagggacagatggagaatccagctcagacccaggtaagctgctttggaaggcagagaaccgccggtacctgctttaacgttagcgtcgctgggggtaagcgggaagcagccatgtccaccagaggtccgccggagcctcagcgcgcaggagcggaagtggggttcgaccaaggggtgtggcgagcccggtttcctaggagacggcccgcgggttgctctcggactgagagcgcgaggcttcgggactgagccctagctgctgcgctggccgaagttttctcgtcggtaaaataggataacagtgcaccatagggtcgttttgataaagaagaaaggtagggcacttaacacagttcctggtaaagagagttcaaatgaaagtgaaggaggccgggcgcggtggctctcacctgcagtcccaagcactctgggaggcctgtaaggtgcctgtaatcccagctcctcgggatgctgaggcaggagaatcgcttgaacccgagaagtgaaggttgcagtgatccgagatcgcaccactgcactccatcctgggcgacagagcgagaccctgtctcgaaaaaaaagttaaggtttttttgggggaaagaggtgaaaacgtatttaaatgttctttcgagcctttaaaaatgtgtatagttgaaaatactaaaattgaaagtgttaatttcttttacagtttgtgttggttttttctctttctcgtttttgtcctgttcttttgtagcgcaaaggttttccgggagcggtggccttcatgatcatttgaaacaaagctttgaatggctcacccacttcagtcttaagcacttttcatcactaataacgaggagcctaacatccctaagcctcaggcttttgcttttatttccttatagttgttttatctttcccacaatacacatgcctttgggttaaatcactagaagtggagttagcgaatctttgccatattaattttccaagtggtgttgtatcgaattaaaatagaacgaaaaatgttcaattactagtttactggggacttgcttgcctcgcctgttagcatcctggggctccctattcctagctgtgttctggctatttcccctctcctggcctattacctcccctgtaaagtgaaatatagcatctacctcagttgtgtatctctaatgtactgagaacaggtcctggcacatgtaagaactctaatcattagctcttttgaactttaccaggcattgtatgaatgatgctaactgcatgatcatattatcaataatatatgccaaattttgtctaatacattagctgtaatagttaattgctaactttttaaaaggagtgaagttaaatacccctcgccatttttagttatactgtttttgtgaattgttcatgacttgggtccgtttatgatgaggacatttatatgggctctatattttttgtcatttctttatacatacagaaactttatacaatcatgtatttttgtgccttttgaggcttttcatttcccattcaggcctttgtaattcgttttttaaaaactttaatttttaaaatatttactccatctagaatttactttggtttacagcatcacgtggatctaagttcttttctagatgttaagctgtatcaataccattgattacataactcattcctttttcggggctttatgatggatgcctttttgactgtatgataaattcttttagggtctgagtaatctgtccagaattgtttcatttagggttaagtttttactttttgttttatatgtttttattatctggcaggactctagtttcttgtaaaaaatccattagtactgttctctataatctttagaaatgttttgtatcatttccctccaaatcatcttgtga

SEQ ID NO: 1882434 - DNA, 4001 bp, Homo sapiens; identical to SEQ ID NO: 585423

SEQ ID NO: 1882435 - DNA, 4001 bp, Homo sapiens
aaagagagaaagaaggaaaccattattcttatttacaaatgatatgattacctatataggtcatccaaagatgtaacagggaaataaagcaagcaatcaaaaaaattcagcgaagcttctggagatagtaccaatatattgaaattgatgctcttttaatacaatgttactaaacaattagaaaatagagtttaaagagagagatctctaattttagtaataaaactaggaggcaatataatgaaagatactcaataaattacaaagcatagtagcacataaagtacctgaataaaataaatataccatgttcatagataagaagacatttcactaaatctctaaatgcaattctcaagttgaataaaatgcccaattgaaatccaattttttaaatggatcttggctggctcatcctaaaatttcaatgaaagagtaaagagccaagtatagttaaggcaattttagacaagaatcattaggaggaggggtttgcaaaatgttttaatacatagagttgagtgcatgggtgttcattatattattatttgtcctttctgtgtttaaagttgctacaattaaacttttaaacttgtagaagaaagaatagtttctgatgttatgttgggaagaatcttgtaagcaagaaagcaaaaagcacaaaattaaaatgtaaaatattattaaattcaaaaagctgtatactgaagcataaagcttttggcaatcaagaaacatcataaaaactggaaagacagtccataaactaagagaagacatttgcaacacatgtaacttacaagagagaattaaactagaaaaaataaatattatctacaaaataattttcaaaagcaagcaatttaataaaaaatgagataaaattaagaacaggctttagcaaaagggaaaatgcaaattaaaagagcaatcagatgctcttatcagcaaaaacttaaaaagtctaacaatagcataagggtaacgatgtgccagtctagtttatgggaaatggacttgtatacagacgaatctcaaaacctctcaaaacctaaattagtgaaaaaaggggaaaaatgaagaatgattcacatatgaaatataaaactaggaaaatagtatttttagggaatcgtacatatgtaactattttcagaaatacaacggaatgagtaatataaaattcagcataatggtgaacggaaggaaggagatgtttttagagagtcttctttctagaagactccaaaaatactggcattttttttttcttaagctctgtagtgggtacctgggcatttttcattcttctttaagatatgcacatgagatatactcatatgtatatttcccaattaaaattggtgtacaaaatctttttaaggagagcccttatgaaactgttcacatcagcaagttctagcttgaataaggacttcctgttactatgtaaccaaacaaaagatagcattttcttgttttctgaagctaatgtaagatggaaaccttcagttgtaatcctatttcaaaagttcttgctcttcacatctgacttatcctcaattatttctagtacttcagtacagatgtgattttatagaatacattcgcaaattaaaaacgccatctccatctgcctaccttgggcttccaagtaaagttctatttttacaaaaatcaaaacagttcctcaactttaaaagtttgaaaaccagtgtacttgtaaagcacttgatgcaagcaacttctgaatgtttcacataaaaacaaacaaaaatgtgtcctctgtaatacagttagagcctcccaacagagcctcagaagaccgtttctaaaggcagtgagttctacttgcagaaatagggcgggagtgcagtctgactccaatccacacgtccttcccctctgacagaacgccccaaaacgcagtcctctctttcttccgcgccgctcccgccctagtcctcttagacccgcgaccggaggctccggaagaccccgagccccgcccgctccgtgaccccgcccccacccgtcccgcccctgaaagcgcccggaacgctgtgcgcgcgccttcggggaggaggggctgtctgggctcggggcgcggcggcagtcagctctatgttcgcggtcttaacctctcctctggccgagtccttgcaagaagtgaattacccgaccctggtgagtagctgcaggagtcagacctcttggaggcggcggcgccagcagcggcggcaggcacgaggtccaccgcgggcgcctgcgcgctcgcccgccagccaatctggtggccgctttcctccgggcgccctttgacccggcgcccctctggcaggcgctggtggcgcccagcggcgagcctgtagccccctcgattaacctaggctgtcactcttaggcctgttttagtctgcgttagttttactgccttttacactgctttatccccacctcactggcctcgtcgccgcctcctctttgaaacggtacctcctgtcgcctcggattttccttgtctccccgacaaggtggaaatttcgggtcggatggaagcctttttcagcaccttctccttgtgcccccagactgcctctgggccttgagccgaccgggagagtagaaggatcgaggcctgctgggctctgggtgcaacggaaaggtagctgtcgcctctgggcatcgggaggagaccgcccgatggcgaggccgctagagatggtttttcagttcacctgttaacgtgtttggcactgtcatcttagactcttagcctttgctaagtcgggatgcaacagtgctggattagtgtttttgttgttcctttttccaaagaagcaacttgaagtacaggcaggtataactgtttggttttgttgttgtaagaccctacggataagtgttaggagaaaatgtggaagtgctataaaacaacaacaagggggggataatgttgattaagaacttgaaaataagaaaaatgggactggaataggctgttcacgttaaagtattgaggcagtagtttgaaacaaaaatataaagtaaaacctagatattggtgatactgtatcacgttgtttgcaaatcactttcatgacaatacatctatttcaggtgtatcacacctgaaaaaaacatgagtgctgtgaatttgtggattttcaggctcaatgcagaaaaacaccccccaaaacaaaaaatcacaacaatgaaaacaccatttccagagctgttgctgttattcgtgtgacgaatagtgaatgtatgatcataaaatagaataagctgtctttagatgaagtttgggcacagtttatggagtaggtaacagttaatcattgtttattaggtacataatccttaattgaaaacataaccatatagcagcagctttcatcttgtgtcacaaaaataactggtgtatcctctaaatttgatttgtctaataccttaaaggaaggcagaatagcatggacaagaacttgagttcttgagccagactcgatctgctccttgctaggtgattaaccttagattggtttcttggccatttgctggcccagagatttttgaaaaagttaccaactgctcagcttcatcatttgtaaaatgaggttaaaaaaaattctgcggcctggcgcggtgcctcacgcctgtaatcccagcactttgggaggccgaagtgggtggatcatgaggtcaagagatcgagaccatcctggccaaccaacatggtgaaaccctgtctctactaaaaatacaaaaattagctgggcgtcgtagcgtgcgcctgtagtcccagctactctggaggctgaggcaggagaatcgcttgaacccgggaggtggaggttgtagtgagccaagatggcgccactgcacttcagcatggcaacagagtgagactccatctcaaaaacaaaacaaaacaaaacaaaaaacagaaactaaacctcactgaatttctgttaaccagagggtacaagtgtttacaa

SEQ ID NO: 1882436 - DNA, 4001 bp, Homo sapiens; identical to SEQ ID NO: 585429

SEQ ID NO: 1882437 - DNA, 4001 bp, Homo sapiens; identical to SEQ ID NO: 585437

SEQ ID NO: 1882438 - DNA, 4001 bp, Homo sapiens; identical to SEQ ID NO: 585443

SEQ ID NO: 1882439 - DNA, 4001 bp, Homo sapiens
gggattctatttctggttcagcctctgtttcactgtctatggtttactttaacttttaacctcagtttctttattagtaaaatgggataacacccatcttgtgtaccttccaattattataaaaataatgtaatgataccttttaaagtatgcataaaaagtggcaccaaaatgtaaggtaaggccacatatcctccattgacaccaatagaaattgtcaaacttaagcaaggatgcaattaagcctcatatgctaatatttccctaaatagtgacgtctagcacaggctttttagccaccaatgctccataaaacacaatacaatatattgggctagaaaaaaaaagtattcttcacttttcaatttagcaacaacaacaaaatgagatttattcatccttcatttagagtacacaactagatagaattcgtcaacatcatcatcctcatcattatcaatcactggaacaaagaattgaagtagcaaaaattggcattgccaatattcctgtcttttttaaaatggattgcctacaaatgagaaattcaagacaagccactctgagttttctttgaaacgacttaacatttggtcagggataggaaagttgaacaggaaaatgtacatcaaaattttaacttggaaaaaaacataaggtgtataaacttatagtggactgaatttttatattattagagaactagaaaaggcttttccacaagggtattgtagagggcgtttagataatcagcctaataaatgggtcaagtgtttcttcttgtttttctttcctaagagatgctttgaaatctcccactttgaaatccaaattctctttaaatttaatctcccatcctcatatctccttgatttttctgagagattttagagatgatgtctttttgcacaaacactaactctaaggcgacttccagttctgaaatgtataatcattgactctacacttgcttttaaaaattctgatctgttgaattttgaaattttaaccaatttcactaacctttcaagtttttctcattttcctaacttaatgtgaaatacaggacattttgccatgccactctgactactcatcttatagatgaaggaaggattctgaaaggtgctctaatgactataattatcatagggaccacatattgagcactaactacatggcaggcctgatttgagggcttttgcatatgtcaagccagtgaagcctcttagcatccctgggagggcagttttacaattctggtagtaccaaatgagcaactgaggatgagaaacattaaagaacctgcccgaggtcatatgcctaacagtaaatgataaagctgaggtggaatgcggggcgggctgcctgtctccaaaatcgtatgaggctcccttgggtggaaagtgatccaactccagcttcgtccttgtcaccttatttgctaagtagctactaaggccagcagatttgatcagggtgcaagcatgaagctaaagatcattataaagcagttgtactgggtggattaaaagttcgtgaaaacaaaacaagttccttggtggtattatgggtttcttctttcctctctcctttcccctttcccttcctttaaacctttggtacatcaataaacacttgttcatataaaatggaggtcgagtttctattactgcttagctgaaaacacctacaaatgttcacaggaactttagtgactaccagtctagataagcacttgaaaataagaaagaacaagctccgcgagagcagagatgccttcagattttattcgcgaaggcaccccacgctcctagaaaagagcacgacgcacccgatgctcggattggatgaagtggcaaaggtaaccccgctggttcgggcgtttggctgttcctgtgcctggacccccgctttggaaatggaggtggggctggctcccaacctgtctcagagaccctcgcactcctcccccaccttccgtcagctgggacccgctgagagccgtttttggtcacgcgcgcttagcggatagacctgcagtcccgcagagaggaagggcgcccgggctgtccgccgcgcggggaggacgcgagcacccaggtgacgtcccgcgggctgccgcgcgagggccgggctctggcgtgggcgcgccccagggcccgtgggctgcgcgcccgggaaggtctggcgcctggtccaccagtcgcccctccccggggctggctcgccggtagtgtctgattgctgggggatccccctccatccccagaaggtacaaagtttggctctgtggaggcacctacgagacggagcggggcgggtgggtggccggctggtttcacactcggcaaagaaaatggaaacacaggtgggaaaagaaaaagggagtggctttccgggaagcagcggccccgaccgagaccgctggagcgcgccgggctagttcatcccggctctccatggggactaaagaggctgaactgaagtggcgaaggcgaggaggcgatcactggcttgtttgctaagagttcgggaaggcttttttgaactagaaaagacaaattcagttcttcctccaggtagatccccgtgtcccctgtacgcgcctccggacggccttctgtgaagcccccattcccacttagttaacttagttaatattattcctctgtcacaggactcctgcacggtcaggtcatctgaactcctcagtggccctagggaagttagttagcggctgtcagagaactggggaaagtaggcaggtggtagcctaggccctttgcaactcagctggggcttctgacagcctttgaaaaattctttctaaaaatgtgcttcttgtattttttaatgaggctttgccccaaagcctaatatctttgtttgaggtggaatcttcttattaaaatggccctgaagctaccactaaagaatcaggcatgaacacaaaatcttctggatttgaggaatgcgcagttctaatttcatagaacttagctcagcgcaaatggggaggcaatctgttttcaatgaatgttttctgacttcttaataatgcatttttctacttaaataataacctgtttgttagtataacttagtgggtagagatgggggggtggggatgctgactggctggaaatgactggattgggttggtaacccattatttgtgtttcatttggatcaggcatatgtttaatgtcacaattgaattggccttttgcagagcagacatgccctcacttactgtcttatggctatgacaagataattacaagggcaatgttattcgactcttagcctaacacagactattagactgcacaaagcattccaattacaagaaaaaagtttttcaagcctggggaataaagtaccaccaatgtacaggccacagaatgtttctgaaatattaatgtagttagttaaacggagattgaatagggaaggaaaagccaccaggcactgtaaagaggagccaggaacaatcctacgggtccaagatgctgtgagagaaccaatttcatttttagtgtcagcctggctctcctcaaaaactagaaatagattttgaggggaggtctgttgtgtatactgctaagtccagtgtctattttgagaggcaagcctgtagatttaacccaagttgtgggctaaatgcataagaggcagcaattatcctaccagaccccaaattccccagcctagcactttagtcctagagtcaggtgtgcgggagggagcctcccccttcacaggacctttggatgcccattagaactatggctcaggacactgtctagtcagaggtcctaaatccctgcaagggacagtcacagctcccactccacaagggatggaaaatgtccctgtgccctgaagatgccgggatgcctctgccttccgcagtgacaccccctcacccaacatgactcctcttccttcaacccagctggaagaaacccaagctatcacttattcagcctccaatt

SEQ ID NO: 1882440 - DNA, 4001 bp, Homo sapiens
cagaaggtgctctggtcatggcattcgccatacaagctgcagtaacaaattctgctgaccagggcacatagctatgtctgggggaaaaaataagattgagtccacagtaaacttcttttaacattttcagaaaactgagatgaatgtttaagtaaggctttctcatgagccaagctcatctgatcccatgcccttccactctcttgttacttcctccacgccagccacactcacctgtcagggctcctcaaacacatgaggtgcttccatctcacttggtctttctgctgctaagtgattttcccccagagagtcatggggctcactgcttcattgcattctagtctctgcccaaaagtcaccttctccaagagggctctctgactactgtgcctaaaatcacaccctccccatcactctattgtagtacttagctgctaataattatgttgggacaacagccttaaactgtctcaggcaaagggggcatatggccatactattcatagcacttactgtcacaggatccatagggtgtcacttttccagccagaaatctctgtggctggtggcgtctttgcctgagttttgcttgggcccacggggctcattctgcccactcagcctggcaggctgtgctgagctcatgctaccagcccagatcccacgcctaccaagggcaagccaggcatggagcagcaagagttgtgtgagcagacaagtgtggggtccagccacagtgcacagccaggcacatcggctattatggaggggtgggcagctccaggcatgtgcacaggtgccagctcagatgccagctctgtgcaaggctgcagctggatcagatgtaccataagtggcttctacctgcatctggatgaggggaacatagtggtgcctggaagcttagagatgtcaggaactccagagccacaaaaaggatgtcacagccctggcttggggagcccctaggtctgagatccttgaagggccacagctcttctctccttctcatcacccacaatgcagcaagcaagtggcttgtttcacccctgtttgtgttatagctctttcagtcctgccattcagtgggtcctgagttcttgtcttgcatccaggaagaatgaggtaggtggacaactggagggtgagcaaagtggagaggagcttcattgagtgacagaacagctctcaggagacccaaagtgggtagttccttgctgcaggcaggtcatcctgacgagtgtgtgagtctggctgagtctggggtttttatgtgctcagaatggaggaagtgtgtgctgactggcccacaggcagccacagtgggcctggaaaatgcaccatctgattggctgaacagtcatcaatgaagttctcactctgggctgtagcctttgcccagaactggcagcctggcccccaggcttcacgctgttcctgacctgaaagtggggtttcaccagagacccaccccttcccgcctaggaatctgtctgcctttaacatgccattcacagcacccaggctgtccataaggagaggcaccggcaggcatgcactgagctgctctcagcctccttgccccccacccatgctcagtgatgcccaaagcctagagggggccaaggtggcagggtgttggtgtcagtgccatgctgaggacacgcacacctggccaggttgcgacagccgccaggctcagccacaactttgctctgccccaagcagggactgggaacagggagaggacagggagctggagcaggcatgttcaagcctgcaggggcaggggggttcctgggcccctgagagtgcaggaatgtccaggtccagaaccctggctgggcagctgtagctgtgtgccagggagcaaggggctcccatcctgccaactcagtagggggtggggctcccacctgttcttggcacctgctggctaagcagagtgggcagccctggcagtgcctcccccactgcagctggcacctctgcagcaggtgctccagatgggctgctgctgccatcactaccaccagctgactttgttttccatagaagttccttgaagacatgaactttattttgttcacttagagcagtgcctggcacatggagggcccttaataaatatttattgaataatactaaaattagcattatatgccaacaattgttccatgtcttgtaatattctttaacaatatacattttaaaggttgttaacacatgttgacgaattgctttccaaaaagtttttctagtcattcagcaacattctctggtcactcttagaacatcgttcaaatattagaatatattagtatcactactaattttatagacagttccaatgtgcatttctatgatgactcaaaagaataaataggttctttacatttattggctatttgtatttttcctgtgattgttattatgtgctttgtaaaatagggggtaaggattataattacacgatatggtctccacactcaagactttaatttagccagtgaaagagtaaattttatagggaataataattatgaaaaagtttaggaattgattttgttgggaaatagttaagaaaaaatattcaaaagtttaaaaagaacagaactggaaagctgcataaagtcctaaagcagcaacatttagttactaaaacacatggctttaaaaatataaccattgtttcctaattgactctgctatatctgcatagtgaatgggaaaggagcagagattttgaaagtgaagcccttccactcccactcttcatcaaaagggaatagtacagaaaggaagcagccatcacctactagctgctattgaaaataatagaatcagttaaaattataccaaattgtagctatgttaattgaattgcaattaaagtgattattgtgtggtgttatttggcaaaggaactcagaaataactgtgtcctgccttgctatagatacctcttggggtgagcttccaagggcaaaagagttgcaagagaaagtctgaccaagccggtcattgtctcacatctttattgcttgggcgctagcctccctctccaacataggtcttcaggaagtcagctgttcttggagcattgttcctctctgagccaagtggctctttcctaaccccaaacctgggtctctaatgtcaacactcaggtcggtggaaaggttgaattaaagtggacttcccaagatgagaagaaatagaacatgaagaaacgcaagagggaggggatggcaggaggaaggtgcctgccccagtgctgtgtctcctactccagactttatcaaacctgatctagggctgcccttgaggcaggagagagtacagagtggaagaaagagagagctaaagataaagagagatgtttgggatttttccaaggggaaatggctcaggccctcattaccattctgtactctgtggaagcaacagagaccagaaaggaaaaatccacactccagtgctgccaccttcatctgtttgaaaattatatcaatacacagtgctaaggtttgaataattcagatcataactctttcccattgcgggtagggtgtcttgctcttgttttctcctttggaaggagtgatgaggggtgtggagaaaggagcagaaatactcagtgagcttctcttgcaggtcaacgctcgccattctgatcagagataggatggcacaggagggacagggcaatccatgggaagttttgctcctgccttaaacgaggtgagaatactcacagcaaaattaggtctaaagctcagagagatgctctttgctgcaaagggtaacacttgaaatagagccacctggggatttattagcctgaaaatttcaggaacttcaaaggaaacaatattaaatgggaaagcatcaattctcatcagaattcagaaatttagggaaataagaactatatatcagaatggagagatattttacatacagttttttgttcatttgtttcccttggtctaaaa

SEQ ID NO: 1882441 - DNA, 4001 bp, Homo sapiens
tcagaccctgtggagactcaatattccctctatagcccagctcctacagcccaaacctcccaaggactcaggcaatcaactccaccaaatgggcccagccttatctctactctctaacctctcatacagagatttcctctggggacgtctggatgactgtaaaagagaccaagaacagttaagatgatttccagttgctgacatgtggtccaaaatatatttgtctctcatattcctccatccccaacccctcagggacagaaattaggagcctttacctcttgcaggtcatcatcagcagatatgctcctctggaacggctggaaagtggggactggtcccttctcggggtcctggagtggtgagagacctacctcagtgtggagcaggaggttgcccaaccatggaccagaggtgttcctcttccctcaccctcttctaggtttcctctgatcttttcttcccttttaattctacatacatttcttatttgacgtggttttacttattttttttttttttttttgagacacggtcctgctctgttgtccaggctggagtgcaatagagcaatcgtagcttgctgcagccttgacctcccatgctcaagcaatcctcctacctcagcctccctagtagctgggactagagatgtgctctaccatgcttggctaatttctgtatttttttttttttttgtagagatagggtttcactatgttgccagggctggtctcaaactcctgggctcaagcaatcctcctacctcggcctcctaaagtgctgaaattaaccaggaatgagccattgccgcacctgccattgtggcttgttttgttttgtttttgagacagaatcttgctctgtcgtccaggctggagtgcagtggtgtgatctccactcactgcaacctctgcctcctgggttcaagtgattctctggcctcagcctcctcagtaactgggactataagtgtgcaccaccacattctgctaattttttttttttttgagacggagtctcgctgtcacccaggctggagtgcagtggcacaatctcgactcactgcaagctccgcctcctgggttcaagcaattctcctgcctcagcctcccaagtagctgggactacaggcgcccgccaccacgcccggctaatttttgtatttttagtagagatggggtttcaccttgttagccaggatggtctcgatctcctgacctcgtgatccgcctgcctcggcctcccaaagtgctgggattacaggtgtgagccaccgcgcccggcctcacaccctgctgatttttgtatttttagtagagacggggttttaccatgttggccaggttggtcttaaactcctaatctcaagtgatctgcccacctcagcctcccaaagtgctgggattacaggcatgagccaccacgcccagctggtattttttataagtgactcgatatattatgtattcagtttatttgaacctctcttgaacctgataacattttcagccctttccatcccttagggcaacatattccaagagctccaatccaaggtggattagaaccacagaatttgtaaaatggagaattcaggagtcgtctagttttttcattttatacatgagaggtgaaactcagaatggtacagcaatttgccagtgcttgagtatgcatatttttccccaaacccatctacattccaacttggagggatgccctttaaacaatctttctgcttgtgctcacctttaacttcccctcaagggttcgagaacgcttgaagcctgagttcttggtctcagccttgatggcactgatggctcctgacttcaccagctgctttgcctgctctgttgctgtggctgtgtccatgacaggctgctctgatagtgctggagagacaaggggaagaggcattatgttggccaagccatgatgaaggtcagctccatgctgcccacttccagtccatccccatttcccctgtcactcacagcgtttgacaccaccttggctggttgtgctgctgctactttgcttcttcagagccagcaatgcctttttctgggaacaagggtgagaagagagaggtaagtgagggccagcccctagccggttcctctcctaaggcccctgggcacatcactccagggaccgtctttcttgatgccctcagagtggtacactgatgtgctctgcctcttgcctctggtcccctagatcatgtatgatgctggaaattcctaatctaaccaaaccacggaacccagaggttttccagagtgttacatttttgaagttgaagacaaataactcaatcatggactagaatcctaggatataagctgcaagtaagtataagtttatgtgcctttcctggaagcttcatccatctatttcctgcatattgaatgaggcccagccatgacttcgtaacagggatatccaggaggctaatgcattgttcctaccctcaagaagcttacagtctgagaaataaaatacattgagttagcaatacaattataagaggtgcagattattcatagctgaaagctagtaagattttctgatgtttaatggctattaaactaggccctctcccgtatctctgcacaacacagagaggagaagggtattttagaaaaagaaaacagggtggcaaagatgcagagataagaaggctttgggaatgcatcttttggaagtagtgaatagttctactttactagacaaggctgccaaactaaggttttgaggcttttttatagacaatgtgaagccatttatggtttttgagaaacagagggagcagaattttgtgttttcaatggatcatttgaacaggagtgaagaagtctgttcaaaaaaaaagactgagaaatttgttgagagaccattacaatggcccacatgaatgtcaataaagccctgctcgggggaatgcacagtgaagaataaacaggaaaaattacttcaaaagaagaaacaataagacttggcaaaggtttgactatgcaaatagtggggaagtcagagttttgagtccaaacatgtggcagaattggtgtagtcaatcttatttggaagatcaagaatagaaagatgatagcttcaacactgagtatctgaagtttttcagtataacactggatagaactggaaaaaacaaacttggggatcatcagctcttaagcggtactaaaagccatgggaaaggaagacaatccatggcaaattgcatagaaaagacagaaggtccacaccaaggcttgggaaagcccacctctcgaagctacactgtgaggtgatatgtctctaggtatgggccagaaaaacttccccattcgctcacactcaccccatatcttctcagagtgcagagtctgtgaaaggttaggccatgtccacacacagtccctcacctttttcttgagcttgttgaatttcttctgcagagcctcctcttcctcgctcagtccggggggtatcaccaacatggtggctcctagttcaggggcagggcccaagacatctttctccactgttaccacccggggttcacacgccgtccacactgtacccaaccccaccccttcaggtctgcctactcttgtctttggctttccctaccccttgcttaaaccaggctgctgtccaagctcccgctggtcgggatcatccagcattccctcctgtctccagggatcacagacaccagcacctttaggtaccatgtggttcaaggagggacaaatatccactccgtcggaaagacgatggcacccgacccccctaccctcgctagggtaaggacaaccgcggggtttgaacggcagagaaggcggtggagccagcgtagcgcccgcagagcaacgcaaagaggaagaacagagaaacggctatgagaaaaagggccgaagagtgagaagcagagggccttacccgagggggcggcaaccgggggccccacggtctccggccgcgcccgcgct

SEQ ID NO: 1882442 - DNA, 4001 bp, Homo sapiens
aataaaataaataaataaagaagaaagggaagcagaaatcacaaagacagaaggaaagatttcctaagtaatggccactaagtattagcagcagtcaacatttattatgcagtctgttttatgtattgtactaagcactgcacatgtattttcatttgaccctcaaaatgagtcttccaggtactttttatttctagttttatagatgaggatattgagacttaggaagttaatttgctgaaacaaaaatgcatcttctaatgaaaatctagcaactagcatcctttctctatgttctagctgtatcttacgtacccaatctgttacagcaattcatacattatattgaaatagaatttactggttgtttctcactaaaaggtaaactccttgaaggcaggaactgtgttctgtcaataacgtaatatctttctcaattacctactgtcaccaatttttatcaaggcatctgaaatatatatattattcaataagtatttgctgaattgagtatgaatttgtttctacattccaatgataaacatgtggtaacacactctctttctctcaaccctcaggcatctatatttgagttttgaaacaggttgaaagtctgtttaaaatagcattttgtaaactatttcaaataatctagaaagaaacttggaactcttataatccgataaaaacatttaactttaagctatttttttcaggcccattaatttaaaatgtcacatttcccatatttttagaaatattttaatagaaactttaatactgtgactgaaacatttcctacacaaaagttgtgccatataacaacattaacctctgtatgttgatgtgtaagcacgaagacatacctcttaaggtacttgagctgaacatagtgcctacgttaacttttaagtaataaagctttgatggtttccaatcttttcatcttatttatcaatgacactttttaaaaacctttcacattttactgaattctattctctcctaatgggcacattgccagtatctactaaggtagagtgaggcctaggacaaacttagggaagcctgtcaaaaaatcagaaagaaccaaagaaggtattccctcagtcctaatccacagacttccacctcaacatttcatgaaattcaatctataggcaaaataaaaatattcatatgagacatgctctcaaggctctaatattaccagagatggtatcaaataaaactcttaaatacaccatggagcagctctagttaaaaaatgatctcaccttcagaaacaactgtacatatgacttctgctaactgttgtcttaggaggaaacaaaatcattattcagtttaactgctatttttaaatttgtttcacttttcttgtcactaagcttatttacaaaattcttttaatctatagtaacatcaaaaataagacttcgaatatatgaaaacttgtgtttgttggggaaaagataaatgaactacaactaaattttatcacacctatgaatcacttgaggatcttttaaaaacgcagatcctgattcggtgactctgggatggagcctaagattctgagcatcataagcttccaagtgatgctgaagttgctggtgcaaggctttgtgtagcaagtaactaatttttccagatttcagtggtttgattcttctaggttttgttttgaagacagggtcttgggctgggtgcagtggctcacgcctgtaatcccagcacttcgggaggccaaggcaggtggataacctgaggtcaggagttcaagaccagtctggccaacatggtgaaaccccgtcttcagagaaaaaaagaaaaaaaaaattagccaggcatggtggcaagcacctgtggtcccagctacttggtactgaggcggaggttgcagagaggtgagatcatgcactccagcttgggcaacagaacgagactctgtctcagaaaaaaaaaaagacagggtctcgttttgtcgcccaggctgcagtgcagaggcgtgaacatagctcactgaagccttgacctcctgggctcaactgatcttcaagtgatctgcctacctcagcttcccaagtagctggaaccaccagggcacaccaccatacctggctaatatttttaggttttttgtagagatggagtcttacgttgttgctcaggctggtctcgatctcctgggcttaagcaatcttcctacctcagcctcccaaagtgctgggagtgtactgtgcccagtctcttctcgttttttaaatgttcatttatgctttcaacaaatttttactaaatgtgtactatgagtcagacataagcattaataagatctctgtcctcaaagagctcatttgcttaaaatcaaaaaagcaaacaggtcaacaagtaggagtctatacggtatagatggggacagcatttcagggagaagaaacagtcaagcagtaaaagcactctggaggaactgctaagggtatcaaattgctgaaacacatcgtatttacagcagagatcagataagaaactggaaaagtaaacagagttaggtcatgatgagtccagcaagtcagaataagcagtttaaattttatttggtaggttaccacagaaatgaagaacttttggtaggtgtgttcagatgtgtattacaacattaatgatcgtataaactaatagcagctaacattatttacccagaaactgtttcaagagctttacatgtactcagtcacttaactctacatcaaccttataaaattggtactaacatgttcattcccactgagaattctgaagcaccaaaaagaaaaatgatttgccctcaattcaaactctggcaacgtaagctccagatgctacgctctctcttcacctaggaaaattctggaaaaattactctggtaagcattgcagaagttgtgtttgtcagtgttgagcctggaagatagttttgaagccactggaactgtcaacgaaggactgaatcaaggccgggcgtagtggctcacgcctgtaatccaacactttgggaggccaaggtgggcagatcacgaggtcaggagttcgagaccagcctggccaacatggtgaaaccctatctctactaaaaatacaaaaattagctgggcatggtggcatgcgcctgtaatcccagctacttgggaggctgaggcaggagaatcgtttgaaactggaaggcaaaggttgcagtgagccaagatcatgccactgcactctagcctgggcaacaagagcgaaattccgtcccccgcaaaaaacaggactgaaccaaggcaaaggcaatggaaatgcaaatttcagttatgtttagtgagtaaaaatcctaaccactttgttactaagggatgagagcaaaagagaatagtttcctagtctctaacttgggagatggaaagaatgggaatgtcaaccactgggaaaagagaaaacatttttggcgggaattaggaagagaaaatatagagattaagcctgagatacttataagctatctaggtagaaagtcaggcagacctgagtatcaatggtgtactcactggtatgttggtcctaagtgagctcatgtgggcatgaacatgtgtgaacagatggaaccacatgggaagttgtagaattcaaaaaagaaacactgacgatgggcacaggagagtggtctgcaaagtcaagggagtagtttcaagaaagtagtcactaacattaaatctgtggtgctatcaagtaagataagcaatgaaaatggctgctagatttggtcaatagatcactagtgactttggaaagaaatttcaatggattggtggggtcaaaagtcaacgacagtgcactaaggaataaaagatgaagagactgggataaatgaaaacactcttcccaaagatcattctacaaaagaataaacagaccagtaactagaaaagagagaggttttattcttttttataagtgagagatttgagcacattaatagcaac

SEQ ID NO: 1882443 - DNA, 4001 bp, Homo sapiens
caagggaccctcctgcctcagcctcccgaatagctgtgactacaggtgtgttacatccaggttcttggcattttgaacaaataattggacaacatgcacaaacaaagcaaggaaagaatgaagcaaggaaagcagagatttactaaaacaaaagtacactccacagtgtactcgagtgggactgggctcgagcaggcagctcaagagtgctgattacagaattatctggggtttaaataccctctagaggtttcccattggttacttggtgtacaccctatgtaaataaagtagtggcccacaaccagtctgattaaagtaaagttacaaagttatactcctatgcatatgaagactaggcccacgaccactctgactgggtgtgggaggggaccaatcagaggtactttccatttttcatctgccatgcagaaaaggatgggcggttgcaaagggaagtagcctctggtccttttgttacttgggtgtggaaagttggagttttccttatgatttagttctaggatatcagcatgaattggccttaggtttcctgcctccagaccctactctcctgcctcaggtgcatgccatgattccccactaatgttttaatttttttgtagagacaaggtctcactatgttgcccaggctagttttgaactcctgggctcaaacaatcctcctaactcagcctcccaacatgctaggtttacagatgtgagccaccgcacccaaccagggagattaattattgactaggcgggggcatgaggaaactttctgaaattctggaaatgttctatactgtgatttgaataatggttacatgggtgtatacatgtgtaaaaattcatgaggcggtagactttatatttgtgcactttactgtaattcatgaggcggtagactttatatttgtgcactttactgtaaaatgtgtataactttttttttttttttgaaacagtgtcttgctctggagtgcagcggtgtgatcatggctcagtgcagcgttgacttcctgacttcagcctcccaagtagctgggactgcaggcgtgcaccatcatgacactaatttttgtatttttggtagagatggggttttgccatgttgctcaggctggtttcaaactcctgagctcaatcgatttgcctggcttggcctcccacagtggtgggattacaggtgtgagccactgtgcctggtcgatacgttacaatttgattttttaaaataataattaaaaagaaaggagagaagctatagatgctaaggcaaccggggctcaggttctcttcttcaaagctcagggaagcccaggcaaacctgagagcagatgagggtatatgcctttcatgagtccttagcctgtcccccactcatcctccattcacaagaaatggtgaacggctctgaaatcggagaaagtctaccaagtgttccatctggtgcacagctctgggctatctgattctgaggggcttctgcctttcattgcctctgagctcttttataacttggtaagttgcacaaaactgagggtaaagtaaatagttcttgtccatagaaatgtccctgaagtttgtctgatagaagtgccgttgactattggcttgtagatatggcctgtttttcatctatttgcaacttcatttcctggtggcctataatggatctactcttcggactctcctttgaactggttgtaacatcttactggttccctcattacctagtaagctaaagtctttgacatgtattagttttctacttacatgaaagtcatgatctctttaacattctcttaccccaattccctttctaccaccttctctagatgtctcaatgtccatttcacaccagggtcagcaactccgcagccaccgcatgggggctactcacagaagctgagttccctctgccttggggaaaataagtttggcatacttacagacacaagacagcctctcccccacaccctttctcacagaggagtccttagatggtgatcttggtgaagaccaaagacttgtgggtcctgggtaaaaacttggtgaggtatttctgcccatcccaacatctttgtcccgccaagctggaggtcccatggtgagccccagagggaaggaaggggagggggctgcgagaggaggcgaagagggaaggcgactcaccctgttcttggttcaaagagctgggtgtgtggagacagaagaagtggaactgaccctcctgttgaggcagagcctggggagccctgctgggcttggggaggccctgaggcccaagcactttcctgaaccttcaaaggcagctttttttcaaggagggacactgggcaattgctgtgccaggctgagcacacaaaatcaatggtgcctgctaatgaaggggccgccgccaccaggggtgctggcctggggtgctggactgccaccagggtcctgccctgggcactccatgtctctccagctcccgaaactgcctcttccaaaacccaggcgaagtccatcatccctccttccatccccacttctcccagacctacgtgcccactgaggggctctctggagaccagagcaatacccagagacttcagaggcagtgagagggcttgagggcagaactgagggagcacagggggctgagggtgtgacagtcaggaggcagagagtcggaggcagagagtagctgtggacaggaacaggaggtcacagccctgcccccacacatgtcctgctccccaaagactagaacacagaaggaaggccctagagaaacacagaaggaaacccctagagacttttgcctgccttgtccttttggccaaagagtaattggaaggagaagctgcaagaggccaggacctcctgggctgaggctgctctcagaggatagaggaaaaaggagagacgaaggctggggatagggccttcctcctcccctaaaactaccacataaggatcatttggctgggcacagtagctcagacctgtaatcccagcactttgggaggccaaggcaggaggatcacttgagcccaagagttcaagaccagcctggacaacatggtaaatcccatctctacagaaaatatacacaaaaattagccgggcatggtggcacacacctgtagtcccagctactagggaggctgaggtgggaggatcgcttgagcccacgaggtcaagactgcagtgagctgtgatcccaccactgctgcactccagcctgagcaacagaggctctgtcaaaaaaaaaaaaaaaaaaaaagccgacatgcatgaagacacagctagtaagtgatggagacaggattcagactcaagtagccagcttggcctactttctgatttctgtcatttgagaatgtggggaacctctatcatcactgaatgttccacaagtatttacgtaggatctttggccttcaccaagatcacaatctaggggctcctctgttaggaaggatgtaggggagaggctgcctcaagtcgtgcttgtctcacattgtgtctataaacatgcaaaacttgtttcccccaagcaacagagggagagttgagaatctttctatgctgtctcaagcatggctctcccctcagcctcaccctaatcctgcagggaggtattggtattgcttttagagaggacaaaatgaggaccgagagcagaagtgacttgctcaaggtctcatggcaaggagaggggcagacccgggatttgaacccggggcacgatggggacctttcaaaccccagggccacgcaatgaccacatctggccgggcaggaaggaggtggtttgaaatcaaaggtggggggcagttcaatcgataaatcaagccgcctccccctcgccctccaactggtttgcacacttgtccagggagggttcaagaagagtttacaagctgcgtgatgggaagaggctgcgtgatgggaagaggcaagctaactaaccctcgcgggtgtggacgagggccacgaccacg

SEQ ID NO: 1882444 - DNA, 4001 bp, Homo sapiens
gcactcacaaatgaaggctttccagacaggatattgaagatggtaagatcagtctcatgtataaagcattttttaaaagtaaagcatattatatgctagtcatatgtactagggtgaatgcatgtatgctacatgctagtagaattaatagttggaatataaaaataccctataggctgggcacggtggctcacatttgtaatcccagcactttgggaggccaaggcgggcggatcacttgaggtcaggagttcaagaccagcctggccaacatggtgaaaccctgtctctactaaaaatataaaacttagtcgggtggtagtggtgcgtgcctgtaatctcagctgcttgggaggctgaggcaggagaatcgcttgagcctgggaggcggaggttgcagtgagctgaaatcgtgccactgcactcctatctgggcaacagagtgagaccctgtctcaaaaaataaacaaaaacaaaaacaaaacaacaacaacaaaaaacaaaaccctacagtgagcaatgagcctttatgtattttttgagttcttctcctattttttttttaatttggctctttccttctacatacaagtgcctgtggacacagcattgtccttgtgctgttgccatttacagcagtaaaacaacagctactatttcttaagggcttatatttggctctttattaacactgtctgttttaagccttacggtaactgaggttggtatcattgtccccattttacagatgagtaaactaaggcttgtgcaatgttaattgagctgcggagaggatatatcacagctaataaattagaggggcagcattcaaccccaggtcttcctgaatgcaaagatttgtgctagtaagctctgtgttctcctctgaggtcactgtggtgggctctaggcacttatgctaccccatttgtgtcagaatacagcatgtgaacacacatgtctatagaattttaaacccaaatatttacttattactgtctaagttccagacacacaccataaaagatacaaatcttaaaagataaactggaaggacaggtcagaattctcccttagtaaaaggtagcgattatgagaacttagctcattacagcctccatctcctggacttaagtgatcttcctgcctcagcctcccaagtagctaggactataggtgtgcactaccgcattcagctaattaaaacaaaaaaaatttttttttggtagaaacagcatcttgctatgttgaccaggctgatctggaactcctggcctcaagcaatcccctgtcttagccaccccaaatgctgagattttaggcataagccactgtgcctggtgtgacaggtactattatccctattctacagatcagggaactgagaaatgattgcttagtgaatagatatcttgggctgaatagatcaatagagacttgatgatacataatgtgctaggcatatttggtgggataggtaagaattatgccttggaactagccatgctataacttgcaattcaattggatcacaccatatatacatgtctaatttctttccttagactgttagcccctagtgagcaggagccctgtcttctatgtctcatgctcttcccctggctggcttagggttggcacaaactccatcctcaaactctttcttgactgtgtgtctgtcaaaagcatgtaagtggctgcagctgtgagtgcaaaggcacagaacagtgtgtgttgagcattaaaatcttgctcacttttgactccaggactcctcttctcttccttcctgggagcataagaatatggtgaaaaaaccagaattgttttctcaaggaaagttttagtaggtaatttcagttgcagttgaatctcttctgtttctccaaggactgggcattgccagccctgctgtagctggttgaaggggaccaaacctctcaggaagacggacttggttccgtttgaccagccagagcagggggcatctttcttctgaggtgactgcagcctctagtgtgcaggtatcttggtgtgtctcaagcatcatttgtctaagcctgtaatgcaaaaagaagcagcattagcatctgtcaaatgccaggagcttgccttgtccagaatgtcctcttacatgatttgtacatacatctcatacaatttgtacatacaaatcatacataatttgtatttcatgttgcatgacttcaatttattttttctttaatctttaatcttttttcaaatagaaacatcatgaagatcaaatatgctatagaattatagaatatgaaaaatgacagtatgccataatgcttcctcttcccattttccgaaagaaatgtaacattttggcatatattctttgaatgcttaacattttaatttctttaaattatgtttttaattcaagtatgatatatttataaaagaatatttataatatataagtgatggtacataatggtaaaaccaatacccatgaacaacgatctacttttttttgttgttacttttttgagatggagtctcactctgtcacccaggctggagtgcagtggcgctatctcagctcactgcaacctctgcctcctgtttcaagtgattctcctgcctcaaactcctgagtagctggaattacagacacctgccaccatgtcccgctatttttgtattttgagtagaaatggggttttgccatgttggccaggctggtctcaaacccctgacctcaggtgatccacccatctcagcctctcaaagtgctgggattttagccgtgagccatcacgcctggcccaacgatctaccttttaaaaagaactattttttactgttttatactattgctttctttgtactgaatgctttttccaatttatttctttatgtttccccccggaggtaacaatcacactgaatttattttttcttatgattttgatatttttctttatagtttttaccatttatgcatatatttctaaacaatatatatgcatattttagtatataatggcatcatatcataggtattgttttgtgacttgatatttcatttaaaatgatatttgcaagattcatccatattgatgtggtagcagcagtttattaattttcattgctttatggttttctactgtgtgaatatactataatttatttattctcccagccatagacattgaggttgtttggtttaacaaggggatagcattgactaaactgtttctcaaaggaggtggaaaaatctttgattcttgcagattttaaaggagaactctggatttgtatgttggccttgtaaaagaatggcaacacttaccagcccgaaacatctggaagtaggacccagaaattagtgctataacctgccctttgggtgattccgatgcagctcaagtttgagaaccactgaactaataggagtacccactggtttctctctgtttctagggaggtgtgagctgtgggagagagctgactaagaagaagaaactccccagaaaggtggcctgccagtcttcacgatgtatgggagcaggtgggaaaagaggtaggcagaaaggatagtttgaatgatgctagaaaattgtccttctccctgggggctaggcattgcagcccttttattttctcttcctgatgaagacaagtaaaactaagtggaatgcatgtggccttggagtcacacttatctgggttcaaatcctaccaatgctttcctggctcttttgcttctaggaagttacataacatcttttaacctgagtttctacatctgcacagcaggagaaggttgtatctactctgcctgcttgttgcgaggcttaatgacaaggaaggaaaggtgcactgtgtccctagtgggcaccatggacagtgtcaggggtgtgggaaagtcctagagacaatcctgactgctttggaggccaagaagttcactctcaactccagcctgtcctttacatgtttcccttcctcagctgcaagtgtttgca

SEQ ID NO: 1882445 - DNA, 4001 bp, Homo sapiens
gcacacacacacaactcatacatacacacaccctacataggcacacaggatgtcaaacacacagacaccccacaccacacaaagcacataccacacataccacatatagcacacacacacccacacacaaacacaccccacacatacacacaccctgcatatgcacacatgcacaaagcacaccacacaccccacacatagcacacaccacgcacaccaaccccacacatgcacacagcatgccaaacacacccccacatatacacatagcacacacaccatcacacacagcacacatcacatacaccacaaatcacacgcctgacatatacacacagcacacatcacacacataccacacacttatcacatgacacatgcacaccccacatgcacacacactcacattcccacacaccatgcacacacaaccccaaacaccacgcacacccccccacacacgcactcaaacacatacacaccccacacatcacgcacatgcactcacacagcccccatgcaaaccccacacatgcacatgcagtctcgcaaccccccaccacacatcatgcacacttgcacacactcacacatgtacacctctcccacacacgcactcttgcacacactcacacatgcacacacccccacacacacacacgcactctcgcacgtgctcacgtcctctcaatgctctccacccctcctcccctcgagtcccagacagaagctcctgcccgccctcctgtgtgatgtggcggctgctcacctctttggagagccgggtgaagaggtcccctccccgcaggaagtccaggatcaggtagagctttccttccgtctgaaaggctgtgggggacagagacccgcattttgacagcttgtcgaatgtcctgtggcaacatcgctctctggcttctccctgctcacggtgctgcttactccgggaggctgagtcacttgagaaacggcaggaccccggctggtgaccagctcagaggggcagcacccggcagagggggtctgacactgtgagcgctgcccctctctcactgtcgttagggggccttgagatttctttcatctttctttcctctcccctccctcccttttttaatcacaaaggaattgaaagatacacggggagaaagatgtgaatatttaagctggtatcgttgctggcttttgtcgtaatgcattagtgagcagcctgaagatggctctggtgggtttggaggacatgtcctttccgtcctatggaagtgccttcttcttacagaactccactctggtaccagggagccccccgcttgccttcctctcttgaggcagttctggtgataggtcagcccagttatttgaacatcaacaatggggctcacgtcctaggtctggtcactgtgagctataactgcagactttctgtttcaggccacaggcaggctacacagctcctgcccacactcagcaagggcctgcctctgttgagcgggcgcatgagcacgggagggtctagagaagcccgtcaccatcgctgctgtgacgatggttgctgcagtggcactggtgaggcaccgcgtggcatcttttttatctacaaaggaagtgtggctggaagggatcccaatatccctgcatactagaaaacgttttattttctaaaagtaaatgctagaagcatcataaatgtgggggttttagaaacatagcccccagctagaaagccctctgccaggactgtgtaaactgagtgtgcattaaatgctccatcctgggcttggcaggcaggtggaggtgctgggtcaccactgaggtgatgtggaggtctgtttaaagctctttgtaggacacccagttctcaatttcttcagaaaagcaccctagcaagtaatgtaaatgacacgtgggatgggacttgacaccagccacttggcagcagcggagggggcagagttttggaaagccagcctctgcagcctcctctgccgggaggtagaggtttgcaactgcgctgcccacggccgagaaggaacagcagggtgtgcccagcttctgcaggcctccttcatcctgtcctcagattcacgcaaatctcactaacacctccccgacacaccaccttgccctttgcaaccaagaacaaactattagttttgttgctgttcccttctgtactttgctcatctggattattaggtgggaaagtttaatgtaataagccatgaatctgcagccaccatctcatcacatcttttttaaatttgaagatttcacttactgcttctctgttgggataaaaaggcagacagcaaatgaagagaagttgtgtggcaaagcagctatgtggcctttggttaattatttgagcctcagaacatgaaaataataagctaccttgaatagaagttttgagggttcaacgaactactatctttaaacatgatattcatttgaaatgaggtgttaccatttctggtttaaagaaattattgggtcatagagtattttattctaaaacaacacaaaaataagtcatagattcaccccaatctaggttaagatcttctaaattatcaatggtatggtaataatttaataatggataccccatctaaaattagatctttgagatgaaaacagggcttcttgctctttcaaagaaaataaatacagaagagattaagtgatcaggatagaaggcaccttcctccccaggcagggcaggactctatggtataggaaagattttcttctttctgatctgttatttctttttcaattttctttgatctggagaaggttgccctgggtcctctttaaagtgtcattttgactctacttaccataatgaagcttcacaatgaaggggtgattcacttctgccaagatgtctctctccatcttcgatctcactcggtcccgaactgcaaagtaaaaagataaaggctttcatgaggcaggaaataagagttctgaggaacactgaacatgaaatactagatataattcccgccaacttttcattaaaaaatttcaaacatatacaaaacttgaaaaagttgtacaataatcctagatttaacaactgcttacgttttaatacatttgctttctctctctcatatatatatatatatatatatatatatatatatatatatatatatatatatatatgcatctctagctctccaaaaaattgtaggcagcacgacatgttactctgaggtgcatgtgcaggtgtctcctaagaataaagacagtctcttagcataactttaacacctactgtgccacataggaaagccaacaatcactccatgaaacatctaacatccaatctatattcagtcctcccctccacgtcgttttcccgacctaggatccagttcaattatattggttgttaaatgtctttgttttgctcctagaagacaatggtcccatacctatttccctcgccctgtattttttcgtggactttttgggaagtccaggtcagttttcgtctgtagaatgttccacattctgggttcgtctgatggttgctcatttgctttctaaaactcttgtatttcttgtaaactggaggcgtgataagattggggctaaatgattttggtcaccaggtgatgcctgtactttagcctgcctcagatcagggggtgcctgctgggctcaccctctctgtgtgatgctaaacgtgatgtgtggttgaggtggcaggtcaccatctctccatggaaaaggtcttcatgtccctttgtaacaagaacctgtgggctgatatctggcatagagtgacctgcgggttccctaacaatccttcatccaatggtgtgagcatacatacgtgatccctgcctgaatcattcagggctaaagaacagccatggtcacatttctgatggaactggaaatcaagaggaagattccttctctccctctccatgaagataaccatggaccatgtactttctgttgaatttagtgtgttacaa

SEQ ID NO: 1882446 - DNA, 4001 bp, Homo sapiens
ctctctcttctcttctttactcacgtcctgccccacccccagcagcacagccacccatacaacatacccccagtttctgagcagaggacatgaaattaaactccaggataggaaaaggaagtgtatcattagaacaggtatgatttaggaaagggaaaacgtcattggaaagaaggacaaccttgagctatccgcctattttacagacatgaagaccaaagtttttagaatgaaggacagtaattttcattgcaaaatataatgtgccataatatgctgatgtcagagacttcatttattcaaagcaccactatcaaaaaaccaggtttctcaaccttagcatgttgacattttgggctggatatttctttgctgcgtgttggagggttggggtggccgttctgtgcattgtaggatgttcagcagcatccctggtccccaatccctagatgccaggaacccccgagttgtgacaattgagaatgtctctagacactgccaaatgcccctggggaacgacatcatctccaattgaagggccactaatctaaagtgagaagtttctgtgctcagttctgtagctgtcccatctctagtaatttaccatgttcttccaagttccttccacccccccaaaaatacaggttttatgcccttaaaggccattagataactgtctggtttctggaagaggtgagaggcttgtgttgcaggtgttactgagcccagttagggcagaggggagccttggcccagtgctctgggtgctgtcgcctccttgggcagggggcccctcatcaccagctgctgtgcactcctctgccatctcctatgcaaacatggtgcatcctcccttcttccctccctttcctcctctcccatgtccttgttctgctgctgctcagtttcatttgacagtcctgtcttgtgcatcttggcacattttggtcaaatcttctcgggttttcttttgtggttttgtttaagaactcaaggtgtaaatgtagtgtggtcccagctgtaatttctcacacacactcaccctaaaaacaaggagtcagaggtgtgggatgtaagagccatcctggaatgggggtttaagtgagggaaggaggcctcttcatcttcctcccttgttctgaaactcttcgtggggtgatggcatgagccttgggtgactgcagcctcccctcctgctcaaggcttccctctgtagattcagcactttcttggtgtgggttcaagccctttggagtcagagctgggaacacaggggtttaggaaacagaggagaaaggaacttgcctgttagttgagttaatcgctattttagcatctcaaggtgtttcttcaaacagccttgcagagtccatttgtgacagggttgtggtgtgaagtggaaaggacagcagagcagagtcaggggactgtgaccccggatgaactacttattatggtttcctgaacctcactcacagcacctgcctcagtacaatgcaagccctgagaaacgcttgcaatacacatggcttgaaagagattatgattcagtttggttcatagaaacctctcatttcagaagtaatatgaccagaggaaggaactaggagggtgagggctgattctgtgaaaaacctttgggggaaaggcctttcctcaccaggctggccagaggagccaggtctgggaggctggccacagcggggactgtgggacagcagtcagtgtgcctgaaaccttgggctgagcgaggacgcctcaagagggggagataggggtgttcaggaagagcccagatgggattcagaggctcttgcttccttggtgagggagtcatttgctggcacaaagccctgatgaggaagaaggtcaccaaacctgtgctccgggtggtaccctggggccagcgaggaggcacttgccgaaaccacacacttccttacattccatagcaaagtaatccatatggggatataaagaagcatgtggcctcgggaagcagtgtcatccagaagcagcccgcatctcagaagtgggccacttgtagcatctttcctccttgcccaggcaggaaactcttagcgagaagatcactgggatctcaactcatcctaaatcccccccgcccgaccaaatcatgctgaaataaatctgttgtgaggaatggcagtgctgcttgggaccaaatccttcctactgtttgttcacagataagcagcaccacgtttccctggcttattcttgtgcagctacagtctatccagtcctttgttattactactaattaattcactgctgctgtttttgtgcattttgaatgtgattcttttttaatgtttgggatccagtgaagggaaaattaaaaagaagagagaatccaacagagaaattttccacattcacgcagagagccactcatgcttagaaacacaccggccctcctgtacttcctactgtacgtctatctgttttgggtgcttgttgatgggcagcagctgcccatccagcattccaagcaccattgttcactgtgggaaggatccttttgtcgggcttctgctccccctagcccatcacctgccccacaatctgtgaggcctgagcctcagaaggatgagggacattggcagctgttgagccactcagggtctggatggccaccctggctggagggagatggggttttgaactttgtggtatctgattctctgccagaaaatggggaaacatatgccaaaggaagagttggcccccaaaaaaggtttgaggctcacagcactggctggggtggttaaaaacatttaatcacagtaataaaaaataagaggtaactttttataagtatgttttctataacagaatcattacagtgttttgcgtatgtgagcaccttgactcctacctactctatgaaatgtagccattttatctgattttacagatgaggaaaatgaggatcgtagaaatgtattaattatcatatttataaatggtaattatttaaaaaaaactaatcagattggaggcacagttttggatcaacccatggagagaggcttagaaggtaaaaaaaatgttgagaaggaagaaaaggaaacactatgggtttttgacttggtgtacctttatcctttctgtaactctgcgcttggggtgttgttgatggaggtggcttagaaaccatactgtttcttaggaaaataggaaaatgtctctagcatcccagtcaaaatctttcgggctgaccttgggaatcatccaatggctcatccaattccatccaatggctatgtaagcttctgctctgaaaacactgttttctcccatagtcaagtatgaacttcatagaagtgagagtttggggctacccttccttctctaagtttgggggcagtgggcaaccaaaaacacactatcaggggctgatggcagggaggcagcttggtcaaaggaggaaggaggtgtgtctgtgcctctaagaaaataaaaatgtctcatttctttcatagaaccagggaacttaagagctgaataaatgtccattttaactagttacatctgtcagatggagatcctccaaagtgtttggcatttgagttgtgaggagtgagggtttgcaccgatgagaggaaccatcaagttttatgttcaaagaactagaaagagccaactttaagagacttgctattcatgagccaggctgagcttcatacatttatgtaggaatacaaaagaaaaagatttccagggaaaagatttgagatagccaagacagtgtaaactatcccattagactgtccccaacatttgggtgtgaattgttttgtctttgccaagcccaaccttgtagggtgaaaagattacttaaaagttcactgcaaaatctgcaggagaaaaacaaattgttaataaccaattacttgacaattaatgagtccaggtaactaaattcttatcactttagaatgaatagagaattttgaaagtcgagagagagagtt

SEQ ID NO: 1882447 - DNA, 4001 bp, Homo sapiens
gagccatgatcgcaccatggcactccagcctgggcgaaacagcaagactgtctccaaaaaacaaaacaaaacaaaaaattccaaaagccaaaacccaaatcaaaaaaaagaatgagaagatctgggttccagaaaggtttttagtatcaagtggggataatgagaccatgactacgaaggagctttaaaatttcaaaagcccttacaaatgtaaatttttgttactcattaaatgaacaatcactacagtatgcacttgcttgtgtggcattctcagattttggttccaaagagataagtgacattttatgttgagggctcaactctacatacatctgtttaaacccatctctaagggaaaaaaaaaccaaaaacaaaaaaacaaacaaaaaaaaacacttgaatttcaaaaacatattatttattattttgacttttttctttgctaacacaggtaaaatgactaaagtctaaattaattgattctagccaggtggtctctgaattccttccagagagtcaagtctatgtattcaatgacattacggagctgaataccataagaaactatcctgtctctcacagtttgtctctaactttcaaaaaatttctgtaatttgaacttgagctatctggtccttgagtttggatatggacattcagagaaatatacagaaattcaaaggccattgctctgttttctggttagttttatctgactcagtagcatcttttctctttaacatacacacacacacacacacacacacacacacacacacacacacatttatgatcaaagaaatgccaaaaagtatgcagatgtaatataagccaatcatctaaatgtttaaaaaatatacagatgttagatttaatgtagataaaccatctggcagatctgctttgttttttactttttatccagctgttggattctgtggaaggacagcctaggtctatacttagatgcgcaaagaaaatgatgtcagatgtatattgctagtcctctggaaaacacttcctattcaataggttgtaggcaccattagtgttcttgagagagaaaaacagaaattccatagagaaatgatttttatttggaactgcctacattagaacacatttcatggactatgttttttcattaatgcatcctcttaaaataatatagaaatttaaagtaagaatataattcctactagcaaaatttccatattcactttgacagcaagttaataaatatttacttccagggagcaaatcatctttggcagggtgaaaaagagtgctgcatcaaaccaggaccaacttagagaccagaagatgttctaccaaatacttgtgtccctcttctaatatcagcaaactcacatgtgatgaggcaccaaaataagaaacagaggtggcccatcagtctttaggattgaaatttgttttgagtccattttataaaagttaaagacctctaggcttaataattgggttttcaaaaattcacaactaaaaagaaaaacctctttttctttccagatagtgtatattctttttccttaaaaaaacctaactacatattaaaaggaaaaactaaccaacataataaatgttacttctctcctcaatttctgtgattttttttttacatattcggaagtcataagaggtaaacaaatctcctataatgaagcagttgatggccagtgaaaatgaatggatgcagcaaatattttgttaacaataacatagccacaaaatcatagtacatatacaaaactcttaaaaattattaaaggatgccatgagataaagcaggagaaaaaaaacactggtgaacaaaaacaatcagatgctctggaaagagtaaggagaaaaagatgggcatgaaaatttatagacagtttgagggtaggttttcaaagtggcatgtgacagagccaagcacaaatcctcttacttattaacgggatttgtccctgtacctgtcacacattgctttgaaaatatctgcctctgtgaaaggtatactgcttctctccgtcagttttactcttaagagactaatgtataatctctttaggtttcatcttttgtatttctgtgcatatgacaaattgttttgaacactcttcatccatacacataagaaagtaggcactaagggcttatcactgcatatttaaaaatccctgagatactattttcctcattggaaataattgttctattaaaataatctctggatttatcactgaagaattttcaactaatgcattcatgtcttgatgccgtgaggcaattgttctcaactttatctgatccagttcctcctttttataacaaatactttgtaacccgtttactataacaaaatgaaattcatagatattataaccacttcaagaatatcatagaaaaagtcaatacaatgccccaactataaaataaaagaaataaaaagaaacaactttgtaatattaataaaatagtatatattttgaaatgtaaatattctagcactgccacataatgaagacatgaagtcaagtgctgatacatgtgcacagaatcatgataaatttgcaaaggcatcagccactaatgcaaactaaagtaagattgttgtattgatgcagcaaacaccatagagttgccatcaatgaacaacaattggtaaacttcgaaataacaatttccaattaatttatgagagagtttgatttctgaaaagttcattacatattaaacaatgtaaaaaatcttctaattccatgtaaatgaaaataaaatcaaagtgtggataatattacataggtttttcaaccacatgaatgtctgataggatactcaaaagttctgtgagcataggagagtttttcaatgagagcctcccgcaagcaagctgcaaatgtctatcatcccttgactccacccaggagtcagtggtggccctggctccacaccatgcaatttttataaaaacctaatacatccctgcaagtttccaaggttttctttagggtgtgatactcctcccactccgtgagaatcactgtgataagattacaaagaaggagaattataacaaataatggtacctgtacctttttgtttttatttcgttttccctttactaaagtgaggcagagcttcactttaaaaaatccatcatgcaactgacattgaatttacatatttgtggcagcaacactcaaaagagtcttctcatcataacttttagttaaaaataaatgaacttagcacatgtattaggaacatttgagtgaaacttacttaatggagtatcacacatgatatgtttgactacttaactttaaaatagaagaatagactttttcttaggaattacattctatacacataaaccatttatccagacatgcacaaaaaaatataatttgtaaagcagaggaaaaaaggagatgcagaaggaatatgggaaagaaaagaaataatggtgaaagctgttgtttcaacggaaaaataactttgcacatgacatgatatgatgctagatttattattccatttatccatttatccttaaaacaaaccaaccatagacatttaccttagaaatataaagttgcttatttctgtgcatacagttttacagaaccatggattgatggtttcgtaaggtatcagtcacacttccatagcatttgctgatataaatataaaaccttcattttaaaggataaataaagccacactattatctaaacagggtaaaatttaacatccttgtggtttgtggaaatttttgatgtgcctgctggcttttcaataaaaatcaattatgccttaaatgcgagcggtagtcaacatactacagactataaattcaatttcatactcagaaatatggattagctgaacttgatgcccttccattgatttcagaaagcaaaagctgataaggtaaataatagtaagaggctctctgacactccacatcaagttccggatttccatattat

SEQ ID NO: 1882448 - DNA, 4001 bp, Homo sapiens
cctaactttgtaccccttcatctcatctcaaacatgtctctcctattacccgctccgtagggctgtgacaatgcagtcagagcagaatctgtggaggcactccttggtggtcatcgtattcttcagcatgtccaggcagatagggcacatgagttctgaatgcagtgaccgaggggaaacagcaatctctgtgccatccattatggcttcctgaaggcatcagtgagtagaaaggtggtgtgggttagagggaaaggggttttagaaacagcagcccataaaataagaattttgagaaatacagtgagaagacccatgttggtctctataggagacaagaattctgagaaagagaaggactgatgacttggagcaaatggagaaaagacagactttagtgtccattaactaagagtaggagctttggaataggaggatctgaggtggctaagtggcctaggagtgaagatggcacaaatctgtggttgggaaaaactattcaacaaaattttttaaagtcctggtgctacctgtattagaaccccatagggtgcctgttaaaaattcagattctgagaacccaattcactactgaatcagaatgttggggggcatgaagctctgcttttaataaactcccaaagtgagtcttatgtgcactgacttatgacactgaatgaggaacagggaaggtaatttttgtgtttgtgatctttcaaatgaagataataatacttgttccacctctctggcagggctgttttgaggattaaatgagctaaatgcgaaagtgctttggaaagattaaggtgattcaaaggtagggccaggcaaggcagaatagagcaaattacggaaaagaagctgtgtgatgcggtctgtggatataagggtttgggggagggggtaagcctgaaagggagaatgcctgtcacctgcggggtccggtgcagctcatacagactcagttcccacgttttgctggcattctgggcattcgccggcgtcgtcatggtgaccgggcgcagaccccccaccagggctccacagccgaggagaaggcgaagaaggctgggggtggggggaaggggaggagggcgtcaggggggccgcccctcgcgtagaccccgcccctccagaagcgcccctctccgcccccgctcccgcccccgcgccggcactgcccctcacccagctccagccgttcgcgctcccgccgccgccgcgcctctccctaggcccgggctcctgggccaagttcgctcggtccgcaaccgctgctcagacagcagctcccgccaccgccgccgccatggcccgggcgctggggccctacgtcacttccgcctgctcctccgctacacccgctccccccgccggcggagacgtcacccaccattcgcggcgcgggtgggacgggacgtggacgccgcggttctcccgcccacgggacgggctcgtcccgcgtgaggatcctgcgtcccgggagttctgcgccacttagggaaccacggtctccgcccccggcccagcaccgtcgcgcggccaacaaccttagcctcggttcccttccagaggcccccacgcggggcctcagctccggggggccggggcctggaatatctgggaccccaggaggggacagagggctcgtgaaaagggctacctcccccactctgcgtaccctggcgactctggggatcaacccccctcacttctccgtaacccccattccaggatcccgggggaaaaggctgcaaaagatctgccgctttagccttctagtcctgagaacacacctaggtcccgatgtgcccgggattccccttaccaccctggggactccctccaccctctgctttggctctccctagaccctccgacccgctctcccgctcgaggtttgggggcggcggctcgggacgtccagactcaactctcggccggagccatagactcgagaattgcgtttggacaatcaggagccgcggcccggggcggggaagggagggaggcgcacgggaggaaagggggaatggagacaccacgcggaaacagggacatacacaagatggagctcccattgggaagggggggtgcgcgtgtgggtggggtacacaggggcagaatgtctggagtgggaagtgggcagaagcctcttcgaggactctagagtaaacgaaggggatggggaggaaagagaagaggaaggggcagagcgatccccattgagtgtagggaatgagagggatacagggcgagggggtggggggcagttagagaccctgatgggcatcttgtccccgcccgagctgaggctcccggacttgggctgcggctgccagggggtggcctgtccctgggacaaggcagcagtgggtgccctcgccccccaccccagttcccccctacttccctgtcctctccttcagtccgtggccagtccttatgtgggcgccagagtcgattagcgcagacccccctccccttcctcctcctcttcccagccccctccctcctgctctctccagcccctttcatcggctggttcattcccctaatcctggccccctcccctaatcccccccatccgaccccaggccggctgcagctattgtaaggtggagagaaaggggagggggggactcagagaaaggagaggggtgggggagggccacctgttccaagaccccctttcaaggccagactggacaccaagatggggccatgaacaaatcacccttggggaccataagaacccagggagttggggggaggggactggtgctgcagaaccagtggaaaggggtgacgcacgaacccctcccttcaaaaagacccggagtgtcacgcatacacagtgacacatactctttcctctcacacccggcggcgggggttgccctgggagaccaggcagagaaagggaacaatccttcgggaaagggaaaggagggggaggtggggaagggtctgagggcttggacacaagaagagccggaggtggcagggaagaggacttggaatttattagggtcacaagcacccctgcttcccatattcagcattcctgaaccatacactgccaccccttttgtatcctgggaacttagagtcctcatcagcaggaggccaggcagagtggtgggggggtgagcagagtccagggtccttgaggcagttacatgaaaagacctcctgggaggggcagaaacatttggacagatgcatgggtggagacacaaatgggctagggggtacccacttctgtccctggccttgggaacctctgcccttcccagtggctccagactccccttacttgctttctcatatagtctgggttctacttctctgccctctccctccccatgctggcctcataccagtgacttccactgaggtccctgtgatgtatccactatcttcagatgccaagaatgcgaccacatctgccacatctatgagaatggtggggagagggcagaattctgctcactcccatagacccaaaacagccataatctcccaccaaagacatccctccccacaaacctctccacagacaccaaccaccagtcccctagaaaatccccaaactttggggatctcttcattcaggcccccttcccagggaccccactacattcagtgctcaccctcagggtcccccaagtgtcccatcgggatcatttcagtaatctgtaaggaaatactcatgtgggtgaaagcttcttttatggatttttttgaagactgagtctgtgacccttttttgtcttcatttctcatacattcattgaatatttaatgtttgccaggaactgtgcccagtattctctctctctctctctctctctctctgtgaagcccagagagattgagtctctgaatgattctgccctccacccacagcctcctaccttgtccaccactttctgtggcactttctgtgtcatgggtgttgcaatgaaccctgggaggacagagttacagcggat

SEQ ID NO: 1882449 - DNA, 4001 bp, Homo sapiens
caccacaacctctccctctcaggttcaagcaattctcagccacctcagtagctgggattacaggcacgtgccaccacacccagctaatttttgtatttttaatggagacagggtttcaccatgttgttcagattgatctcaaactcctgacctcaagtgatccacctgcctcagcctcctaaagtgctgggattacaggcgtaagccaccgtgcctggactgttgatgttactttaaaatagtagtttacattattactgtggaaatgtggggcacaagacataagaaatactaggtattaattttgaaactacccggaatggcttatggaggtttgtatttgttgatttaaaaataattaaaaatgctgtaatttttacaaattaaaaagttcccataactaattatttacatgaacaaaatgaacagataaaaatgaaaaatggaaaatttaggggcagtaaggtaaggaagaggatataaaataacataggaagagaacctaaagaaagtgaaggtcaaagatttaggaaaagtttaaccatttcttcaaacctatagtcatttacctaggaaatacggtcgggtgaccccagaaaaacagccgagttatttgctccaggggttttcagcttaccaattaaaatagaccacattctcagttccagacccagggcctggcagaggcctctccaagccccttgcatttcagtggcagttgatgaacctctcatggcccagcatgactaatagagttttgatagctttatgtatgagggaaacttaaagacatttctaacacatatttctctccatcccaggtattagaagaaatgctactattttaaatagtggtatgatcatactgttttagtatcacttctttatcatcatcatcaatgggtattaaacagggaaaagaaactcttttacattaatggaaacactatatatttataaaatactgtgttttagaggacaaaagatatcactttcatatctttttaaagtgtctagtttctatataagtgtatccttaatatttctattatacacttaaatatttctcttatacacttaaatatttctatttaagtgtataatattaaaaatatccgccataagaaaaatacgcatttacaaaaaaggaaaattagaaattatgtccatcacagaaatcttctacaggattctgaatcttaaaattgtcttcatatatttaggatagaatttgatgtatttattatttttaagagatatgagttattgcataaagctaagttaaaagttcaaccaaatggaaacagtatccacaaattcctaaaatactattctaatcatctgaaacaagaataggtttttcaaataatagagttagttgaatcagtatttgtttgttttagacactttattaagctgagagctgctactttattacttaaacactaagcctataaggaaataaaaggggtttaatccaagtaatgtgaaaataactaacccttcatcttacttttttcccccaaataattgtggtttcattaatggattttttttttgtgaatgggtctaaaaaacacctattttgaaactgcagaaagggcaggacaaaacaaatcacttcatagatttttctgggaaatattgccctactacgcttttaaaaaaaataaaaatactgtaacacatttcctcatttctcttacgaatactttctttttgatattgcaaattctatgcatacacagagcacctcctcaatgccctgctgaagccctctaaaaatgtacagacatggttttaaagtgatttaatttataccattttaattcagctttgtaaaaatgtatcaaagagatagcaaggtattcagttttagtaaacaagataattgctcctaaagtagccccttgaagtccgaggcagtaggcagctgcaaacatccgactgaaagcccatctgtggcttcacagcttccagtcgaggatgtttacagtcgctcactgtcaacagcaatataccttctttagccttctgttgggttaacctgaagaagtaatcccagcaagtgtttccaagatgtgcaggcaacgattctgtaaagtactgaagcctcattcaaacagcaatattctagaaaatgtctcaaattcaaaacaaataagaaggctcatggatgtctattattcatcaccgagcttctagtttctataaaattttgtgatatactaaaacaacatatataaatggtttcattcattattgttagccacaagaagtaaataggcaagtggccaggttacttaatatgatttcaacatgcattatgtaattacaatcctttaagcaaaagtgaccaaacacagaaactaaattatcttaacagcgtaaagcgtacatttaacatcaaatactgcagttgagtgaacttagactaccgtgaaaatataaaaggtctacttggaaagttataaactctgacaaaaaaaaaaaagacttacatgctgcttttatagatcacttttgctctaaagtctgctcccagagaggacttgtacagtcagctgatttttgaaagagtaagcaacaatcaggagaaaaacagaaaagaataacgaggtataacacaggcatatatcagtatgtggatcaaagtttcccactggaaaaacacagaacctatcactcacaacagtgacgcacattaactccaaatttgaatgttttgaattccactcccattctcttatgaaaataaatgaggaaaactgaaggttaagctctatcagtcactactttcctgaagtaattcaaaaccattctgaatctagtgaaagattaagttgatacagaaaagtgggtgtgcctttccctgagatttgtttttagatgaagttaccgtaaggttcttaaattgtgtaagtcttagtagtttgtgatctcaaacccgaaacaaaaataaaatccacacaaaaagcatcatgtttactgaaactaacaaatatgaagaactccataaattactttctcaaagcaaagggtaactctatcccattaaggttaaaaaagttaatctttgagtcagcaggtgaaaacaagctgaattatgttgtggcctttttctttattaactaaggactttgaactattaaaacttcctagggaaccagttttctcaatgggtcaagtcacacaggggaacaaagcaaactttatcagtgctgtgcaattctacattccagaaattcttagtacttggcattcatataccactgctgactagagcttgagtcaatccaccaaactcagctatggctaccaaccttgtgaacttctcaccaagatacccacttcttttaagttagccacgactagacaggcagagtactctttaattaaaatagataaataccaaggcttacaccctggggggacattgtatatcagtgactctttacaaaaagaaaatatttttaccaccataaatttttctcaaagtgacaggtcccctacttgccttggaatcttaccacttttaaataactgtaaattattaaataacatgtaaaacagtgacaagtaaatactaagcaaacaacctcaaataacaaataattacttaaataattctattgccaccctctcactttgagaattgctgatccaagtgggacctatactactcagtaaccaaaaaaacaagcatgtagtttaagtaataatgagtctcagttaaactggtaaaattgtctggcatctgactggaataaatctgctttagctttcacatagacttcacctagctcatatcttgctaaaagaggagcccacatacatacaggcaataaagtgcttttccatttatgaagtattataactaagatcttatggtctttaattattttgtttagtgaaaatttgatgtttattcatgaagttctgagcaaaacgctgtgttttcaaagttatgttaaggaattcattggatcagcaattctcca

SEQ ID NO: 1882450 - DNA, 4001 bp, Homo sapiens
atatatataaatatatataaatatatataaatatatatataaatatatataaatatatataaaaatatatataaatatatatataaatatatataaatatatataaatatataaatatataaatatatatatataacttctcaagcatgcttaataatcctacttactcatgtcacaaaacaggctagttaacaactagaacatatctagaagaataatactaaacaaaaaccaaaattatatagctttatatcaaagttttccatagtcaatgaaagaaatattctggaatatttaaatacacttggttttggaggacaaggcaataaaaagattgaataaaattagatattttacatagatacacaagatgtttatattttgacacattatatattttcttgtaagttccatgagaaaaaggactttgtttctgttctctgctatatcccctgtgcctagaagttcacatagtagatgctcaataaataattcttgaatgatgaatgaatttcagcatgtatttcaataagctttgaaacacctacattcatgactaaaagttaaccataaatttagatctggaatatttgaatgtccccccttttaatttaggcagaataataaaatgctatggcaaagcatatgcatcattctctgctgcttagagttgcttttccccttacccatattatctgcctctcctagcagaaagcaaaatttcaaacatctataacaattatttctttgagaagactgtagagcattgtttcaaagagggttttcttaagcctgtaggcaaacctaaaaaggtaaatgactcaatcaagctggcacttcaacagtgtctaccactgcttcaaggccagcctgttcaaatacttccctgaaatcacatgctaaagtcattgtatttaaactttttttctataaactcatatgaaacaattactcctattgtattaggctctacagtcagtgcggaggtaaaattaaaagctcctctaatacttctaaagtagtagagtgtcttttagtttaaatgactgatatatgctgatatgccaagactagagtaattttgttcagatttgtttaatttttaatagaagcattaagttaattatttaacttcttaagggcttgttatataaaaatatgccttatttaaatattctctttaacaagaaggcttatttcataataattttaaataaatcagcaatggactcaaatttcaggtaagttacattctagattagatgtttaatagacctttgatttaaacgatttacatgaaagagtttttctggttaaggctgaacttatgagttcgttctgtagatttttcttaaaattaacttcttgcatcccatcccttacctctacattttccttcctctcccgtcctccaacaacaattctattttttcctgaaatgtgtaactatattctagctttaaagagcagaccttattgtttgccattacaattcctaaagcatggggctccaaggtgcctttgatccctgataaaatagcaagtccaaggacactagaatttttgcttcaagaaaagcagacttcagtgtggaatgctctcaggttaaaggagaaatgtttagcttaacgtataggtaatgtgttgcttttacagatcagactgcagcaacccacaaaatgtagcctcatacaagttaaccagaacttttgtcacttgggtatttggtaatcttttttttctttttaaactaagtgaaacagttcaaatataactgatattatagattatcttacatttctttggatgacttagtcaattcaccttttttccttttacagttgacctcagaaacaaacacgggataggatcaattctaagacatagaaatattcaaaatccatttctctttagttgacttccaaggcagaaagagtaaacagccttctcccagctttcttactttccacagctgagagtgtaggatgtttacagtatctgtcgctcagtgctctctaggatggggttggcagtcagcagcacaagcctcaggaaacccagtaccatttgaagataccataatatgtcacaggaaaagatcagaaaagtatacttgggactaaattatggctcttttaggagtagggttggaagggtgggtggggaggctatatgacacttacttagtgctgcctgctcagttcttgttttcttcctgttttgcacatcctaagatattcctaaggtctctagctttgagcttgcacactcacggatttggttaattttggattttcaatattctatgctttcccaaaagggtttcaaaatattcgccaaactccttccttaaacagtacataatccctttctgactgttgggagacatgaaatgcagcttctcactctctgggctatacaactttgtttcagctcactcctgcacagaactgagaataatggctaaacagaagaccaacagtttaattactgaaaattagttaccttaatgatgggatacacagtaataaatttaatcaaatgagcaaaaagtaaatatgttagaatacaactttacatgcataaaaatggtatattgcaaattgctaatataatgctaaaattattttaaaaattcatattcggacagaagtgaacctacaattagaggcatacacatgaatggagtcagttgcttcctaaagttattttctaagaatgacttattcaaatagttcttggacttcatttgctaaactggtctaaggtacacaaaatacttgggcgaagaagaaagtcatcattactatacatctcagaacaaacctacctgataagagactacactgtaaacccaggtggcatataattccaaactgttacaggatcttactcatttcattcattcattcattcattcaacaaacaattgtgactgcctgccatatatcagcaatgttttaaattctaggtgatgagaaatgaagggtatcatccctaccttcgagaaggacacagcttaatttgcaagacagacacatacaccattactataagtgttatgatgggtcaaaagacacttctgagttggctaatagccaggctgagtcttgaagcctgaataaaattagctaggtgaagatggtgctaatgggaatttggaaggggtgggcagtgaagaagatagtgtagcttaaagtgtaccagaaagaacagtcatccaatagagaaagaaagacaaaggtaatgtatgctgaggcctttaagaattcagcagaggtggagtcaaagatgcatgtgggtgaagggtaaggggagagacacaagggaaagatgggagtccttatgtgccaggttaaagggtttgggcattatctccaaacgatgggtacgagtgaaagatagtaagcaggcaagtgggatgaccatgtcagtactttagagaatttactctagctttaaggtggcaggtaaggaaaacaggaaaagaatcactgcagtagtgtaagggagagcatgggagccttaattagggaagaggcagtaagaacacagagaaaatgaatatgagaaattataaagacaagaagaacagcagaattcagtgagtgagtagctgaggggagaggcactgtggagatggagaagtcatgggtaattcacaagcctggcttgggcttcataaggcctttcatgcaggagggaaagaataggaagagaagtggagaaggaaagagccctaagaatgataacttgaatgggctgggctgcaaagttatgaccccatgctcattgaatactgaattctgtcacaactgaaagggtgaaaacacttgaagaactaaatcacacaaacctgttctttattctgtttctgcacttctgcttactcttctacctggcaagtgcccatacagtcttcaaatcccaaatcaagtattctctcttgtgaatcctctctggtcagcgtcatccctaacacccacacccctcccccaacc

SEQ ID NO: 1882451 - DNA, 4001 bp, Homo sapiens
gcagcagtagtgggtgctgtgtcctacactggattcgtggtctcctaatagaaaatctctcagaggaaatgggtccacagggacctgagagctctaaacagctatgaaatctgccaggatatttctgtccatgctatctgcatcagtgagtttaaaatgtaataggagaaaaaaaagagacaaaacattaacataataattgatacagcatagttttgtacaaagaaacctaaatccaaatacttgactcagtattttgaagctagtattttaaactttactgggtaaagtatctgattgacatttctgaaccttatttttctcatccacaatgtgggagtgataatattttccttgcagagttattgacagaatttgaataatcttggtatatagacagtgccttacacgtagtatataaatatataagaaaacactgcagttatgtttataatggatttattaaaaagaatggatcatattatatgaaaagtacatttgttttccttagccctttagtgatttaggagattcaagcgtagacgtaaaagtgagtttcttttcatatgttaactggaggatttttttctttcttgagaggctgagattgggttgctaagagaactcttaggacaagaagttgtaatatttgacttcggtttttaactctctaaggggtatattccctccttatgtcccataaattttaagtcaaggtgaattatatgcaacagcagtttatccatatttactttggggaggaggtggggagactccgggagaaaataattataaatgcagactgggaattagtaagtgcagggaatctgaaccagtggtgatcatgaaaacgtccatcacagaacacagaggatttttagggcaatgaaactactctatttgataccacaatggtgaataaatatcattatgcgcttgcccaaatccatagaatgtacaacaccaagaatgaaccttaatataaactatggactttgggtgataatgatgtgtcagtgtaagttcataagttgtagcaaatgtacctctgtcatgaaggatgttactagtgggggaggctatgcatgtgtgggaacagagagcatatgggatacatctatctgtactctacaatttttctgggaacctaaaacttctctaaaataaactctattaaaaaaaaagaaaagaaaaggtcaacaataatgatcccaaatatataaaattaaaactgtagtataaaaatggtcacatgaaaatgcatgaatgtgctaagaacttttctgcaataggatttaaaataaattttatataaatttcaatgattcatgagccaagaacccagcattctggaggtgtgtgcatttgtgtgtgtgtgtgtgtgtgtgtgtgtgtgtgtgtgtgtgtaaggcttacattgaatggcattataaccagagtcatacagaaatacacaaatgctcccctatttagaatccttccccaagaaatactgaggaaagcaaatataatggtagttggattttactgaaagaatgtattcaaaaagtatttatataatgttaaaatagcatagctaaaattagttttataaaatagagcaaatatatctttttatcagctaaaagttcaaagtgaaatcatcattattatattattatattattattataaacagttataaatcaggctgcatgattttaaattaaatgattcttaaaaattgttatctgaattatttcagattacatacataaagtatgacttcattaataggtaatatcacattgtttaaattttacaaaatttccagtcacaatggttcatgcctgtaatctcagcacaaggtgagggtcccttaaagcccaggagatggagaccagtctgtagtcccagctagtagggaggctgaggcaggaggattgctgcttgagcccaggagttcgaggctgcagtgagctaggactgactgcaccactgcactcgctccagcctgggcaacacagcgagaccccgtctctaaaaataaataaataaatgaataaataaataaaaattacaaaacgtaaaaatcacgtaaaatatttcaggtttgtacttaccacatacaaactagagatatgaagaattaaacattacaaataaagcacttcacacacagtctggcccatagtaagcagtttatagaagttaacaaatttgtgttattgttattttctggagtccaagacaaaatcccatgatgaatgacaccacaaggatgtaagcaacaaaattcagaatatgagaagttctactagattaaataaaaagatttctccagcaaacaatttgcaaaaaaagttaaaaatagagaaaagaaaagctatacacttgaaaaagactgaagaaatatagtaaccaaacgctgagctttgtctagattcatattcaaacaaaacatctgttaaaaaatttatatgaggcaatcagaaaaattgacactgagtgtattaaggaattatttatctcgttttaaatgtgttagtggcattgctgttatgtttctaaaaagccattatattttagattttcataataaaaatgtataaatgaaatatgatacctaaaaatatcttcaaaataatccagtatgtgcctgtatgataactgggtgggtttacaaaattgctcatgaattgattattgttaaagcaaggctgttgatacatggaattcttctctgtactattgcacacagttgaaattttctgtaatacaaaggttttttttttaaatgtattcaggaaagtcccataaacataggcagacaagcattctgtttgaagttatgttagtttttcagtttttctcatttttatcacatttaggaaaccctgtccaaggcctgcccaagactgtaagaacctctcaggaatgcaactataaagaatgtgtatgcaggaactaataataacaaaggaaagcaaagtaatgcttgctttattattggctggactaagcccccagacttgtttatatattcactaattcatcaaaaatgcaaaaatggtcattgagtaccagtgctacaataagtactcatagtttgttgaatgttattaaaataatgtgaaaacaattacattcattatcttcatagaacttacactccagtgggaggaaaatacatatattacataattccacaaacatagttacaaggtctgaaacatttataaagaaaaagaatgaggtaaaatgagagagtgttgcacagggaccaggtatggtttggggcagtttagaagtggcttgaagaaatgtatcttgagatgaaataaggtggtatacagtaggtaaaggacaaggttgaagaggccagagcaaatgtttgagaaactcttacaatatgaaagagaagatgagaataaaataacatgaaaattatcacagatttaatagagaaagttcatgtaacagcaaacaagtttaaagtcattctaattagaattcttgatctgtaaaagtaataatagaatgctaaaaacaattggaaaatttaatagaaagattggaaaattaaatcaagaaaatctcacagtaatttaaaaggcaaaaaaaaaatgtaatatatggtagaaaaaataagatggagaacagaccaaggaagtcaaacatcaagtgacaaagctagagagaccaacagggaagatgaagggagaaaatgatcagaacaaataataagggaaaatgttccagatataaaggatttaattcttccatggaatagtcttgtcaggtatttagcaaaattaacagactcacttctaaatatctcattttcaaaatttcagaacttcaggtgttatagaaaagtcataaaatattccagtggcggaaaccaaaatgaaacaaactgacaacaaaaaaaatacttctattattaagataatgagaaagtccttgaagttctaaaggaaaattattttttattaataaatgtagatcttttcaaagtc

SEQ ID NO: 1882452 - DNA, 4001 bp, Homo sapiens
aaaaaaaaaaagaaaaagaaaaaaagtcaaagagcaataccagctatgcacttatgcatgctaaagtcagtctcacagatactatcatagaccttacttaacattgatatttatattcatgttaatatatgtcatagacatggaaatacactgcccagatcctccttcaaggaagggcttgcagcccaactgcagagagcacagttagcagatagacaccagctgttagcttcctcagtgtttgcctcagctgcagagctcctccccactcaaggctgcatccttccccgggcagtcctcattcagtgacccacagaggagttaaaaagggtggtctagagcccctttggcccaatgtgggggcaacttgacaggcatactggctccagagctctccactgggttggttgagcatttgtctggcctgtatcatagtttgacattttcctttgcccaatcctatttccttcaccccttcacagatattgagccctaataaacattttgcatcccaaactccatctcagcatctgtttatcgagaactcatatgtcactacattataatttctcgttctgcatctcttgcatttctttttcaattgggcttctgcatgcaaagactgggagtagcaaacaaatctatgtgtattgaattacaaactatgtcctcttaaatctttgtgaaatacataaagttaatactattttttggtgtcttttttaagtggcttgaattccgtagagaaaaaataaagatgtatacatgtaatatttcaattaatatatatcctatccccataggcatagagagcgtaatggggccctccattttagagaggagataaacaaagatgacctctttataggtgttacttgatcagagacctacatagattgaaaaaaagtgagaaaggtagttatcaggggaagagggaatttaaagtgcaaaggccttaagacagaaaatgtgtttggcattttgtgggaatagccagaaagccttgaggctatgaagtaaaagcaggccaagtaatatcaagagggggtggggcggaggaaggaaactcatagggcttcctagggtaggtaaattaatgtggacaagcaatcaaaagcaatagcaatcccgatctaataaatttgataatacaaattagctagacagaaaaagctatgttgtatcctaagctactacaagagtgcattaatacacctgctccaaagaaatgggactaaggatttacaaatatgggattcaggaaattctgcatcccatattctccttccatcggaatcaaattctaatgcaaatgagtcactagactttcatcacctgggtaaagttactcttaagagttagaccacttaagaatcaggctgccctttcttgcttttcaagaatacttagaattgcaaaatttgcctttaaagaatggcaagtatatcccatttttatggctgtttgacaacactattaatgtaatagaattattacactggaggccgggcgctgtggctcacgcctgtaatcccagcactttgggaggccgaggcgggcggatcacctgaggtcaggagttcgagaccagcctggccaccatggtggaaccccgtctccactaaaaatacaaaaaaactagccggtcgtggtggtgtgtgcctgtaatcccagctattcgggaggccgagacaggagaatcgcttgaacctgggaggtggaggttgcagtgagccgagatcgcgccgcgccactgcactccagcctgttggagactccatctcaaaaaaaaaaaaaaaaaaaaaaaaaccactggaattagtaaatagatttcagggatttgtacgtttgatttcacttattacccctgctgaataagcttctccggagtatcctacaacaacttttgggtcttcattgctttccagtgggttaatttagaaacattgtaaagagttgctccagcccaaccgcgaaagaagcgctttacaatgttatctagcgaagcaaacatgaagtgaaacaaacatgactgtgtccagctttctctaagacagtgtagaatggctctgaaaagagcctttgttttccagttttcacaacctcgctccttatttggccttatggtggctctcagtcttcttaggcagcagcacggcctggatattgggcaagacaccaccctgcgcgatggtgactttgcccagcagcttgttgagctcctcgtcgttgcggatggccagttggaggtgacgcgggatgatacgggtcttcttgttgtcgcgggccgcattgccagccagctccaggatctcagcggtcaggtactccagcaccgcagccaggtacactggcgcgccggctccaacccgctcggcataattacccttgcggagcaggcggtgcactcggcccacggggaactgaagcccagcccgagaagagcgggtcttggccttggcgcgagctttaccgccttgcttgccacgtccagacatactggtcacaacttactgaaagtagccaacgaggaaaggcagcgccttttataaacactattgggcgcgaaaaagaagatatgtcattggttagggttgtagcttagttttaaccaatggaagtacgtcttttggatttgcagattgggttgattgggtataactaacctctgacgtcaccctaataaccaccaatcagatacaggactttcactcttcaccttatttgcatgagaggtcctatataaaaacgactcctggtaccttgctcccattacttcccgttttctcgatctgctgctcgtctcaggctcgtagttcgccttcaacatgccggaaccagcgaagtccgctcccgcgcccaagaagggctcgaagaaagccgtgactaaggcgcagaagaaggacggcaagaagcgcaagcgcagccgcaaggagagctactccgtatacgtgtacaaggtgctgaagcaggtccaccccgacaccggcatctcctctaaggccatgggaatcatgaactccttcgtcaacgacatcttcgaacgcatcgcgggtgaggcttcccgcctggcgcattacaacaagcgctcgaccatcacctccagggagatccagacggccgtgcgcctgctgctgcccggggagttggccaagcacgccgtgtccgagggcaccaaggccgtcaccaagtacaccagcgctaagtaaacttgccaagtaagcgtcttaaagcccaaccccaaaggctcttttaagagccacttaaattatcgatattagagctgtaaacacgtgttcctaatccaggcttaaattcgggcgatctttttaaagggattatcatgatcttatcacactgagtaatgcatgcagtgcttgtaatcgagtctggctaaggagaagccacatacactttgttagtactgagtgaggaatatggcgcctaaaaaattagggatgtgcaggaaacttgtgttaacagaaagtgcttcctggctcttggcgcgaaaatggatacttccgttgtgtcgagtgctgtgacttcctgttagaacttgttgaaagcctattgtgtcacgtgtactttccaccatgtaatggcgttctaacgtgagtttatatattagtaaatttggttcccgatggcgttccagtacgtatggctttcgctcgagcagttaccttatttaacctcttctaggctgtacccagctctgccttgctttgcttccccctcaccccctgattccatctctgcagcccacgggacatcgggaagatgccagaccaccaggcaggatagtctgcaagggtaaggggaggagcacagcttttctcaggagtgaagaaacggaacatgaaatcatcacggagatttttggaatagtttactagtttttaaggcatgttcagcgtcaattggtccaatcagtaatttttccttttgacaagaaagcttatagaaaaggaaaatgaaaagcaagtagattcagaggggag

SEQ ID NO: 1882453 - DNA, 4001 bp, Homo sapiens
ggtctgttcaggtttactctttcatgattccgtcttggtaggatatttgtgtctagaaagttacacattacttctaggttatacagtttgttggtatataattgtttctaacaatcttaggatcttttgtatttctgtggtatcaattgtaatgtctccaccttcatttctgatttttaagttttctcatttttctttacatatatatatttttattatactttaagttctagggtacatgtgcacaacgtgcagctttgttacatatgtatacatgtgtcatgttggtgtgctgcacccattaactcctcatttacattaggtatatctcctaatgctatccctccctgctccctctatcccacaacaggccccaatgtgtgatgttccccttcctgtgtccaagtgttctcattgttcaattcccacctatgagtgagaacatgtggtgtttggttttttgtccttgcgataagtttgctgagaatgatggtttccagcttcatccatgtccctacaaaggacatgaactcatcattttttatggctgcatagtattccacagtgtatatgtgccacattttcttaatccagtctatcattgttggacatttgggttggttccaagtctttgctgttgtgagtagtgccacaataaacatacgtgtgcatgtgtctttatagcagcatgatttatagtcctttgagtatatacccagtaatgggatggctgggtcaaatggtatttctagttctagatccctgaggaatcgccacactgtcttccacaatggttgaactagtttacagtcccaccaacagtgtaaaagtgttcctatttctccacatcctctccagcaactattgtttcctgactttttaatgatcgccattctaactggtatgagatcgtatctcattgtggttttgatttgcatttctctgatggccagtgatgatgagcattttttcatgtgtctgttggctgcataaatgtcttcttttgagaagtgtctgttcatatcctttgcccactttttgatggggttgtttgttttttcttgtaaatttgagttctttatagattctggatattagccctttgtcagatgagtagattgcaaaaattttctcccattctgtaggttacctgttcgctctgtcggcaatttcttttgctatgcagaagctctttagttttaatagatcccatttgtcaactttggcttttgttgccattgcttttggtgttttagacatgaagtccttgcccataagttttctcatttttcttagtctagctaaaggtttgttgattttattttttcaaaatagcaactcttggtttcagcaatcttttctaatgttttcaagtctatttttttatttttgctcagatttttattattttctttcttttactgactttggtcttagtgtgctcatttttctagtaacttgagaaataatgttaagttgttaataatgttctttttctgacataggtatttattgatataaacttctaccttaaaagaactccttttgctgaatcccataagttttggcatgttgtgtgttcactgtctcaagatattttttaatttcccttttatttttctctttgaatcgttcattgttaaaggtcacgacttttaaatttccatttatttggaaattttatgaaatttttaaaattatttatagtatcataccattgaggtcaaaaaagatatgtagtataattttaatatttttaaatttgttaaggcctgttttgtggcctaccctgcaatctatcccaaagaatgtttcatgtgcccttaagaacatgtattctgctaatgttggatgaaatgttctatatccataagttatatatgtctccattgatatgtatatatccattaaaaaatcagttaaactacactttaaagagaccgaacaggtatataggtagctgatatctatatatctctttggtccccttaaagtgtagtttcagtctgatgttttcctgtagattttctttctgaagaataaccatttttggaagctggatagtgaagtttccttgtattttctccattcatatatattaatatttgttttatatatttaggagctgtgatgttgagtacatttgtatttagaattgttatgtcctcttgataagttgacctcattattatatagtgaccttctttgtcttttacaatttttgatgtagtctaccttatctagtatagatatttctgctcttttggtttccatttgcatgaaatcttttttcattccttcactttcagtctatgtgtgtgattaaaggtgaggcgagaattttataagtagtatagagttgggacttttttgtatctatttatctactttttattggagaatttaatccatttacactcaaggtaattatagatttactactgtcattttttaattgttttctaaatgttgtatagatccttcgttactttttcttgatggcttccttttggattaggtaattttctctagtgatatgcttcgattccttaccttttatttttgcgtatttactataggcttttgttttgtggttagcatgatgtttacataaaatattgtatatttaaaacaggctaatttaaattgataacttgactttgattgcattaaaactttttaccgtcacatcttatgtttgacatcacaatttatatgttcttctattgtgtatcccttaaaaattattatagccagctattatttttagtagctttgtcttttaacattcatattaagaataaaagcagtttatataccattacattattatagtattttgaatttgacttcttagttttaccagtcattgttatactttcatattttttcatgttgctaattttctttcagcttatggaattccctttatcatttcttgtacaactgatctgatggtgatgaatgtgctcagcttttctttatctagagagttaccacaaatgtgccaataacatacactgggtaaaagacagtctcttcaataaacagtgctgggaaaactggatatccatatgcagaagaataaaactagacccctatcttttgccatgtacaaaaataaaatcaaagttgattaaagacttaaatctaaaacttcaaagtataaactaccagtaaacattggcaaaaatctccaagacattggtatgggcaaaaaattcttgaacaatgtcccagaagcataggcaaccaaaacagaaatagacaaatgggatcacatcaagttaaaaagcttctgcacagcaaagaatacaatcaacaaagtgagtcaactcacagaatggaagaaaatatttgcaaactacccctgacaagggattaataaccggaatatataaagatctcaagaaactctacaagaaaaaaatccaataatctgatcaataagcaaagccttgaatagacatttttcaaaacacatacaagtggcaaacaggcatatgaaaaggtgctgaacatcattgatcagagaaatgcaaattaaaactacaatgagaaatatttcaccacagttaaaatggcttatatccagaagacaggcaataaattttgtcaaggatgtggagaaaagggaacccttgtacactattagtgggaatgtaaatttgcataactactacagagaaaagtctggaggttcctcaagaaactaaaaatagagctaccatatgatccagcaatcccactgctgggtatatacacaaaagaaaggaaatcagtatattgaagaggtagctgcactcctatgtttgttgcagcagtatttacaatagctaagatttggaagcaacctaagtgtctctcaacagatgaatggataaagaaaatgtggtacataaacacaacgagtactattcagtcataagaagaatgagatcctgttattttcaacatggatggaaccggagatcattgtgttaagtgaaataagccaggca

SEQ ID NO: 1882454 - DNA, 4001 bp, Homo sapiens
catgtctcctgcagggccgagggcacccagcctcggctcaagggactgaatgtttgcccttgctccagaacgcggaagactatggaagccagcatcactgtcaaggcgggaagggaatacgatccctgcagaatcgctcagcacagacatgttgccagaggaacctgagaagtggcccatctgggcagcaatgccttgccccttctgtgccctgattctcctcatggaaggtggtacgaccttcacatcctccgtctgacagctggagtccctggtttctgagcgctgcccagcagaccgacagctattgaaccttcctagtgtagagtagtgatcaggggtgtacactgagtggccatcagcatcatcttggccagtgcctgatgctggagataaagcagaaagaggcttgttacctgaaaataaaatccatagttcatcacgtgtaccctcacccctctgacagaattttaaaaaaatttttctatttgatttaatttcctttctcctgtaggtatctaagtacatttaaaaagttactgatagctctaaaatgaaaattattgtcatgaatgtcaggtacttctcttaatttgtacctccaatcctcctatggcttgagtgctgcgtatggaattctcagggtatcccttcaagatcaaggctgccaagggctcagaggaggatttactttgaaataatcacctttcagtaaagtcttcaaggtagcctttcgcccactgggtgactgtgcagaccatctatcaagcagtgacacatctttcccaaaggtagatgaatgtagtaattgaacaatagggccacagagataccatatttgaggggtactggtataaaacagtgttaattacattaattctttatgtcagaaggaaattctaaggcaaagaaaattgatttacaggcccatctgtgttccaaacatttcattatccatctgaagccattatctgtctgttggtgacattcaaaattcaacagcaatctgttgtgttctagttggggaaactggcaggaactgatccagtgaacatttcctcaaattaggatgatttattcgttggagttttacaaccaaacagagaatagtatgttaaaaaaaaaaaaagacagaaagaaagaaacacaaggaagggccaacagagagggacgtggacgaggtaaactttaagtgtaaacagttagatttcaagctacccaggaaagaacagagcttatgagaaaaaagaaaaaaaatcacaaagacaagaacctacccaaagtgtactgagaaaaaaaaaagtcaatccttaagacaaatcgaatctctaaaaatagtagtaaaactatagttctccctatgttatctccatccaacaaggacccaaaagtatctatctcaacacgggctttgctgagcaatgcgagtcaagcacacccctctgtgtcagtggacacctggatgcgaccctaggactgatggggtttctaaggcttccctctcccaacacataatctaaccagggcatggactggatataggatgccttttgctcactcagatagcagagggtagtactgaaatggcagcactgtgcttgtatcaacctcaaaggagatggcaccctggaaggaaggatcccagcataaagccttctccttcactgtgatgatggagaggaatttttatacttgtatttttagcgaagatgatctatttcctctctctaccctctttcaagtactcactcactgaagacagatagacagacacatacacacacacgaggctgtcccacacagagagggaaatgggcaaaagggcaggacagaagaaaaacccactttgaggaagtgcaaaattttgccatttagtaatttagaagatgggaagttgactggtatcggtgtatcagtgtatacgagttcaattccaaacactcaaaatatctcattccattcaacaatgagttttgagtgtttggagttgaactcatataaacaaatacattttttttcctttcaaaattgtactagtttttgcatggagttagtggtagatttttaactgtctttaagtagcataaacaaaatcctgatacttttgggtagcagttttaaatgtgaaaccattctaggcatgtaaaaaaaaatagaaatacagctattttatcaccctctagagctaagtataactttcttattaaaacaaaaacatttcctaaagaccttaaaaagcatatgaaaaaactcatatatcttatcacaaggaccaccaaaattctattcccaaaacagaccctccaatattttcacagtataaaaagtttcagaatatgataggaaacagatgaatgctatagatgcatacgtcgttttactgtgcttagctttattgtgcattgcagataactggggtttttttttttgtttttttgtttttgtttttttttttacaagtcgaaggtttgtggcaaccctgtgttgagcaagtctattgatgccatttttctaacatgcttactgtgtgtctgtgtgtcacgttttggtaattcttgcaatatttcaaactttttcattattattagatctgttacggtgatctgtgaccagtgatctttgatattactattgtaattgttttgggggtgccacaaatcacacccacataagatagcaaatataattgatatatgttgtgtgtgttctgactgctccactgaccagctgtttcccagtttctctccctcttcttgggcttctctattccctgagatacaacaataatgaaattaggtcaattaataaccctacaatagcctctaagggttcaagcgaaaggaagagttgcatgtctctcactttaaatcaaaagttagaaatgattaagcttagtgaggaaggcatgtcaaaagctaagataggccaaaagctaggcctcttgtgccaaacagttaaccgagctgtgactgcaaaggaaaagttcttgaaggaaatgaaaagtgctactccagaacatacacaaataaaaaaacagctttattgctgatatggagaaagttttaatggtctggacagaaaatcaaaccagccacaacattccccttaagccaaagcctaatcaaggccctaactctcttcaattctgtgaaagctgagagaggtgaggaagctatagaagaagagctggaagctagcagaggttgtttcatgaggttgaaggaaaggagccatttatataacataaaagtgaagcagcaaatgctgacggaaaagctgcagaaatttatctagagaatctagctaggttaattgatgaaggtggctatactcgacaacaggttttcaatgtagatgaaacgaccttctagtggaagatgtcatctaggactttcaaagctacaagaggaggagtcaatgcctgtcttcaaagcttcaaaggacaaattgactcttgttacagccaaagtagctggtgactttaagttgaagccaatgctcttttaccattctgaaaatcctggagtccttaagaattatgctaaatagagtctgcctgtgctctgtaaatggaacaacaaagcctggatgacagcatgtcagcttacagcatgatttactgaatacttttaagtccacagttgagatctactgctcagaaaaaaaaagatttctttcatttacagtgcacctaggccagggggcagtggctcacacctgtaatcccaacactttgggaggccaaggcaggcagatcacctgaggtcaggagttcgagaccagcctgaacaacataaagaaaccctgtctctactaaaaatacaaaaaaattagccaggcgtggtggcacatgcctataatcccagctattcaggaggctgaggcaggagaatagcttgaacccaggaggcggaggttgcagtgagctgagatcgcgccattgcactccagcctgggcaacaagagtgaaactctgtctcaaaaaaaaaaaatacacaaat

SEQ ID NO: 1882455 - DNA, 4001 bp, Homo sapiens
ttgatgatcaatacatgaattctgaatatttaagtatcttcaactatagcaatttttttaaaagaagcttttcttttctagtgtatggaagaaatggaatataattatgtaagtaaagtacctaaatagtaccttaaaatataattttacatgatcaaattaatatagaaataattacaaagaattataaagtacaaggttatctcaaatataggtgtatcagtataaatgacccaaataaatgtattgccaacctctaaaccactatcactaactttaaaaactcttacttttatttcaaagatgcatcaaatggtagaaacatcactgagaaacatttattgtcatgcagaatctgtactatatgagctaattagaaaaaaaagtctaatgggaaaaatggtcatctgtcacgtgacaaaagcaaagtacaaaaactataagagtacggtcccaaatatctcaaaacaattacacataaaacaaaaaatccagactattcacaagtaacagcttttcaggataagtaacattattgtataaaatctccctcttcccataaaatgtatatgttcaaatgatgctggcaaaccaaccttacaacatgcaggttctgaatgtgttgcttcagcacaactgaatgtctaggatccccagacatttactgtatgtctaggatccccagaatacacccaatacataccaactgggtggataatatgctcacataaaaacacactgacatgtaaagatatatatctatggattatgcaagtatatggcatttttattttccatatttttaagttttccaaaattttctatgcaatctataacttttattatcagaaaaactgcaaatcgacatattaaaaatggaaacccagaatgattcaacctaaaaaacttagaagtaactaagaaaaacttagaagtaagtaaactttagaacacagtgaaaatgtgtctatcatttttccctggataaattttattatcattactttgtatcctatttattattaaatatcttctcaatgccttttaaaaagtcctcaggctcaaagatcaaaataaaaaacaaaataaaaacgattttctaattataagtttttctggattacagtaataagatgttaattcaaaataaatatagtatcaccacttgtaaagaaagttaccacttttaggataaagttactttgaatttataaaaacaggaataataaaacattttggaacttacaggaaatcctttagtgataggaatttcaatattaaagatgaggattcgggctctgaaacgagtgcaagctttaatgggtactttggggccacaaaatatgcagccaacactgtaagaacaacaaaaaaagaggaaaggtaattgggggacaaatttacatcaaatagaaagacctcaaaaacatttacaaggaaagtaaaacaattaagtaaattagggactttttctaaatattctcttctgagctaaagcatgactttaaaccattattaaccttatgtcatttttatacattagagctttcactcaaagcacatgccaagtatgtgtgctgacatgtattaattcaaattttaagtaagtttgcttacatttacacaggtgtctatttttggtcaaatgaaattcaaaattgaactagcaggttgcaaaatatatgtgtttagaggtgaggtcctatatgaagacaacggttgcttaaactcattttctcactcacttgattttgatgatatccatcccaaccaaagtaagactaacatgatcgcctgctgccgcccagtcgacaggttcatcatgcagagtgattcctggaaatgagtaagaaccaaagcatacagtgaaacacctcgatatcaaaccataacaaccaacagagtttggctgatttgtgcttcatcagtcactactcatcattttcaatatgaatggattgagagtaagaagtgtaactgtgagcgttgaggaaaacacacttcctctagaactgactcttctagaataccaccctaaacataaagtgacttgtatttgcccataaaaggctgacttctgcttatttaatcaagatttttaaactaattgacacaattggtatattcattaaacaggccccattcaaatatttctatcatattaatggatacagacaaaataaaacacagttcaaattattcataatgacataaaagatgggctggagaagatgtctagcagtattttcttctcgagttttgcttttaattagacaaccacctaaacaaataatccttgttttccaagtaacccatgggacatgtacactcagtcagaatttcaagcggtcctctcagcaggccccttaactactcctggctcaaaagaacttctttccagagagagatctgcatactaatgactagttatatgaaaagaaaaatattaaggaaatagtgataagaaaatttaattttaaaatgatcctaggtgttgctatatatctagagatatacatctatttacctagacatagtcctgaaggtagtcggagagagcagttcccaagggcaatactcagctaccttactcaaaggcttttaaaatatatcccatattttctgattttatggaatacatttatggattaagttcctttccatagaaatgtaggccttttgacaaagagaatgtgtaggccaaccactgtggatagttcttgattgacacattgacatgttcttagtaaattataatccacccatatctttctgaaaatactcattttctatgcagcagggagagtttctgacttttagggagctcaaggatttaactttaagagctctgagacaatctagagtttcatgcaaaatatcatgtatgtgcacatctgcattaatctgagaaaagaaggcataactttcttcaggtatcagagattcttcctcccaaacatgttagcaattatcgtattaaggaatgtttgttaaatatcaacttactagatttaattttaaaatgtaaatttagaatgaacatatctgaattttgctatgaaatatgggattaaaaacagaagctaggtatttacacacaatagagattgactttggcttaaacatttgtagatgttttatactacaagttcaattaacagtataaaattttccaaaggtaattatattctctggttcttcttcccctcaatcatgttacactgttccacatatgacatttatcaaaaaacttttctcattggacaaacattacaaaaagaggctcttttttaatactctatgagcttgatatgttaataaagtaaaaaaaaaaaagtaatttagaatttctatttgttggtagtagattcagtcaagtctttcttttgggacagtactggttaaagagccacagtagtacctaaaaatgtttagacagaacagtgctttcaagaatcaagtaaaccaagcaaaagcagtaaggttagaatggaggaaggagaacctctctgttgagttaaaagactggctctcaagaagtagggtggttcttccctggggcttctgataagacttacactgataaaagataatactttagagtttctctgtgtggaaagtacagagaagaggagggtaaagaatgtgagactttcagagatgactaaggattttagaggttacaagggagccaacctcaaggtctgtgataactttaggatcatggttttaatttatggctcttaatcataaaaaaattcttgttctcaaaaaagatcattaacataccaaaaaaatcgtgtttcaaaagtattatagctcttgtcactttaaaaaacaaaagcagagacctgtacttgcacacaatgaacagatctatagaaaatgacactatttttaaagtgcatattactttttatcaaaactgaaatttcatgatctctagtgggcacaaataaaaaggtcaaatggaaataactgattttcattcccttattcat

SEQ ID NO: 1882456 - DNA, 4001 bp, Homo sapiens
cccagacataacattaactttctgtgtaaccactgccatcttaggttaagttttttgcctttggtactgtaaaatgtgagattggtaacaaacaaattcagcatcctcttccatctataaatttcagggagttctcattgactttaatatttaagcagcagtacttcatgcatttttaaatattattcaattgctgtcttaaactattcaggctgctgtaacaaaataccataaactggatggcttataaacaacaaacatttatttctcacagttctggaggctgagaagtccaagatcaagacaccagcacattttgtatctggtgaggggctgcttcctgattcaaacatggccatcttttcatgtatcctcatatggggtaaggggtcggggatctctctgtggtctcttttataagggcactaatctcatttatgagggctcccaaagactctccatcctaatatcattatcaccttggggattcgaatttcaacatataaattttggagaaaaacattcagtccattgcagtttctaaaactgaagatgaagatgccttttcagttttcatcaaatacaaatgggatttttttttagaaacaggaataatcaatcaacaaatcactaaatgactaacagatatatctggatcatgtgactaagcaaaatgagactggttaaaatcactcatttcacctgtgggtattcattatagttcccattttaaaatgtgaacatgtaagtaaatttcaaaggtcatacatctagtaacgaaacaggaaaagttcccttgtcccctcgccaggcatgcgatgcgggtgtggcttgctacttcagtgccccgctcctcaaacctctaggggagcatacagatgggcaggctgtggggctccgcccccagggctgagtctaggggtgaaagtttacagctcctgaagccccagtggggtgtgttacagagtgctcttttagtttgtggtctataggcgacttatgtcagctcaattagaccctctaccttgtcacaaggacagagggctttctgtatcccagggtttcttgccttggtgtactggaagaattggttcacatgtgggcttgaagaatgagtgcaaggttttactgagtggaagtagctctctgcacatgggggagccagaaaggagatggttttcccctggagttgtgccactcagaggcgcgggctctcccgggctctcctccaaccaccccagccaaactccacgttgttctgctggtcagtagcctgccagcatgcgggtgctggtgcatccctctgaacatcctgtgcctgtgtgttcctctgctgatgtgctcctctcaatgtccagctgcttcttctctgccttgctagggtcttggtttttatacacacaggatgagggcatggtgggccagggtggtctttggaaatacaacatttgggcatgaaggcaggagtgcctgtccttacctaggtccgtgggggtggagccccagccagggaccacgcccttcctctacctagcactttccttcaccccttccatatcatttaaaggagccacgctcctcccttcccagcacttccatatcagtaagatggagtttgagtttaactttttgactccaaaaatgttcatttgttttctgaacaagcgatgctattgatgacattgacaaaggttagggttacagtgaaacaaaactgattgattgattagatagaatagaaaaaaacatatatattattctaagcttttcctgccatcatcttttctggggaaaaaaaagaaataatatagttagttataaaaaagatccatggttcagcagatgctggtcatatgtcttaattttgtcactgcctttcaaaatagagacacaaagggcataatactttcagacttcagtttcctcatatataaaattgcagagattgatcaaaactattttgatagaaactattttgatcaatctctacatttcatatattttaggccagttaaactctaagacatttttaaatagttgtaaaatagttataaatagaagagatacagaaaggaaaggagaaaggactagtgtaatatttttccaaaatacagccaggcaagaaattttagactaccaatgactctcttccaatatctttttctttgtacaaaatatacttcaaaaaagcagatgatgaccccagtgtgagggaaagagatttaacacctgtttcactcatttttgtgtcttattatatcaccttgtgtagaaatgagcataactgatcattttcattaggtattgtaaaataataagggcttgcaattaaagatatgtactataagttttgtaacacattttaaaattagagccaatataatcatagaattttaaatacaggatgtaaaataaatgaactgctatatatttcaacagatacctttactatcaaaacatgaatctaaatcatccgtaatgctaatctcttttccaaagtgttagaacaaaaatgcctgtattatagtatcatagttagttgctgtactttcaaaatattacatgattaacaggtaaattacatggtattgatagtaacatttcttttttaaaaaaaatctttattcagtaatattcaaggtaaccagtacctgggagaatctctactcaaagaagttgtagaaagaaacctgaaaatatttcatgtctgttaggttatgaacatttgcatttgaaaatgaatatcctaaagatttaagaccaaaaacaaaactaaatcaaacaagtttccttaagcatccccatcaatgatttttcaaatggtaattaatagcaccaaccaacataattcaggattggagaatctatgactcacaataaaagcctctttggggtgcctaggttaagagaacatacaattatgtgcaacatgaacttaaaaggagcaattagaatgagttgcttttgacacagacaatcatttctgacattgaaatctcaaaacatttcagaatcacatattaagggaatgttcatttaattaaagaagaatcagaagattcagatatttatattgtgtcagtttcattcactttgtaactagggttgggaataaagcacaaaactttaaactggacattcagatgtcactgctaaccacagacttacattcttttgctatttataccatttgtttactttttgcatttccttagcttggacagggactttctgcttctagtcaatttcactcttatttttggctcataaataaattttccagtacttctggaaaatgttacatctaacaatttttttgcaaagagatgatggaaacattcctattgggatttaataaactggatggtgagagttgtcactactatcccaagagatacccacagtaaccaaaaacatgtttcccaattgtctctacgaggttgacagcagtaataaagaatatctcctctcctttaccttatcagcactaccatgtgatacgactattctattctttacaacaaagggtctccaaggttagcctggcaacagctcaaacatactccagccccacttgagtttttttaatgattcattgagaatttctgtcaatattgtagcctggagaactaaactctgctctctgctaagttcaattaactctggtctcctgtcagtaatcaaatttttttacatttaatcacatccattttatttaaaactaaactatagagtaccataagcctactatacctttcttttttacaaaacctgccaaaaggtaaggtgatgttttgcttataataagttatagctcttatggattaaacattctccgttaaaaggagtctaggacttaatttccagatcaatactcatccaacacttaatcattaaggatgcttgccaaggaagtctgccttattcgattcccagtgctgttattgttttaactggtgatcttgaattcacctaccaaccagctagaagtaaatttttat

SEQ ID NO: 1882457 - DNA, 4001 bp, Homo sapiens
ctgtgccaggtctgtgcttccatcttgctcgcatgttatcttctgagggggtattgttaccttcattttttttattggtgaaaaaacagaaatgccgagaagttagatagtattatacttttgtgcagtccatagagctggaaaagggagagccaggatttatacccccaggcaggacctggaatgcttgtgaaacgcaggccccactcagtggcccactccacagctaccctccttccttctcaacacagccccaatttccccctgaagcgggcctcttcccagcacagcccccaggcatcaatcttgcttgacgttaggcagttgtggtggggcccagctacctgtccagtgaacagcttaggaataattgcataccacaactctggccaaagtggctagaggagggggttcctgggccttctgcaaaagggttctttcctctcaaaagaagacaagactcaggggcttttctatttttactgttggacactgctaagctggagccaggaggccggtctgtgggcagacacactgttacatgaaataattccaatacattctcacatcagggatttagagggaaagtgagagaccatcaaagatggccattttaggtcaatttacagaaaagcagaagagcatgtgagagctcagcactgagatggatggaatgatttccccatcatctatcccccagaggcaggggcttttcctagttggcagtcaaaccccagtggcctgctggaagccattggtaccaggccattggtattacttgagtagaactgggatttatgttttcatgatgatcctaattgggtcacaggtaagctttgctgtgatgtttgtgtttgagtccacaaaaaaattttacagtaatttaaacctgtatttatgtttgatacgagctcattttgttaccttaacaaaacaagggtgtgctgggattttgttttctttaagcagtttaatgactccaggaagtaaacgtgtgtagttatggtctagctaaagtcactgatgtcatattttaacctggattttgggttaaataatggataacgtacctaattaggctaccagtaaacaatcactgcaggatttcacctaaaatgccagtgaccagaagtagatggtgtcctctttctctgaaaactggggatcaatgtgaggttacagttgaaactatgggttatcaatgtccacagaatatactggccctaggtaagtagaaaaagtccttgaatttgcttaaccaaactttacatatgctcatgtgactacctgttttatacatggattccttttcatctttgaaggaagacaggaaacagggatactaaaattcacattcagaaaatatttccatgtagagacgtccatctcccctcggttctctccctactgcctaaacatgctttgttagcaggccaagtcagacgtggtccacggcagggtgaattaggcccttctgtctcatcgctccttcctttttaatattcccgaggaagtaacagtatggtacttattaagccaaattttcctggaagctccaggtctcattgatagccacgctgatgagagattactgtccgactttccttttgtaaattagtgggcaactggttctctccacatggagcgggaaaacaatctctgtcttctttcagttccagaacacaccaagctcgttagcactccccaggccacctgccctcccccactctcccttcacgtcaccttactcatcaccaggtcccagatgaaagagctcttgctcacagaagacatccgtgactggtgtcccggccaccctcccagcccgcccttttgaacagcacgtcttacagctggttgtgttttactcacccgcatgctcgtttgttgaacattggctcccagaccgtttgaggcactgaggagaggatgacgcagacttggtccccaccctcagcagtgggtaccgagtctccatcatccactacccagtgcctcaatattcactgaaacgtaaaagcaggaaggagaagcaaagacctttatgagcctcaaggctatgtgacacccacagatcagcagggtatgcaggacttcccgtgctgtgtggggagagttagaattctgaatcgtaatcctgagctgggctgagggggcagagttagaactctgtatcgtaatcctgagctgggctgggtatacgccttgaacaagtcatggtgccttctaaatagtctcaagtgcaaaacatggatgagaaaatgagaaaagttatagaaagtattttttaatgaaagaattcatattaggtgacaggtaatgacctttacacacacacacctctctctctctctctctctctgcttatagtgactgagaaatcagctctcccataactttaccaacaataattcttgaagatgagagcctcttgtctgaaatcattttccatttatagttatatgaaagatataatggaataactgctaattaaatctataaatatacatataaaaattaccttgtcatttgtagcgcgcttccaagtataaaattaaacgtggttctgaatttttcccctagaactctaagttttcatttcttaatcgtctagaatagctcctttaataaaatttcatttttgacatgatgcttgcttgatattttaaaactgtactttaaacctgaaatttcacattaattattatatttttaggattggaaaatgacaccatctttcagataaatgattggatgagtaatatttagccaatttcgctttctgttgcaggtacagttctgagtgttcattaatattcaatgaaatttccatcagtatgtatgatattttcaggttttcaaaaataagtgaaataggcactaatgtggtgataacactaaaatgagggcctgaaagaagccccgacacgtgggaaaagcctgctaacaaagacgcactgcaacagaaagacctcacaggagaggcccttcaacccaggatcggtattttatggcatcagctcattaattcctccaggtccccaggacacagatatcaaggatggtgtcaggctcattatctcagacactgaaactgaggctagggagattttcagtggttaaccaaggtcagatagcatgtcgtaaagctgggattcaaacctctttacatgtctgctttcaaagtcgtagctcaaaccactgatccttattgcttctccagagagatattctccaaaatactctagaattaggggaagcattaatctgaaaatcttggtatgtcttctgggggtgggggtgggaagaggaaccctgaagtccctgactactgtggagatgaggatatcagagggcttcttataaagttctcattggaataataaaactatgaggtaatagaaaatctggaccaaattatatatacattatttagatacgtaaacatcagatacacaattccacttaaaagcatgcctgtccacacatggacacacatatgcacaacaggcaggtgcaagccattcccagaacatgtcgtcttactagttcatcatggtactacgtttgttacacctctgaatgatttcctacgagcaaaacatccatcactttaaaataatgttaagacactctaggataaatgtaacaaagggcaaacgtcaaatgttaaatctttatgcacagaagcagatgaacacagcagcatgcctctggcatccccaagtcctcgctgacattcagacagccacccttgtttcaggctacagtaaagcagggtattaagaggcagtaatgcaccgcagcccatctgtcccataaaagctcaatacgtaagctttgtagaaggcaggtgatcagtaacagtggtgaaccaggtgtacattattttaatcaactacattctggacctttattctcaaagtttctaatggcaaacgaataaacagagaaaccaaccatatctgccctccttgcaattttttcttcttttggattct

SEQ ID NO: 1882458 - DNA, 4001 bp, Homo sapiens
gatgggtgcaaaggtcgtcatgcaggtgaagcaatgaacaccgagagggacctgagcagaccccacttccgtgtgctccagcctctgctgacagcgctcctctgagctaacgatctctctcctgggggagaaaaagggccaccttctttcttttgcaaagtaggaagaatttctaagtaaattttgctttacaatgtttccctaagaataaagaggaattgaagattttttttttaacatatccgtcatcataaacctcaaggaattagataatataggaccaatacaggttagaaatatccagtcgttcagacagagacacatgtgagtgcagaaggctaagctatttcacccacaaactcactaaacaatgttgtttccaatagcagagacatcataatttgaaaaatagtacataataattatgcaaaatggaaataaggtgcttttgagtagaaaagaaaaaaggctacaaaggtatttcaggagaaaatggttctatttccaaaaaggggagaaataaaacaaggttaacagcttaaagcccacgagccctgtgacaccaagttggagactatcaggcaaagacagcttcaaaagtgcatatttggtagaaaaatgaacaaaatgaaattcactgaaagtctttggatattgggttgctgttggggctgccgattcattttttccttctctaaagggacacagcattcattcacagatgattcctttatctcacctaaaacaatgcccgtggtatcgactattatccttggcaaagtgcctttgcattaaaacatggtgacagcatttctcggccctgatgttggggagagttcctaccatgtaattatccagctcaattagaagacaaggtcagaacaaacagatccagagggaaggtccatgcctgctagacacacagatgtggtcccacatcattttcttttttctttttttctttttaggtagcctgttactgtttcatacacatggttttcaaagtaacaggcagccagatagtaagactgcagggagcaaatgaaaattcacatttttttgattgagtacctatattgcaggcagtttcacatataacatttcatataatgtctacagaaatgtacacagctaattgtctatgacattggtattactgagaccatctcacagatgaggaaactaaggttcattaatttgactgataagacttataagaggttcattactttgagcctggtttagctaataagtttcataaccagaagtcaatcagatgtggccgccatcaaagcccatgggcccaaggcatggtctctcaattgtaccacaatgaggcctacacttctgttttgcactctacacattttcttagtggaatacaataacagctgtacctgttttcacctttttataaggatctcaatgatcctcattaaatgtaattaagaacacagtgaaacctgaaactattctgcgtgaaggtgccttgtccagtctggggagaagacaagctcggagtcttgggtgacaaagtcgctcattgatggattgccagcagtctggtagtaacgccttagtgactgaaggtcaagaacatttctcttgggctccgcttcccaattccagttgaagaataacaagctctgtggtttctacacaacagaaaccacagattcccaggggccctgtcaatcaagcttgacactaaatggtgatgactgctcctgttattgcaaaatacatgtatactaaacaaagaccgtactggttagttttgcttaaatactggaggattctgaccagtacaatgctaaaacataaactttcatttatgaaaaaagataaactttctaaaattcccaggttatactcaagaagtaacttgctccctgtgaagagagggtggggttgcagagactccagagatctccacttctgcagtgtcagtgtggaactgtatctattgctccagtatccactcctgaccagcaggaatggcaaagaacctcagaagagtacaggtggtaggtgctgagtaaaactggaagtctgagtgtgtctcctagacactagcaactacaaggatatactttcaatgaaactctttgaactcattgggagaaacctgaaaaataccatgtgctgttgaggaattaatgcccactcccacccccagtcttcatctaattatgcttttataattaattaattaatgcccactcccacccccagtcttcatctaattgtgctttttaaattaattaattaatgcccactcccacccccagtcttcatctaattgtgcttttttaattaattaattaatgcccactctcacccccagtcttcatctaattgtgctttttaattattttattttattttattttatttttttgagatgaagtcttgctctgtcgcccagtctggagtgcagtggtgcgacctcggctcactacaagctccgcctcccgggtttttgccattctcctgcctcaacctcccgagtagctgggactacaggcacctgccaccacgcctggctaatttctttgtatttttagtagagacagggtttcaccatgttagccaggatggtctcgatctcctgacctcgtgatctgcccgcctcagcctcccaaagtgctgggattacaggtgtgagccactgcgcccaccctatcgtgctttttaaattaattgattaatgcccactcccatccccagtcttcatctacttgtgcttttccaagtatattcatctatggttaaactttcatatcatttctttacttttcttttaagccacacacttctgagattaaaaaacaacaacaacaaaaaaactgttcagctcattttgaaatacaacagaagtattcctgaggacttccccatggcaaacacgattattaactgattactaaaaagagaagggcaaaaggcaaaataatggacattagatctagggaaaaatggtggaaacaaccttaaagaatacggtggagaaacatctggaaaaagcatatttaattagagaacaccaagagggactgaaacaaaggaaatcatgcctggctggcctgatggaaggcttggaaggtgtgactgccatgaaagctacaatcaattaaataagtgccacctttcttgaattttgccaagcagatggcaaagttggagaatcaacagggaaactgcagagtgatacaatggagagagagaaggatcagaaagcccctcctacagctacatccctatccctcttaggcttgcgtcatacattgtccagttggcttcaacattcagaataactggagccctaaagaactgtcaagttctgagaacagtctttccatttccagaaacaacttcctgagagaccgttacatggctgccaagaaaacactgcttcatgtttaaagcacttgtgaaacttgaggtcaaaaagcagaggtccaccaagcaaggccacagaaaaacagcttgaaaatgctctagctgagcctatacgctctgtggcaaaacctcgtgactgtagtgcttactctgggcagttctggaaggctttttctaccagaagtttccatcagttgaggttttgactcttactctcccctgggtggagactctgaggctgcatggtgcaagatgaaaggacttcaatattgtctgactataagagcaagctctgcaaagcacttttttgaagagatttttgaatggaaaatctgggtgggaaaataggaaaacaggtcagttgagcaaaggaatatcaactattcctgttcgccacatgagctgagaatgcagcctctccttcagagtagaaacaggagctggggagctcctggagtcgatgggaggtgcccaagtctggtaggagatgggggcactgatgcagccatggccccccggctggtgtaatctgctttcaggcacccagttgcagggtggctcagctgagggtcaccagcttgcagcgatagaagagaacg

SEQ ID NO: 1882459 - DNA, 4001 bp, Homo sapiens
taaaaatacaaaaattagctgggtgtggtggcgggcacctataatcctagctgctctggaggctgagataggagtcttccttgaacttggggggaggaggttgcagtgagctgagatggtgccacttcactccagcctgggcgacagaacaaaactccgtctcaaaaaaaggagaactgagcttatgttctaatcttgttgcttatctgcatggccttggacaagcttgtctgagttgattttcctgagaacagggttaaaaggagataacgtgtatctgcagtcatggtgggaggcaccccaaggaggaaagattaagatgagggccacgaggcctcagcatgcagctcgcccttcatacctgatgcagaattcggccctaagggaaatgtgccgagtcctgtggttcccaccctgcttcactggggagggtgtggatgttgtggacttggcacttttcttagtgcttcccgtctgcactgacgcacaggcctcaggagagaaggccgtgtggatggcaatgattgcagggtttgtgttccctcttcagctgtctcactctgccagaccaacaaaaactgagactgaagtcgccagtcctgaggaagcaggcttgcccccagtggaaacactcatttgtcttcagtggcgtaaccccagctcagctgaggcagtcaagcttggagttaactgtctgggatcaggccctctttggaatgaacgaccgcttgcttggaggaaccagacttggttcaagtaagtctgagacattgagcccaaacgtttatactttgtgattatcctaatgggtaccgtgcaaagaaaatgcttccaccagggcagtgacttaactggttttgaaattgcctagcctgccttaattggaaatgcctaagtctagtttttactctacagctgagccataatacagccaagtattttgacaatttaaatcagatttagatctgctaaagaaacaaaaattataggcctccaaacgggctaggtacagtatttgcttttgtttctggcgtcaatcataaaaggattattttcttaaatgaaaatatcttcttaaacaaatggcaattcagaaagtacttcatcaaaagtggtcagaacagcagtgctgtccagagccgctcggcagggcaccgccggcatggtaggtggacagccctctgctgtgaggttctgtgcctggcactgcttctggctgccagcagtgtccctgacatgatgacaaccaaaaacacctgcacacatctccaaggacctccaactgagaaccagtgactgaagagaaataagcttcactgctccattgcttttcaaagatattttgtccaaagcatactgtcttcctctaagaatcccttcccatgggcaagcccagcccccagtctgagacggccccacccagctagccatgctggtgtgcaactatccactcccttggtgaagacccagcccaccaaaccagagtcctcgcctcactttcaaactacagaactccaggctgttagagcctcgcagagcagaggatgcctgcgtgaatcccagtctcaacaccagctttgttggggtgggagtggtggtggcggcgtctgtcatcagtggttggccttttaatgtggacttgaggtgaaaaacttctggctggtcatcatttttaaagggatgagaggggatgaagtggtgccctccccgaccatggctaaattgtcttcctctcttacagagggagacacagctgttggcggggatgcatgctcactatcgaagctccagtggcagaaagtcctttccagccccaatctatggacagacatgactcttgtcctgcactgacatgaaggcctcaaggttccaggttgcagcaggcgtgaggcactgtgcgtctgcagaggggctacgaaccaggtgcagggtcccagctggagacccctttgaccttgagcagtctccatctgcggccctgtcccatggcttaaccgcctattggtatctgtgtatatttacgttaaacacaattatgttacctaagcctctggtgggttatctcctctttgagatgtagaaaatggccagattttaataaacgttgttacccatgtcctccagtgcttatcaaatgaggtaaaaggccggctggtgggcatggtaactcccccctgtaatcccagcaactttgggaggctgcagtggatggcttgagctcagaagtgtgagatcagcccaggcaacatagataccctgtctacaaaaaaaccaaaaaattatccaggtgtggtggtacacacctgtagtcccagttactcaggaggctgaaccgggaggattgagcccaggaggttgaggctgcagtaagccccgatcatgcaactgtgctccagcctgggccaaagtaagaccctgtctcaaggcgggggggggagtcacagcttcgctgtgagaagcactttattttttgagacggagtctccccgtcaccaggctggagtgcagtggcacgatcttggcttgctgcaagctccgcctcccgggttctagcaattctcctgccccagcctcccaagtagctgggattataggtatgcaccaccacaccaggctaattttcgtatttttagtaaagatggggtttcaccatgttggccaggatggtctcgatctcctgacctcgtgatccgaccacctcggcctcccaaagtgctgggattacaggtgtgagccactgtgcccggctatgaggagcattttagaggagcctgatgagtgttggagcagtctttctctcctgtggaaaccatctcgaggaggttaggtgacccatggagcaccatgtcttgggttggtcagctccaacttaccagtgtacccccagggacaccacggcccctcacgaaacctggccagaggacagcatagagcccagacgagtcggcggtagccctcccaccccacacacaagcacacacccgtgctgcttcgtgcctttgcaaagcttttatttcatgtctgcggcatggaatccacctgcacatggcatcttagctgtgaaggagaaagcagtgcacgagaaggaatgagtgggcggaaccaacggcctccacaagctgccttccagcagcctgccaaggccatggcagagagagactgcaaacaaacaaacacaagcaaacagagtctcttcacagctggagtctgaaagctcatagtggcatgtgtgaatctgacaaaattaaaagtgtgcatagtccattacatgcataaaacactaataataatcctgtttacacgtgactgcagcaggcaggtccagctccaccactgccctcctgccacatcacatcaagtgccatggtttagagggtttttcatatgtaattcttttattctgtaaaaggtaacaaaatatacagaacaaaactttccctttttaaaactaatgttacaaatctgtattatcacttgtatataaatagtatatagctgatcattaataaggtgtataagtacaatgtattctaaaactgttaagcaaaaaaaaaaaaaacaaaaaaaaaaatccaagtgtcctcctccaccactcacgctggtgatcactgtgctctctgccagctgcgtggagtgacgggaggagggaatcactgtgtgtgcgagagtgcttcagactcaatttccaaaataattttcacccctctaagcatgtaaatatacaaagatggatccttcatagaaattaaaaaatcaatttgagctcatttcgaatacagaacaagtatggcacagatggaagtcctgccacgtttcctttaatgatgctgactcttgtatcacacaggccagcatgaagtttcttactcagactttacaggcattttccgtaattcaatcagtcctgctcccagcacaacacaggaggtgattcgagaataatcgcgagaatcaggcctgcttggcactattacaactggggaaaacaaaccagggcgcct

SEQ ID NO: 1882460 - DNA, 4001 bp, Homo sapiens
gagctgtgatggcgccactgcactccagcctgagtgaagggcaagaccctgtctcaaacaaacaaacaaaaatcaaaggatgaagtcacgtagattttgggcaaattgttttccaaaatctgttagcataattctacagaatgtcaaaaagataaagacatccaccagtaaaccctaattgtttgatggttgtaagtagtcacttgagatgtgaccgcaataggggcctgcccatggggaaggtggcatacccacccatctcctgtgccaacatggcgtccctatctcctggtagccctgaggcgagggtcaggtgaaggaagttgggatcatcatttactcagtttgcctatctgtagaaagggggtatttgggctgaaggtggcctgtaactcacaggatgatctgtcccctcttcacactgcaccctgcagtgaggggagcaatgactgagtcaaccactgctttaggcagcgggggtccttgataaggagataagtttgccacactgggactgatggtcctcaagttcttttccagcaccgatattctaagattcggtgactccagaaaagcaataaggccgttgtgaggagggcagatccagaggatgatcttcctggaggggaggggaaaatgttcagtgcatacagtgggtaatggttcatctgaggtggcatcagactgtacaacaagcagggattgttctgcagggttcaggcgactgttagtatttgatcaagattggaatagtctcctaaaacctacttgatcctcacagaaaagttcctatccccattgtgcagatgtggaaactgaaggttagagatagaaagttagaccctagggtgaggcaatggatggctaggactagaacccaaggcaggctcctagggctcctgcttttccagcacgcatctaccatgcatatgtgctactaccaggcctggcgctaggattcacatcactttagaggctgcttggtgaacatgggcacccacaaaagccctggagaaggcaggttctttctcaggaatggccagtgggtgtgaagatcacagtgtgggagaaagatcaaggaggactgagggccacccgaccaggaatcatctccagcagcctgtgggtgaccgctcgtcatccagatcagcatcaggaaggttctgcacaacacctctagggaacacatggggatcgaggtcctgtggccgtcttggggtctgaagatctagatttagcttctggcagtatcatgatgcaaacctgggcaagttgttttgttccctggaccttggtctcttcatcagtgaaatggaactaattatattacctcatagggctattataaggcctaataaaaaaaaaaaagaaagcatccataaacaatgtttactgagcactagtagtgccaggcactcttcacttgtattaacccatttgatcttcacaaaaaatattttcttttttgtttgagacggagtctccctctgtcgcccaggctggagtgcagtggcgtgattttggctcactgcagcctccacctcccaggttcaagtgattctcctgcctccgcctcccgagtagctgggattacaggcgcccgccaccacacccggctaattttttgtatttttagtagagacagggtctcaccatgttagctaggatggtctcgatctcctgatttcatgatctgcctgcctcggcctcccaaagtgctgggattacaggcgtgagccaccgcacctagcccacaacaaattttagagagtaggtactattgctgtccccattttaggaaacacagaagttggttccagccacaaggaagtggcttcatccatcatcaagaagttgattccagcccacgtggatggctttgaggagttcaagactttagtggaggaagtgatgaaagatgtggtggaaatagcaagagaactaaaactggagtctggagatgtgacaggctccactttcagttctcttgctattcccacatgaccatggtccaggatcctgagtttatgttcaggaaataagactcagcgaaaacttgcagtcactttcataatcattaatgcagagattctcaataaattcttaaggctccaccacgctccaacataaagtaacacattcagtttgttacagaaatggtaataaggcaacactatgcaatactatgtgtacaatgcagcactttgcagtaccaaaatccatgcctacaaagcactgcacaagaacacatacaaataaaggatatagtagaatggctgcctgtggggtgggggcatggaaatgacaatggagtgaggggggaatacatgaagcaagaggtgactagtcaggaccaatgatgacagccagccatcacctggggaataggagggactcatcccactgcacctgaggactaaaaataaaatggaatggaaacaagaccctgggtgaaatcactcggcctgaaatacactggccctgggctcaaagaggaaaggtggggacacatcctgggctgcctcatcaaaccaggagcctgcaagagcatccctgtgtgtgtgtggagggggtgaggacaaagggagggtcaaccacacccagttctgtgagctcaaacaccagactaaaggccacaggcagaccctccaaggcctcagggaaggagtgaagagaaaggcctgggtggtcagtgtcagaggcggcacagtcacatgctgtcatgcctatttcaccaaggtttagccaaatgcactattagggtgtcaagaaaatatggatatagggcaacaatcctgtgattgtatgatgactgtaggcttgatcatcataagggtcctgccatatgctggtccagttggcacacccacccatctcctgtgccagtggagtgtgcctgtgaaacagcagtcagctcttctggtggccctgaggatcggggtgaaggaagagtggatcttcatttagttagtttgcccctctgcaggaggaggggagttggatacagacctctcctaacaacccgcctggctactggaaccttcctgagaaatgtggttaacctctgggcgcagagccagcagttctaggctcccgtcacaagggggcaggatggggaagaaaacaggttctcaattccaggccttggacctgtcaggtttgctggcaggggcaggaaggagggtggggtcgggagtgtgtggtggttgatgagggatccaaccatcgttccgcaagagcggcttgtttattaaacatgaaatgagggaaaagcctagtagctccattggattgggaagaatggcaaagagagacaggcgtcattttctagaaagcaatcttcacacctgttggtcctcacccattgaatgtcctcacccaatctccaacacagaaatgagtgactgtgtgtgcacatgcgtgtgcatgtgtgaaagtatgagtgtgaatgtgtctatatgggaacatatatgtgattgtatgtgtgtaactatgtgtgactggcagcgtggggagtgctggttggagtgtggtgtgatgtgagtatgcatgagtggctgtgtgtatgactgtggcgggaggcggaaggggagaagcagcaggctcaggtgtcgccagagaggctgggaggaaactataaacctgggcaatttcctcctcatcagcgagcctttcttgggcaataggggcagagctcaaagttcacagagatagtgcctgggaggcatgaggcaaggcggaagtactgcgaggaggggcagagggtctgacacttgaggggttctaatgggaaaggaaagacccacactgaattccacttagccccagaccctgggcccagcggtgccggcttccaaccataccaaccatttccaagtgttgccggcagaagttaacctctcttagcctcagtttccccacctgtaaaatggcagaagtaaccaagcttaccttcccggcagtgtgtgaggatgaaaagagctatgtacgtgatgcactta

SEQ ID NO: 1882461 - DNA, 4001 bp, Homo sapiens
gtcttaagagggctttataaacaatgaaggttttaattaaaacaaaaaaccattcaataaacgtgtttggggatatccgcctaagagttatgtgacccaggggacgtggtctgtgggttagatatgagtttaactaggtatgttttagagtcattgatagactctgattatcaagaaaggaaacatcctgccaagcccgtcctttccttacttccctatctccattgtccctaaggaggggggccggagagccagggatgaagtaggcaggtactggaaaattactatttttgttgccaagtatattatatacaaaaataggttaaccttttctgggagggcatggccctgacacatttccttctggtattctagaaatgtgtctttcctcttcttctggcagccttcagcaacttaagttttgaggatttgggcttctagaaaactctcttctgagattaaaacctggtggtgtcacctgctattacatgtcaactctaaccctatttttattccagtactctctgggaaactgtggtgaagatattttggccaggcagaatcactttattggcaattttttttaatgtgtaaatttactcctatatccctgggtccgtgtaattagcagcattgatgcacattattgtgagggccctggacagtttgagcaaagtttgaacttgaagtgagggcggaagtaagttccagaggccctgcctctgccctctgttttgttcacctcagggcagcctctgcaagtggaaaacaggcagcaacgaaggctgggagatagtcccgccattggtccgcgctgcagcttgttctggcagcgagtttagttcaggaaatttgctgagaatttgttttcacagcaagcctcatatttttgttgcaaattgtgtggcgtaagcttaccaaatgtttcctctgacaggacaagaaaagacctgcagcaccttgtagtgagaggctttgagggcctggcaagtctgaaatgtgctgtgttctgggttatgtgtgtgtccaccctgggattggggtcatggaaagcgcctaagggaggcctcagtgtccacctggacactggaaacatggacttctggaaaagctccagagcaggggcttttttctgttaccttttttggtcagaaaagatactctttttttctccagtagttttgttaacgtgaaaatttaggctggtaaagcaaaacaatattataagaatatctaaaatttaacatgcacgtaaaattagatttcatggaacattagccctagagactttagacaaatggttccgtactggggggatggttttgccccccaggggacatgtggcaatgtctggagacatttttagttgtcacaactggtggtgcgggcagcggtgctactggcattagtgggtagaggccaggatgctttgaaacagccttcagtgatgcacaggccagcccacgacgaaaaattatctggcccaaagtgttggtagtgccaaggccaagaaaccctgctttggttcctgggtgtagggacgtgtatgttcttaaacaagagcccctcccgcctgcattgtggtggatgatggctgccttttcattgagtgcgggctgtgtgccaagcgagttacctccatgcttttctttaatccttacaacttttgaggtacgtgtggttttttttttcttactttttcacctctccccaagttgtctgcagatgtgtgtttttatcttcattttacagatgaggaacccgaagcgtagagggttaagtaatttgcttgaggggacccagagtgggagatgatgggctcggattcaggcccaaggccatccccctcccagtgcctgctcaactccacagcatgtgctgagtccacacaccaggattcaaatccctgctccacttcccagctgtgcaacctgagcaagttacttcactgcctcctgcctcagtttccacacctgaaaactggggacaggaagggctgtgtggagcaggccaaattttgcgatgaagcatctgggtctgtgggttgcacagcggacagcgcagggccatttctttgccctcatacggagcagggcaacgagcagcacatcccgctttgatgccgagggtgaggagagggcaggagaccactgacagcgtgctgggcacagagtctggcacacagtgctcagtccccgcaagcggtcacttctgttacctgtttgatctgctcttcaggagctgggtctccacctttttcaggaacacactgtgtgaaaagcaagccatgcttgtgtcgggaaagcccagtgggtccaatctatgtcatcaagttttagacttcagtccctctctctttttgtcttccccttttgcagacaccttggaagagcttaaggaaatagataaaggcatgtggaagaaactgcaggagaagtttgcccccaagggtcctgaggaggatcataaggcctgagctcaggccttacctcgtgcacatacctaggtgtggagtcttgtacattgccatcgtcaataaaactgccccagtttccccttgaccttacggtttgggaatctcctctagctttcccagaaaggaagcccttgctgctctaaagaaagtttcagcctgagaagggatggtgattgagctatctgctgtgactgctgctcagggtagggaaatctcctggggagaggaaatgcaggtttccctctgggcctgatgagggtaatggggcctcggcacaaggtgcttcctgcattgccacgggagcccccgcccctctggcacgggtctggtgtctcctggcaagatactcaggctcccttttgttgtaggagctcctgggaggaagccaaaaatagcagtaaatactgaaaagggcatcctgttgcaaacagaaagcagtagggaggtgtgaggccgagagaggcaaaaagcctgcttggccctcatccccactgactcagagaaggatggaccttaggcctctatccctgaccttgcaaaaacccacattgcccagttggcttaagggacagggaagctatagacaggccttggccaagcggggcctcagctgcagttggcttcagcactgtgggcaggttctgtaggtggccacaagtcagaggccctgctggctgaggacacacacagggtcacctcattattccatggaaccttggctcttactgatattgagcatccttctctctggaaccgtgagggacagggctgggcccacagcggccctggtgggtacaaagtggaagtgggttcttaacctcgtctgtgtctagactcctcaggatgttctgaaatgcataaaataaaatcgacaggactgccgtagaaaccagttatgccgaaatgcagttctgggtaggcaaatctcaggggaggacccttgagacaggatgtcactcagcgtatctcctgagagcctgagaggccaggccagcagggaggggctcttgttcctgtcttctgccagtgtgtcctgttaatccccacagcccccgggggagtgcaggaaacacatccctttttaacggactagatttctattaatttatttaaggcaattaacatattagttctcaggccaaaggatttgtaaaacattacaccaaaaggagaaaaacaagcggtcatgaaacagccacgcaagcgcagctcagcccttgttgcctgggcgtacaactcttccccaggaagcctgggaagaggcaggtcctgggagcaagatcgtccatcatggagtcaccaggccacctggagccatgccgggggtggcatggacacgacagtgaggtctgcactggctacagcagatctgaggcacggagggagctgcacagccatgggcagggctgagcacagcacccttgaaataagttaaataacaaagccctaaaatcactagtaacagcataactgccacctcccccagaggccggcagccgccaaaatgtagtgcttggagttaaag

SEQ ID NO: 1882462 - DNA, 4001 bp, Homo sapiens
attttgtatttttagaagagacagggttttgccatgttggccaggctggtctcgaactcctggcttcaagcaatccacccacctcagccttccaaagtgctgggattacaggcatgagccacaaagcctggccttttgtcctcaataatttccttaatggtatctgggaactcgtcggctgcatctgggtcagcagaagctgcttctcctgttatcttgacattttttgaaagccaacccactttttaaaattatcataccttccttcatcttccttttgctttgtcagataatgacttcactttttcttgaatattagattatataggtatgcctttctcatagcaatcctgcacccacaaaaagctgcatttgcaatatgagataaaaaggtatttcccaaaaagtgcaaggttttcatgcttgttggtgtagctgcagcgatggcttcataaacttccttttgtttttataccacagtccttatactggattcatttatcttaaaatggcaggcgaccttagctgcagacctcaatctacaatacacagcaagcaattccgctttttctgtaatgtcattaacttttctctgattcttgggagcatttccagcaccactagcggcacttcgtaatggtcccatggtgttacgcaaggtttacagtactgcagtgaacacaacgagaaatatgtgagaacctcaagagcttaccttttactgtgatatgcaatgtactggagagatcaactgctcactcagagatgattatgttacttggaatttttagccaataccagcaacactgacgctcactgcaatagcaacaggaggtggctacaaaatcattacagtagtactctatgtactacagtgaatttgatgcagttattatttaatattgcatctttacaactgtttacacctctcttgaacctaatgggtgccatgtaactgtctgtttgtacgtgtaagttttgataaattttaactttttataacaggcttgtatatattttatgatagtaaataataaaatggcctagtatctacatatattttatgcattcatgacatatctagctttttcttttctttttttttccatatttcttggctaagcgactcatctgtgaggtttttcacaaaattgttgccatcgccaaaaatattccatttactgaaaaaaatccacatataagtgtactcacgcagttcaaactaatgttgttcaagagtcaactgtataaaaggtattaatatgtctggaaagagatatgtttccaatttaacagacactaccaatgagaagagttgggctaggcaggaaacttcaaattttccttttttactttatatattctatttgtatctcaacttataacctgtggaccacgtttattagaagaaaatgcagattcctgaaacttcctgcagaccccatgagtgacaatctcagggagatggagttccagaatctgctttttttcatagatgtttctttgccattcctgtgtatatctgagtttcagtagcactgctaatcaattgtttggggttctctctccttcaccagcatgttcttgcaaaactaaccaaacacatataaagcgcaaacagtacaatagtgcactgcaccttcatgacccttacctgttccagcctcttcctacctcttccacatgtgatatgtgtgtacatacccacagacagaaacacagagacatgtttggaagccagtgtggatgccctgtgatctgtgtgtacacatgacaagtgcatacacacgcacataaaggaacccagagacgtgtttggaagccagtgtggacaccctgtgatctgtgcgtacacatttgacacctgcgtacacactcacagacagaaacacagagatgtgtttggaagccagtgtggacatcctgtggtctgcgcgtacacatgtgacaggtacgtgcacgcccacatacaggaacacacagaggcctttggaagccagcatgggcagacaggccctatcccaaagcggccggcaggcgtctcctaagaatggttctcggacacacctctgaaaggaaaatacaactcggcaccgcagttgactcggccaaaggaaaaaaacttaagctgaaagctgaggcctgcccgaaggagcctttcctgtggcgcctgagccgagggcttcagggagagggccgcgcatcgcagcgcagccgcccgtcttcccgtggcttccctacggccgcggctcccgctgctcctttccgccggccacgcgggtcgcacgaccttcccctcccgcccaccctgaggcgctgaagccctcgacgccggcctcgggaaaggcgcggccaccgcccgtttcggattcccgtttccttcctccgggcgcgtccttcaccgtggccaaatcagcctctcaactgctggagcccggcctcggacacttctcggcttacgccgccatacagtggcgcaccccgaaaccccggaaccgacagctcggctggccttgcgcacccacactctccaaggcagggctcggtccgggggctggttttgccaaggcgaggggcgaggggcagcccaggcggccggatggataccaagagggcgcgtcagctccggcgggacggggcttccagggcccgggaggggtccaggactccccgccggcgcctggctgtcggcggagggccgcggggcaggagggagtggagactgcggccccagttcgggcagcgcggagcccacccaacgccctcctcggccctcggctcttcctggggccatcccgcccctgcacctcggcctggcacctttccggttagcctcggaggccgtggccgagcagggtgcgttcgcctggctggggggcctcagaacgttatttccgggtgacaacctgcagggccttccgcccctcgcgacctctcgggagtcccttccccggcgcccccccggggctgcaggggctgcaggttcggtctcggggcctccttaccgcagtccgcccggctttaggctagtgggctttaactacgtcgataatatgactccggcgatcttgtgcggcgatgggatgcggccgtgggcggtggagtccaggcggagtccgctctccacacgcgagggcgcctcctcctcaccgctcgccggcttcaaagctcgcgcctcaggcgacggcagccaacgggttgccggctggaggccccgccgacgccccgccccttgcgtgcccacccgcgccccgcagccccgcccccagcgccgaccctaagtttcggcgctcagtggtccggcgctccccaaggctcggtgtccagcgtcaaccccgaggtctctatgccccgcctcccgacgccagggggcagggccagcgcgctgcgcgtcggggcggggctttggctgcgtcggccgcgtagcccgcgcgcggagcgtaccctgctgcggccgttggccgttagcgcggcttcggcggttgtcttggagaagcaagatggcggcgacggcggccgcagtggtggccgaggaggacacggagctgcgggacctgctggtgcagacgctggagaacagcggggtcctgaaccgcatcaaggtgaggccggaggctggggccgggcctggcggatccgcagggcttgcgtggacagcgggcgtcacaacggtcgcggcgaggaggccgcctccctggcgagggaccggggccggcgggcactgggggcgcgccccggcatggcctccgtcctgcccgccccacagagggggtcggctcgttcgttcgtgtggtcccggagggcaccgcggactgggggtgcctggcccatcccctgcctcattccgtgggggcgggaccgcggggcttgggggccacacgggcggcccgcagctgggccctggagtgcggccccagcgtctcttcctcaggctcgggcatgatccgcggcgggaaagcagcgcgtccagccgaagcctgggggtcggagagcttgtgtga

SEQ ID NO: 1882463 - DNA, 4001 bp, Homo sapiens
taggaaatgctcattactgggttaagcacaaaaaagtcacattgcttgaaaagtgctatttgtaaaacagaatggcccactttgtctatgtgtaagaggatctgctgcacatttttacctggaataatattgtcatggatttggacatatgtggaagtgctatttgtgtttatgcagatcaacctcttggttttacagaagagagatgccagtcccagggaggttaaagtgcctgcccaaggccgtgtgctggagcagaaggggaggtgctgcctccagtcgagttagagcacttcccaccatccaccaccatcaggtcctgaagccaaatacagaagatagcatatatttttattactttgagatatcatcctgagcccaagaagaatttcttgttgctgtctcataaatatattactttgttatttattagtttaggcagtttatgactagcagtcaaatattcccaataaggttcgaatcaaaaatgttattttgtttttgtattataaaaagaaaagcaggctaggtgtggtggctcatgcctgtaatcccagaactttgggaggccaaggcgggcggatcacctgaagttaggagttcgaaactagcctggccaacatggtgaaaccctgtctctattaaaaataacaaaaaaaaaaaaaatagttgggcatggtggcaggcgcctgtaatcccagctactcaggaggctgaggaaggagaatctcttgaacccgggaggcagaggttgcagtgaggcaagatcaccacactgcacttcagcctcggtgacaagagtgaaactccatcaaagaaagaaagaaagaaaaagagagagagaaaaaaaagaaaagcatattttgaaaggtatcctcttaaatttgtggtgaccctcaaatatttatgctaaaacttaactttcagtatggaaacagaaacatgggttcaatttaaaatccatgactggatcatgagcagggcaaagtgagaggcattgtgagatagggccaaatgcttcgagaatttactccatacagactgtgttcaggaacccagcacttcctctgtgactcaataactggcacatatggttgccagggactaccaacagctgatttcaataaaagttacccaattacaccttgaagacctgttgtttctggagggagttggaggaattaaggaatgtggactgagtttttaaaatatatcttacagaagtcagaggaagatatagaaggacaggaatatactcaagatacaatattttcttctactgtactttttgttacatggaacagaattttagcattggatcccttcagctgtgacaaaggagaaggtccatggttataaagttttccattagactctcctcacacacaggaaatgaacttccataaatttaatgatatgactcttagggttttatttctcccattttataaccctctttaggatagaaacacatttcttgcactataaaaattttagtcagcaaatttttcatattctcactgggatttcataatcagtctgtacacccttcctatgcaataacttttgatcagtatagtgaaatataatggtattatgtaattttaagatgtacatcttaaagacaaaaaaatatccctttatttaattcaagataaataaatcagtgaggaaaatgtatggtgaaaagtttgggcatatattagttatctttcaatatatttttcatttttttctttttatttccttcaaccatatgatgcaatcaacggatatttgttgggtgctttgatgttttcagatctatgctatgcactacaagggtctcaaaaaggaatgaagaacaaagtccctgctctcaagaatgtagagttttccatacaaggttctaaaaaccattaaggtcacttaagatatcagtcagaaggtgaataggatgatgttcctggatgcaaattttagaaatgtggcatactaaaatcttcccctggaacttcaccattcacacctaagaagttaaagatgtctcagtaggttctcactatgttgtctaggcaggtctcaaacttctggcctcaagagatccctataccttggcctcccaacgtgtggaggttacaggcataagccactgcacctgacccattttctccttctgaaaactcttttggattttaggataccatgttctttggattcttccctgcttactctgaccttccttcttgaccctcactgtctcttcctcattcgcagggccacttctccttagcgaccccaacacaaccaagtctcaaaattggacatctgatatatgtgacaaagatatgttttcatttatataaaatgtgaatagaaacttacatacacacacacaaacatacaaacacacacacactcacagtgtctcagaagttctgcaacaaagaaatacagttattgtcattgaacccagaactccctaagtgtttttgacagagcaactttttcttgagacagatctataaaaatctcttgggatagtggtgttctatggaaaacagtctggggaatactgaattagagaaccgtgtgagacattttattattaacatgcaaactcaaagtactgaaagtgtagagaagagaaatatcattatgatctagacgggtgaagaaaagaatctcaaaggaggatagacttttaaagaaataagtgaaaaaaaaaacagaacatgtgatgaggagggggaaattcagattatatctcccaaattgatgatattgattatttgaaagaggaaggcaaaggtgtagacaatgattattagggactttgactttctaagttatacatttctatattgtttatgtacttgtttttacaaagttttacaaatgttttatgaagtggcttattcttataatccagagatattctcctaaaactaactaaagtttatttatcagattaactaatgatgtgtatagctcttacttccacaattatccatatatacatatatgcaatatttacaaacatagagatgtacaaatataatatctcggccaaaaataattgaagcatcaaagtcaacctacattgtaatcttgggcagcacctgttgtttattcatctctcaagtgtggctgacttcagggatgagaataaacaatgtgatctcttactaagcttccctttggactagtcatccaattggtatgtgatgactttatacctgaaactaaggagttgaggaataagctgaaaatagccaacttgggtttcctaagtacagtttggcttctgtaagaactgtttggttgctcctcaatttcagtgtattcattttttaaagtatatttattttaaaagtggcaaattcaggtattacttaataattaagaagcatttatgcccaaacacaatatatgtttacaaccaaatttgaaagtaattgaactgataaccctttagacaaaggagatgtgttataataaatattattgtcagctttccttcatcttaagattttttgaatcttggaagaagatatgcatgaactttgtgttgggtatttataaatgtatacacatatatacatagcaaaatgtaagcacaatacaggtataacatgtaaggttagaccatgtaaacttgctgaaattcagttgtttctgacctacaataatggcaatttcatatggttgaacctaatggtttgtctcagtcattagttagtggtgcctcctcccctaggtagagttttccaattgtgttgggatggtattttcactcttgtaacattcccaacttgtatcagaattcccttcatcttccctcctctacttttatattattctattccgtcatttttctcctagatacgactggacagattgtttacttatagcagtccctatatgttaatccatttctttggtcaacaaattctcaaacatcagaccttaaaggtcaaagaaaatccctgtgttgaattcagtaccatgtatacagaatt

SEQ ID NO: 1882464 - DNA, 4001 bp, Homo sapiens
gattagggttttcctaagtttggaattcctcggttacaacacagaccaactaactctgcgtagcactcacctaggtctacctgcatcactcccatgccacttgggggacaaggtggaaccaacgggagtgtgaagctcatgttgcctgctgtgctgtgagtaacagagccttttgcctctgacccagaagtctcatgtttctgacatttacagaactgtgtctagctagctagttaacttacaagtggggtctaaacatcccagaccctttgcagttcctgacatttcaaaagctacatcagcacagtcacttaatatcatggaaaaatgtaaggcactctttacttattctttggagttctgcttttacctcgaatctttttccttttcttttttcttccttctttattttgttatttttaattttcaggattgaatttaaacacctaatttttttattcaacatttaagacacacattttgctttaaagtctttcagtaatagtatttaaattgtttccttggcttttaaaaaggacaacttttcttaaatttgtcttttctaaagggtacttatttcagaaaaattttcttctgggtgggaatagtaattgcttctgagtcacagcaagcaacggactgaattttaaactctggagatcacattccagccgagcaatttcccaaagaaaagaaatctaaagtagtcccctaaatattaagcaagtgacagcaatgataagtaggggactgctttgaactgacgatggagagtgggcccactgtggtttaccaaatttagacttggtaaaatgagacctagcacggacaggcataggagaaaccagggtcagtcaatgggggcagccagggaagccccagctggcctctttcaagagatacaaccagagagagggtcttggaagtcatcaaggagtgagacatgagcagcttaaaatgctctggagatggcaagggaaaattacatcctgtgctttcagggctgcaggatgtgggttgacagaatcaagcatggaattttcctactcagaatgaggggacaagactggtgatcaaaggccagaaataaataaacgtcccaaagcagctcagactcatgacgcatatggcacagtgaaatccaattgatttcacccaagtggtaagaaaatttaaggaaacaatgaagcgatgaaagcatgcctaattcaggaaaacctggtggatcttagatggccctcttgaattgcctgtgttaaaacttcactaaatataattaactaaataattatttaagtatgcaagcattctatatatttaaggaatttaatgttttttgtttttgtcttttttttttttttttttttttttgagacagagtttttgctttgttgcccaggttggagtgcagtggagccatctcggctcattgaaacttccgcctcccagattcaagtgattctcgtgcctcatctcccgagtagctgggattacaggcgtgcacaccacaccacacctggctaatttttgcatttttagtagagacggggtttagccatgttggccaggctggttgtgaactcctggcctcaagtaatcacccccctcggcctcccaaactgctgggattacaggcacgtgccacctcacctggcttaatgtacatttaagggattaaagttatagattacaaaaacactcttactgtcaaggcgtcctaattcagaaatcatcacattatatttcttcctaaaggtattagagtaaaacaaaactgtagaaatgatgagcttttattaattctttgaaatgaaatgttaaataacgctattctatcacacgatttctacctgtttttaaaagcacatggcctttgagatctattttggataatgctagatgcttaacctcttttttttttgagagggagtctcgctctgtcacccaggctggagtgcagtggcgtgatctcggctcactgcaagctccgcctcctgggttcacgccattctcctgcttcagcctcccgagtagctgggactacaggcgcccgccaccacgcccagctagtttttgtatttttagtagagacgggttttcaccgtgttagccaggatggtctccatctcctgacctcatgatccaccctcctcggccctcaaagtgctgggattacaggcatgagccaccgagcccggccgatgcttaacctttttatttgaggaaatagtcacaatggattattgatatttaaatggcttttcttaatgctaattggaaagagtaaccatgagaatcctgcttaaaattttactttattttattgttttagagacagggtctcattctattgcccaggctagagtgcagtggcacaatcatggctcactgcagtctcgaattcctgggctcaaggcatccaccttagcctctgggatagctaagtgtgaaccaccttgcccagctaatttttacattttttatagagatgggatattgctatgttgcccagactggtctcaaatgcctgggttcaaatgattttcctgtctcggcctcccaaagtgctgggatttcaggcatgaaccacctcacctggtcctgcttaagattttaattctcatgttaacagaatgttggctactccaccaaaaaagcttgctctccagaagaaaagtaaactaaataagtgggtgagtgggaaggtacgaagttgtatggaatctgcctcatatgccagctatttatttcctcattaaatgtttaatgcaagagaggtacttattacctgtccttacaaagcttactttctggttgggggagactgacaaccaacacatcaaataatgtatcaagtggtgttaagtgccatggaggaatacagagcaggagaaggggagtaaagaagcctgggcatggggtgaggacgttgtcagagtcagatatttcaaaaacatgcttctgataataatgtccctttgctcaaatccttcaaagctatctcattacttcagcactaagaccacacttctaaacctaatgtaccccactgtgcatagtttgacccttgacaaactctctaccctcaactccttccatgtgtgcagacacactcttcatttctgccatatttagttccacagacccccaggttacatcatcctttcatgcatcttcttgtttattgacctgtaaatacctatcctttgctccccaattgtccgatctaataaagtttcttcttatcatttaagactctgacctagcatcatcttttcttagaagtgcttttaatccattttatctagtaccataggtcagtttcaattcctcctcttttcatggctctgcaaatggcttcccccaagttatgccacctactcagaattccacaacactgttctctgtgcttctgtctgttctagcacctttcacattgtgttacttatgtaagaaagtttggaattaggttagcataaacaaataaatatcatttaattttaataattctaactgattcttctgactgcagcgtgaattgctcaaggacagggtttgagtatgtttgcttttatactccctacatggacaccatccttggtgcttggtatacatctcacaaatgtttgtttaatcaatccgttttgtatgtaaacattctaactgagctttaaatctttcctgttttagtgacaaggatcttccgtagtaattttctacacaatagtattaagatgtagtcacatgaataaatccatgcctaattttttttctattatagatgccatatcatattctgaggacataatgtcatctaatgcttactgaattcatactaggtgccaagcactgttctctgcactttaaataagtaacaacttatttactcctaatgacaaccctggaaatggaatgggtattatcagtttccttatcttgcttgagtacaaaatggttaaataaattgctaaaagttagtcatataactaggtttcaaaccc

SEQ ID NO: 1882465 - DNA, 4001 bp, Homo sapiens
ctcagttcccatgtctataaaatagggataataatagcacctacttcaaaggtggttctgagggttaaatgagttaaaaatataaaatgcttagaacaggatgataatgaccatctcacttaattagtgtattaagaagtgcttcatacttgaaaaatgccttgcaaatgctattgatgtgttatttttgctgtatctttcctctcccctgacttcatcagaggcagcaaaccagcaaagtgtgggtgagggagaaagaggttagacctaaggggaatttcctggcaggaaggatcagtcacatccctcctgcacaggagccccaaaacttgaagatgctgcagctggtgacatgtgggctggggagatgggtggcagggctgtagcatgcagacagtgacaagctctctaggacaatgagaatgaatgaactgtgactacccgagccacagagatgagtcacacaaacacctccaggctggctgaaagaagccagatacgaaagaatgcgtacatgggactctatttttttttttttttttcgctctgtctcccaggctggagttcaatggtgcaatctcggctcactgcaacctccgcctcctgggttcaagcgattctcctgcctcagcctcacgagtagctgggactacaggtgcgtgccaccacacctggctaatttttgtatttttagtagagacggggtttcactgtgttggtgaggctggtctcaaactcctgacctcgtgatccacccaccttggccccctaaagtgttgggattacaggcatgagccaccgcatcctgcaggactctatttatataaagttcagaaacagggaaaactgaagcacgttgttgagggaacacacagagaaaggtaggaagcgactgcctgggacctctggggaagagaaggtcaacgggaagggatccgcaagctgctgggtgctggtgaggttctggtctgtgactgaggtggtggctactctgctttgaaataatgtgttaatgaaacatttgtttcatgcccttttctggacgtgagatttattccacaatgctaaaaggttacaggagagggaagagggtcacgcttgggaagcacctaaagctcactttcttcctggaaggcacctgaagttctaccttcttctagagaagggcctccagggaagaggtggaagccgacctttccgtgcccccaaagttagaaaatgaagctagacagcggggcagcctgcgtgatgccggcctgagtcagactcattaagattccttctcaatctaccctggggtccacagggcaaagagaaacctgtgaaccatgcaggcaactgggttgagagagaaagattggcagggaggggggagagaggtggaggtggggaggaagacaggtggggtggcggggagatggaatggggaagagagagggggagagaggctgaggaccccaggccagtgcgccaggtctggattctttagccagtccattctaatgacagctcttcagtgcgcccctccctgcttccccccaggagcaaggataattactggagataatgatcacttagggggcagggggcacttttcattaaccccagacctggtatccaactgcccttcccgaggagtctgcccctcaccccatcctgcagggcccactcctgctagcccccaccttgggccgtgccactggcaagtccctgtgcctgtcttcaccttaattcctgggtgagtgacatttaagggcaagctcttcattgggccataacaatttacaagccaggcagtggtgggttgttctgaggcccgcggggagcggtggccctttatcatctgccggggcgagggggccaagtgatgcatggctcctcattaaagccccaccaacaacaccggggaagtaaaacattttagcaacccattcacttttcatttcccaagccaccctccgtgtcaggaaagccactcctgacttagggcagctgggaagcacagaggcctttacgtgtcttatttatatcttcccgtccctccctcggggcactgtctagggcaggaagccagcagggcttcacgccgccatccccttcatgctccctgagctgctccccatctcgcccctgagaacaggcaacccagaaccatctcttgctggggtttacaaagtgctttcattcacccaccgcatcttcactgagctcctcaatcgctcaaggtctgtcagtagtaagtgcagaggctggatttgaacttgggtatctggggcacatttaaagccagaccttcccacaaagaggtgagaccaagcagggggagctcaggggaggtgacctagggttggccctgaagccagcaggggtgtggaacggggatgcccagtggccctccctgggagacaagtcatttttgcaggagaaggtggggtgggtggggagacggagtcaccgttctttctcatctcaagcttcactactgtgaggctctgagattttctctttccatttgtgcctctctctggcttgtcctctctcccctgtcttttctttctctccctcaccacgcccctacttcctcctttttgtctgtctccatctctcgggcattttctagagaaacaacccggtgagctgggaagagaaagtgacgtggccttggcctgcgagcacccagcttcacagccagctgtgccaccgccggctgagtctggacatctctgagcttcttccgtttctcacgtgtaaaatgggtctaggcctggcgtggtggctcacgcctgtaatctcagcactctcaaatgagtatgggaccctggaaagtcctggaagtctccttcttctcgagaacttttaacatcaagaaaagccctggctgggcgcggtggctcacacctgtaatcccagcacttagggaggccgaggcgggtggatcacgtggtcaagagatcgagaccatcctggctaacatggtgaaaccccgtctctactaacaatacaaaaattagctgggtgtggtggcgagtgcctgtaatcccagctactcgggaggctgacgcaggagaatcgcttgaacccgggaggcggaggttgcagtaaactgagactgtgccactgcactccagcctcggtgacaagagcgaaactctatccccaaaaacataaaacataaaaaatagctgtctttcattttcaacagtggctgcaaagatgagaagcccagcccagaagaggtatacagtggatgctggtaccggaggcagacctggcccacagtccgttacaaatccaggctcctctttcctcggtgtggagtgtctggctgagaagtagctgcccagccaggaaccccatttttcagaaccctttgtgtatatgtggggccgaatttctagttctcccctatggactctgtgcaaggcgtggtgtgctgctttcagatggaaggatgaagaattggtctttccctgtctggcggctgcacaaggagaagtcagaggtcttcaagggggcagagccagaggagggagggagccaggggaggccaccctgacagcagtgctggcgctggactgtgactgagcaggaaatgaactttcacaggctgagccactgagatggggctagcctcttacagcagtggctttacctcttcttttttccatccctccctggcaactgtcttgatccccgtccggctgtccaggcctcatgatctggagggagggcgtcccgttccctctgacctaggcccttgccctgactccacggtgggccagatgcgaccatcttggccatcaggctcagggcagactggggccttctttccaggtgccaagcgcagtccccacctcagtggatgctgacaggacgctctggtggcccaggaggtcttgcttagtcatacgatcctctgtggattagtgtatggggacccaagccacatgggactttagaaatccccctttccctcaggagcacccggggaaagagaagct

SEQ ID NO: 1882466 - DNA, 4001 bp, Homo sapiens
atacatatacatgttttgggataagtgattaacttttttatttatcaactgtcaaacaaatttgaaaaccactgtattagtcttttctcacactgctataaagaaatatctgagactgggtaatttataaacaaaagaggtttaattgattcacagttctgcatgtctggggaggcctgaggaaacttacaatcatggcagaagaggaagcaggcacgtcttacatggcagcaggagagagaagtgaagggggaagagccccttataaaaccatcagatcttgtgagaactcactcactaacatgagaacagcatgggggaaaatgcccccatgatccaatcacctcccaccaggtccctctctcaacacttggggattacaatttaagatgagatttgggtgagggcacaaagccaaaccaaatcaaccactctcttagactatgacattcttgaggaaagcaacatgttttatttttgtgtgtgtgtctttgcatccagcatggtgctggtgtgcttgttatgcagtatcatgggacacaaaaaaagtttgtgaaatgaaatataacccatagttttcatgctgagaaagcctggggtgtaacagtaaaagatcagtatcatatttccttgacttcatttctacctgaactattatagaaccttctcttcactttctgccaggttaatttaagaggtggtccccagggcatgttccttaggccttccaaacactgttctgctcctgagctgcctttgaagatttgttgatgcctctgctacctcttctggttccaacagggaccattcaggagtgcccccaaatccacttcctgtctcctgcatagccagttcttacagagcctttcctggtgtgcttctatttatacctgctaggggcctcagctttggctgcatgcctatagaggcatcctgaggaacccattccctgctatgcacaacattccttctccccttggaaagtaacattgaccttggatcaagcttgtagatggagcacagcttcttcttgttggacaattcctctccaggacgtttctttgaccaccctacacacagagttggcctcttgcttccacccatcccccttgcatttctgtttgccatccaggcttgtctggactggacccaaactcaattggtttcggaggatagatggataataaacagtgatgctggcagagtagttgtgtatgaaacccctgagaactaaaaattcttctttttttctaaattgaaacatgaaactctcttggtgtagcttttgtttttccccttaggtacagagaagaatttctctgcaataacaaaaaaacatagtgcaaacatagtaataaacacatggcaattgactcttagggctaaagaggtaatagtgagtaataaggattgtggtaaactagctagtaaatgctccatctaaatggataagctactacccaactccagctaaatgtagctatgcaggactaaaggtcaagtggtgccaaatattctgactttttcaacaaaatctaaatggattatttgtgaaatctgatataaaaatgtctcattaagcacacacacactgaaaccatgtctgcaaagaaggtttggtcagttgggcatcattttgtaatccacaagtctaaactctcaagcagggaccctgctggaaaatgaatgataatgtggcatataatcctttcatggaaataattacagttaatattatttttatccaactaagacaagtatttctagtttaactttgagaaggcagagttgctggttgaaataggtagatatactggggctggggcttctttgcaattttctggacttagtcctactttgtcctagagcattttttctccatgtttggtcttgggactaacagcatcagcatcacctagaaacttgtgagaaatgcaaattctcaggccccaccccagtctcacaaattcagaaactggaggtggtgaccaataatctattaacaagctctccaggggattctgaggtacactgaagcttgagcaccactgccctaggcttttagagggagcttttccacttgcagtatgctcctggagccctgcaggctggtatagtcttggtactcctgctcctccaccctcaacaccaggttttagaagcaaagatatgcctgatatgtgaaccgtgggttcagcttggctttccaagaaagtaatattggactgagactcaaacaaggaggctggcacttagcaaagaaaaggggatttgagaattaagtatgttgagagggaagaggaggaaaaagatatgtctgctgtgttcttcttcccctccttctgccagggcttatttcacaaagaagaataagctagcgatatgatttaaagaaagaccttcctcactcttccttcaacccaccctctttaaaaatggctacttctattttaatttcaatcaaaaatcctctagtgttaacaaacaaagacagtgaggaatatacagttacagtagtcatgctgccatgtgatttaaatttaaccaacttgatttctcaacaccattctgtaattctggaagagtgagagttcaaaaggatatgaggggtcatgtttgggcttggggcacatttcaaggaagtgagggatagagaggcctcttcaaaagcagaatatcactgggatttcattttaaaattttagagaaagcatagaagaggagcatggaagggaaaatgagaaatgtgtctaaagtaaggaggttaggtggggcagagagagacgcaatcgatagttttggggcagagtactcctgtaccattccctcttaatgagaggtcctcaccagcctcctctgagaggagctgtacagtcatttcattgttggaaagactgaatgaactctggctgcctccaggccccatatgagtcttcttgcttttctttttcaaaattagaaaaagaagaatagtgatgagacttaaaggaaaatttctttgcatgcatagcctgaaagtcctatagtactttatagtttataaaactgtaaccagtattatatttcaaagttaagatacatgtaaaagtcaggggcacaaggctaatgattgattttttatgactgaattcaactttgctctttacttacctgtcctatactccttccttgtaatccttgccagaggtagagaacttaatctatatattttccagtaaaattttatctggtgattattttgttgttattacattcatgtataagtcaatcctagaccaaatcaaaattccattatcgtctttcctttgccttctcccaagctctcctcctttatatcttggggtatcacacaaacactgaacatcagtgttggggagtgggagggaagtttgctagcatggtagtctggtggaagtaatgggggaaacacatccagtatctagtttagactggtttccctgctgccatcgggactggttacataatttggagggtcccgtgcaaaatgaaaatgtggggctgcttgttcaaaaataagaatttcaagatagctacagcagagcattaaactgagtgcagggccctgtgtaactgtaatgggtcacatgcctgtgaagcccatcctgcctgtatcctctgttgtcgtctctcagcttggcctctgttgaagtagtgcccatggttctttcttgtaaaatgcccctatctctactgctgtcttggaatcccaccataattcacacaaaggctgcagagtccttcaagtgtagctgtgccttccatttcagccccagtttgggtgactgcttgaagccatctgccttggtgactctcctgttagcatgtcagctgcctctccaagctaccttccacttttgctgggcacgtggccacttctgtatctcctctgtatacttagtgggcattcatcgctatcacctcctttctacagtcacatatggctagaactgtatttcctgtctgcatatcccatggcatgg

SEQ ID NO: 1882467 - DNA, 4001 bp, Homo sapiens
agggctgatgaggaagtttaaagcagaactggtagagtgcttgatgtgtttgagaaacaaatcgttgcatgtgatttagatgtgatgaatggagagtgactgaaggttggaggtagaggtaagggccaggttacacaaagcctcatagaccaggatatgatggctgtcctttatcataacctcagtgtgagaccctgtaggggctctgaacagaggggtgacatgacaccattcacatgttagaaaaatctttttactgctaggtgagtatgggttggacataggaaagagtggaagcagagactgtttaggagccagtgcacttgcagtagtaaggacaggaaagtctacaacctggatggagatggatagcagtggacaggttctataaatggaatttgagggtagaattatcaggtatggctgaaagatggaatatgcggcagtgaggggaggagggagccaatgatgactcctaggtttctagaatgagtgactgtgtgcccttcactcttcccttatttctctatagtcttttggatataatatcattatttctgttactccagctgtcactctattcacagctattctccagctcgaacctcccttctgagtttcagacccatatttccaactgcctgctgcacatcaaatgcaatatccccttcttcatcacccccgtgctcaaaaactatgaatgcttcctaattgatgaagaaattgagagcaaagatccatgtctggtactcaaaatcctctgccacatagacaccagctcattttaggagcactgtccacagaagtggcatgacattgtgggaaagaatatgcagaaggggatgggtagcatccgcttgggttggacatgagcacattgaatatggggctgtgcctggattatccaaggaaatgaagagctgctcctctttaagaaggcttttcacaaaaatactgttcatcttagaatcagacgcatcccagtttataataggtgtctgaaggaaagtctagtggaaattggctgcttttgtctgcccaacacccctctgtcccttaagatggaaatgtgccagtcatagtttctgtctctctttccttaatggcagttccatggcataagcatgtgacccagcagggccacacaaaggcccgccagaggtgtgcatatggaccctgggagaggaagtgttgttgcccctccccagagatgtggagcataaggacctgcagtaaggagcctggagctgctggtgaccaccttgcccttcacatggcgagtaccagcttgagtatgagaccagcaaagaggaaaatgaagctgagagagtgtcagggaccccagatttggcagtcacactaggcaaatagtgactataagaatggtggcttggagggaaatgtgaaacattccagcccactgtcctcatcacaaggagtcaatgtttcatttcccctaaacctgctccttgcctttgtggtgctccttgtccactgctatccaccccagccctgggcctccactcaagccagggtaggggccactgaggtttccttacctcccacctcacaggcaggcatccatgtaggcagcagtcctggtttctctctggccattccatgcatccctaccacactagggctttgagaagcatgcatgactactccactacctctgccccctcaatcaccaaactgcgcccaccctgggttcccagtggattacttcaatcctaaacagaactaattatctaaacattttgagaattgttcaagacaaaatatggcaccagtataccacagagttggatacaaaacataaccttatttattggagatcagaagcaggagcattgaaacacacacacacatactcctactacacacacatacacgcagcacaaaactctgaattagtaaggtttggatacatgcaataaagtatgtcctttcagctgtggacatactttattgcatctatccaaaccttactaaggttcctgatttttaataaacttataatagattgaagcaatttttatttgctgttcctgatttttaataaacttataaaataatagattgaagcaatttttatttgcattcgattccacatttggggccagattctctttgtgccttcttctttgagtgaacatcgaatgtctttggatgagcactgggctctgtcaggccattacagttactgttttagaatactaaatgtgacactagtgacctagtggcattaatgcacctttcaaaagtgcccagttttctccttggaagtaatttcagcagtgataggctacaactgagtaatttctgataagcaattagcacatatcaaatcaatgcacattactcaaggttttatactgctagtggagatatagcaggggttacccattaaaaagcatctgtgaaaaacttctgctgttattatggaagcagtgggcaatattcaaatcgaggcaactcaaccattaaataaatgtatttttaatcatgaaatgtcactgttctacagacctgtttttcctattaacatgtgggagataatgttaatgagatttagttagtgttttaaaagcaattgaagtcttattatgaaaggcagcagaaaaggacacagcaatattcttctaagctgtgaatcactccatatctgtgtgaaatcgaatagtgtagaaatctacatgggaatcatctaagcaacaaaaacatagaagactcccaaacactcctactctatatcatttttcatacctaaaatgaaataagaaagcacactacggttggaaattttaatggggggaaggcccccatgttgatatttcagaaaacagttcattcttgaagtatgaatgtatttgaggtatcagtcattgtgtttacccatcaatagtgactctaaagaaagagtatcctatgcacagcagatgctgaacgtgaaggcctgggtgaccatgatttgttccttgggacacccctcccctctcgccacccacctcaagctggtaaattgattggaccagggttgggccaaggcagccaatccatgcccggcctgtgttaaatcataagtggagccaatcagatttttcctcacatgcatttgaactaagatctaataaataagaaaataggagttgaagctaaaaggacagatatagaatggtcatgaagagtcatatctttaaaaagggacacatttgtttttaaaagttttagaaaacagaaattatgaacataaagggatatcttggctggaccccaagccaatgctcgaattggcttgtctgtgaggtggaagaagccctagagatcctctgtacattcacagaacatgcaagggccatgcaataagaatccagccacattcctcagttttcctgggtttgcacacaccagcatgtctgtttgacaggccagagaaggagagaaggaaagtgacacgggctaaattgcagggagcaactaacccctggaaggaaaacccccaaaacaatgaagaaatccagtagggtggactagaagaagggcttgggtgtgggatgagaagagtggctttgaatacagtctgaagcgccatctgaaatccagactttccttcacaatctccactcccagggaggagtggtgtcatccaaccaaaagaactcacacacacatacacacagcacaccaccccacaaaactccaaattagtaaggtttggatagacacaatagagtgtgcctctattgtgcttcccatgcttcccatgggaatcatcgtcccccacatcacctagaccagaggaggctagcagaagcagccatttccttaggagggagatgcccgcaagtgagcgaacagaggtcctggggtgtattagaggtcagggttggccagcacctctgtggagcagcatgggccgtgctatcaagcaacatgaacgagggctggagtggcagccagaacagccatggcagagccacagaagctaacagagccat

SEQ ID NO: 1882468 - DNA, 4001 bp, Homo sapiens
taaaataaaattcatggaggtttgtggttttttacttcttttggttgtgattgtatgcatatatataaataaatatacatataacattcaaagactttacagtttattgaaaatcagagggataaaacagaggcaatacaacaatgcagcgtaattagaattatagaatatagagcttacaaataacttaaggctccatctggtcattatctatagtaacatttccagagaactgaaatcaaagtagatgtaactacacaatggtaaaactgttccagtgcatgtcataggataaatactccagaaaactttaatgaacaaatgaattgttcactacctacttagcaaataaattcagatctcctctaagtcttaagcttcattttttttcctcaaatgaatatattttttaaatatttaagatccattcaatttactttggattgtgtaactgttgggaaatgacctaagttgatatttcctgtgtaaaacagtaacactctcatttttatttggatctaccttgagccataaataatattggaatctggagaaatcctgaatgacttagcattttacaacttttttgtttttctcttaattgaactagaacatgaaaaagtgccaaggagtgtatataaaagaaagaattatcactcttacgatttctggagattgacttcttagttttaagagaattttgaattttctacatttattttgataatcttacacccatatatatgagcataccaaagattgtttgtatgaccaatttatacccatgtcccactgctttactgaagtcctggagtttgcatttgcattggccccaagtaaaggacaaattacatcatggcaagctgtacaaataaagcttttacagccatttacataaggcatagtaggggggaaattgtcaccaaatagcacatggtctttcaactctgaagaactcaacagaacctgtactgtagcagtcagtgtcataattatttcactggcagatgtgttgtatagatttaattttgaacaagtaatgatgatactaaatatataataaaggacttcatactccaaaatttttttgccttttatgaatatgattgaattgattggatcttcaaaataattccctgatagttaaaattttgagttttttaaaggcaaaaataaaggcaacgataactactataatttaaataagggtcaaaataagaatgacaaaagtgagaaagtattgcttcatagttttaatttcattggtaattgtatttttttataaaaattataatctatggcatattaaattaatgttgttaatttgaattttagtgatttggtaggaagctttagtattttatttgaaaatgaaatttaatagatttcagagctataagtaaaataagtttatatcttattttacataaaaattttattttatacaattatatcaaaacatatataagttttgttggtatgtttttagctgatattataaaaattgatacttagaattaaagtgtacttatcattaattattttttagctgaaaatggtccatagattaaggaagttgaaaaaacactgggagagtcctcattatggttgctttaaatgtagaccgacatttgctcttttgtgtttcctgctgtttcttttttttttcataattagtagcaataaaatgccataaatatttttaacaatgtgtatgttcatttcagggttaaaagagaaaagtagagtaaataatacttccttcttttttgcaagaggtttaaggggacctatttagtggcacaggtagtatccatagaagcgaaataagcaagttatatgctattgaaactaaaaacaaaccaaacaagagatacatgccccacttgtgacggaaatatgcttgtgggaatgcaatcaatgaaaagctctcatgtgtcccctggtcagactacttgaggttccatagtaaacctcaaatagcgtgccaggggacacatgagagcttgggctagaccagagcagggctgtctaagaaacgaacttgacaaattcaactgtaacatcctttgtaggcagcactaccaaccgtggtacctcctggacatctctccagcataaggagcaaggcaagccctcttttctcaaggcttttattctctcagccacgccttcacccccattcccttcccaaccccacacacatagaacaaaacttaaaagaacaaaaattgcatcctcttctagaaatggtaaaactagagaattttttctggatgcagtttgttaaattcaacatattttgctagataacgattttacctctttaattaacacagataaatgatctattactattgctttcttctaggcttgtgccatatgtgtaatattagacactatatctaataacaataaaatgtcggaagggttgcatgtttgtcttgctattagagattttgtctaatattacatacatatatatgtgtgtatgtaattatatatagagagaatatatatttatatagataacatatatctatagagatatatagagaacatatatctctatatctatagagatatgtagagaacatatatctctatatcgatagagatatgtagagaacatatatctctatatcgatagagatatgtagagaacatatatctctatatcgatagagatatgtagagaacatatatctctatatcgatagagatatgtagagaacatatatctctatatcgatagagatatgtagagaacatatatctctatatcgatagagatatgtagagaacatatatctctatatcgatagagatatgtagagaacatatatctctatatcgatagagatatgtagagaacatatatctctatatcgatagagatatgtagagaacatatatctctatatcgatagagatatgtagagaacatatatctctatatcgatagagatatgtagagaacatatatctctatatcgatagagatatgtagagaacatatagctctatatcgatagagatatgtagagaacatatagctctatatcgatagagatatgtagagaacatatagctctatatcgatagagatatgtagagaacatatagctctatatcgatagagatatgtagagaacatatagctctatatcgatagagatatgtagagaacatatagctctatatcgatagagatatgtagagaacatatagctctatatcgatagagatatgtagagaacatatagctctatatctatagagatatgtagagaacatatagctctatatctatagagatatgtagagaacatatagctctatatctatagagatatgtagagaacatatagctctatatctatagagatatgtagagaacatatagctctatatctatagagatatgtagagaacatatagctctatatctatagagatatgtagagaacatatagctctatatctatagagatatgtagagaacatatatctctatatctatagagatatgtagagaacatatatctctatatctatagagatatgtagagaacatatatctctatatctatagagatatgtagagaacatatatctctatatctatagagatatgtagagaacatatatctctatatctatagagatatgtagagaacatatatctctatatctatagagatatgtagagaacatatatctctatatctatagagatatgtagagaacatatatctctatatctatagagatatgtagagaacatatatctctatagatatagagatatgtagagaacatatatctctatagatatagagatatgtagagaacatatatctctatagatatagagatatgtagagaacatatatctctatagatatagagatatgtagagaacatatatctctatagatatagagttatgtagagaacatatatctctatagatatagagatatgtagagaacatatat

SEQ ID NO: 1882469 - DNA, 4001 bp, Homo sapiens
gcgcgggcaggcagcggcgaacggcgggcgccccccgggccgcggccggcgcccggagcccgggacctggaggcgggggcgcgcggcgcggcggcggcggcggcggcaccgggacccatgctggggggcggcggcgacggcggcggcggcctgaacagtgtgcaccaccaccccctgctcccccgtcacgaactcaacatggcccataacgcgggcgccgcggccgccgccggcacccacagcgccaagagcggcggctccgaggcggctctcaaggagggtggaagcgccgccgcgctgtcctcctcctcctcctcctccgcggcggcagcggcggcatcctcttcctcctcgtcgggcccgggctcggccatggagacggggctgctccccaaccacaaactgaaaaccgttggcgaagcccccgccgcgccgccccaccagcagcaccaccaccaccaccatgcccaccaccaccaccaccatgcccaccacctccaccaccaccacgcactacagcagcagctaaaccagttccagcagcagcagcagcagcagcaacagcagcagcagcagcagcagcaacagcaacatcccatttccaacaacaacagcttgggcggcgcgggcggcggcgcgcctcagcccggccccgacatggagcagccgcaacatggaggcgccaaggacagtgctgcgggcggccaggccgaccccccgggcccgccgctgctgagcaagccgggcgacgaggacgacgcgccgcccaagatgggggagccggcgggcggccgctacgagcacccgggcttgggcgccctgggcacgcagcagccgccggtcgccgtgcccgggggcggcggcggcccggcggccgtcccggagtttaataattactatggcagcgctgcccctgcgagcggcggccccggcggccgcgctgggccttgctttgatcaacatggcggacaacaaagccccgggatggggatgatgcactccgcctccgccgccgccgccggggcccccggcagcatggaccccctgcagaactcccacgaagggtaccccaacagccagtgcaaccattatccgggctacagccggcccggcgcgggcggcggcggcggcggcggcggcggaggaggaggaggcagcggaggaggaggaggaggaggaggagcaggagcaggaggagcaggagcgggagctgtggcggcggcggccgcggcggcggcggcagcagcaggaggcggcggcggcggcggctatgggggctcgtccgcggggtacggggtgctgagctccccccggcagcagggcggcggcatgatgatgggccccgggggcggcggggccgcgagcctcagcaaggcggccgccggctcggcggcggggggcttccagcgcttcgccggccagaaccagcacccgtcgggggccaccccgaccctcaatcagctgctcacctcgcccagccccatgatgcggagctacggcggcagctaccccgagtacagcagccccagcgcgccgccgccgccgccgtcgcagccccagtcccaggcggcggcggcgggggcggcggcgggcggccagcaggcggccgcgggcatgggcttgggcaaggacatgggcgcccagtacgccgctgccagcccggcctgggcggccgcgcaacaaaggagtcacccggcgatgagccccggcacccccggaccgaccatgggcagatcccaggtaaccctcgcgccagccgggcctgcttccgcccggcggcctcgccgcgccgcgagcctgagtttctttctttgccgcgtacttttccccgtcttcccgcgggggcggcgggggcgcggcgcccaaagccatcttgacgggcggccgcctcccgccgcggtcggggcgccccgggggccggcgcgctgtccaggcctgggagggcttcgccgggccgggccgggccgggtggcttctaccccgccggcccgcacccgcgtcccccccctcccccaggcccgggaacgcgaagcgagatcccgaggcgccacccgcgcggtcgccgtttggggcggcggggaccgttcgggtgcttttgtaacaaataggctctcccggccaggacggctggggcgaagagccacccgatcggttctgggagcgcccacaatgtgctttaacgggggaaagaatgaggaactttctcacacctttagccacagcacgttccctcttggcttccgaggtccaggcagggaaaataggttagctttgtgacaagcgagtgggtttttcctacttagggagagccattcagagacactcggtgcgggcttcgagctcgaacgtttgctggtaggaataataacaaaatttacaacgacatggaggtgcaatattgtaaaatacatcgattcgttccttagaatagccagggaaatccattattgggcttacgggctgcttgcagggagtcaccttcaacaggcaggctatgtgaaaggagcacgttccggatcaattgaacttattttgatcatggattaggcatgcattttattcagcaaatccagtaagatagcagaccagtgaaaattgatcttttgggatcgtatttatttggattttctttattttgctgtcacccgagtcctacagcgctgttaggaagtgtcctgcactcttgctgtttcttgctagtaggctgagcctaaagactgacttgatctcctttgcaaggtttggaatttgaattgtggaggtaaactggctgtaatagtctccagacagctgcctctgagttgacatctaatctgccatctgattggctcccctctcaccattgggcatttagcactgctgatgtaaatagaagtgctgagcagtacagtcacaaaaattcttgccacaaataataactgagctctattacaagcaaatgtaaggttcagtatttaaagctgaaactattatgaatcatagttattaataagaggatcaaatacagaaaaacagttcgctggtgtccagtattgggcatttacaaaattcagatctttgatgatagtcttagaatatgcacattacatatatcatagactttaattggaggctgaggataaggccattgaaaaataagtaaaccacgaattttaccaatttttggatttgtaaagcctttataaaagtcttccctttacaaattcaactatggaaaaatttgaattctgtcagcacacgcagcttaataaaaccttaaaatttttttaagattttgataggcagcaatatattttggtgatgtgtaattcacctgataaacaagatttaagcttcatttttttgtgatttatcagttctgactgttcaaagatatttgtggatgaggagttttggttagaattgacatatttaaaaaacgaaatgaggaaaccacatatttgtgcagataacaataattaaaaggggaaaaatgagatattcctgtgaaatactaagaatcatttcatatttgcttttgatgtggagaatacagaaatgccccataatcttttttttttcttcattgttttgttagattaggtaatttgagccttgtttgaactgcttacacgatgaattagggaaactatattctaagcaagttgtgctgggtgtctttttttccaaataatttttctttcatgttaatgctatgaaagtttaaaaaatcctaatctgttagagaggaacaacagtcgttgtatgtatatttttatgtaactcatttattttaggaagaggtattttaacaataatcataccttagagacttgtcagagtgaaggaagggctgaatttaacaaataatcttgtgaatcctaggctgaacactgctgtccactgctttcagatctttagttattggagttttgcttttaaggataatagatttttctattcttaatagaaaacttgtgatttcaacttgtttttgattcacacgaggaaaaacattatag

SEQ ID NO: 1882470 - DNA, 4001 bp, Homo sapiens
tgccttattgtaaagatacagtgaaaagcagttgggcatatgtggagggaagtatgggagcaagtgctgggtgtgcgcacatgcatgtctagagctgaaaacaagttttttatggcagtgaatgggttatttggaaaacgttaactctgccacattgtataccttgaataacatttaaaatggttatttaggcctgaataaaattaatgtacataccaaaatgaaatctttcattcctaagagctgactgtcgagtaaatcccttcctattttctattacattgacagctacagatgtatacacatgcttaggtcaaaaaaagttaagtcttggcttacctattaattgggctaaagtcatctttacaaattgagattccttcaggtccaaccccaatgagcagtttctgcccttcgctatcccgcacagaatgccattctatgccatagttttccattgccgacacaatctgcaaaacttggtattcagctgaagcctggctggtcccctccaactccttatgttttgcaacaatgctggaggacaccaagaggacagagaattaagtatacagatattagctttagagataaacctatgtagtcttcacgagtgaaatatactaacactgatgaatcacaacaacttaaaacttatgtattactgatgtttcatgtatttagcgaacttactataaaaaacgtctaagacactgggatctcaactattaaatacttggtaaaaacactttggggatgctggatgggtgatgaattggaagaattatggaaagtctctaaaaatatacataagtcaaatttacatattggaaagtctcatgcatttgtccacatatagtttataagtataaagttgacccctgaggcccctgtggccagggaaggaggtaggccaacaaaccacaggagtcaacctggcatggaggccaccctcagtcgagccttcagatgagacagagttctacctgcagcttgactacagtctcatgagccagaggacccagccaagacatggccagattcctgacctacagaactgtgagacaatttttgttgttttatgtcactaagttttggggtaacttgttatgcaggaatagataactaaaatgcctatgttagatctcctggtttaattcttgctgggatgaagaaaacaccaatatacataatagattttttattttaggagatttgtacttaaaggcacagatttaaaaaattcccattttatatagcatttcatattgtgtttacatatttttcaaataaaaggctaacaaattttttgaaaatatttggttaaattgggcaatggcccagtcttaacttcacaaattatgtgtatgtaccacagattcatcttcttttggaaatgcttatacatttgatagctctatgaatatatgcagtagccctgatgctgccatgttcatgctctggtgtctctggtcttgctgctccctctgtcctgatggccattctttctgtccccttgcttggataccctttggtctgtatcacatgcaaatcctctattcctctggtacagtatttgacataacatgtatattatgtatgacttcttaagtgcctcgaacatcagagagctcaaaaatgtacataaaactgcatattatgtgtgattagtttaccttccaaccttagtttcatcctgtttaagcctattctagttgtaaacaatactatattcaacagcctcacctgttcaaggtggcagaggagagctccttggcacagagctcctcatagttatacttggcagtgttctggttgtagtctccaaacttggtctgggccaggagggcactgagttccactgcctgctctggggaacacaagaggtggcctgccaagagggcctccttgatgtgcaagaaaaagatatgcctgcaaagcaaggtgagagtgaggttatgcttggggataacctgacatcaatctcagcctacttagcaatttcacagtcacttttaaggaaagcaattttaaaagtcacactgaaaatgcttaacattaaagaacttcaaaaaaaaatcatcagtattaaggcaaaatcaaaataagaactgcgtttctctggaataaaagttgtgacccaaacaagataaacttatttaacacaagttcggtaacattaaggttacaaaacataaaataattacacataagtttctgcattatagtgttttaaaagaaattattttaatcagaaaaattgtatcttgacatggattctgatagaatcttaaggaactctatacataaagacaaaattctcacctttattcaaatgataccccaatctctagtctcagtgccagcttctgtcctaagaatcacatgaaaaatgtccaatctcctataggcttcaccacctggatgttcttcggtacctcaattttggctcattcaaaaccaaactccatatattctttcccaagccctttttctccgaatggagaccacggactgactttggactctttgtcctatttcacttgactttcttctctctgaaaactatttaaatccagttctatcctcccatttgtacctcctcaatactacttgcaggaagaatttacactattctctgcgctgctctcctcctccagactccatgcaggcagcctaccttccatgctgcttgtttctagtataaacttgtcatttctctgctcaaaatccttcaaaggatctgtacggcttgccaagggagcacgttgttaacgtggagctgaggagtctccgccatctggccccagctttccagccacgtctcctgtcattccctgcagctgctatgccccaggatagggaacgattcctctccctgggaaatctaggaagcatgttcatgctctggtgtctctggtcttgctgctccctctgtcctgagggccattctttctgtcgccttgcttggataccctttggtctgtatcacatgcaaatcctctattcctctggtacagtatttgacataacatgtatattatgtatgacttcttaagtgcctcgaacatcagagagctccaaaaatgtacataaaactgcatattatgtgtgattagtttaccttccaaccttagtttcatcctgtttaagcccatcctagttgtatacaatactatattctacatttactaaaaggttatgtcacacttaaaaactcctgtaaaattcagatactggtcacactgcccaaaactctgaagagcacctaaactgctgtagacagattggcctcagttataacaagtgtccctggcaaatgtgaagttttaaccttccttcgatgacttgtcataacctctcaaacaaggctaattgccacattattcgtcccattaacaaatgaattgtaactttggccaggtgcgatgtcctcagcactgtttctgtttaataatatatctgtgtctgacattccaggtagaggaacatgagcaaggtaagaatcgactaaggaggaggcagtgaggctacaaatctaaggaggtgctatactgagagtctacaatgtctggctgacaagagccattaatcttattttcactaagaagtatttaaattcaatgttttgtgcattctataatgataaagaaatatttaaaatgatgaaactctgccaaatactgcagttttttctttttttcaaagcccgtgtaaagaaatcatagtaagaatgtgtaatagcctcaaagaagataaagatggtttttattaacccaaacatctgctaatctttaaagtatttctgacatactgctaaactgagaaaggagcccccactggggcaaaggaatcaccatgaaaataatttgctgtaaaatagctatctgaggactgagatccagcattctcagcaagccgtggtttactacactgttgcaggcctcaaaaggcttcttagatgaccatttgataaacttcatcttggtgaatgtacccat

SEQ ID NO: 1882471 - DNA, 4001 bp, Homo sapiens
tagttgctggattgtggggaggtggaggacaggtatctggaggcttagagaagaggctatttctcaactaatacagaagtatttcaatattttaacaaccagtactgtcatactggctcaataatagtcacgggcaaggggcttacaaaggaaagatggatacgcagagaacaagaggcagaaaggggctcaagttatttggggcacccctaattgagaagtttcggtgggtgatgggtagatataatgcaaggaatgagtattttagggacactgcagggttaggaatgaaatcagttgtcaatttcagggactggagactgggctactccagggcttaccagagatgaaggagatttcgctgaagagtaaccagggccccgcaaagaggaagcggcactgcagaaagcgagccacacggccgccaaggggcactgagacagcccgggctctggggtcccccaggttgccccctaggttgtggcgcatgggctccccctcccaggccatggcagggccacgccggaagcgacattccaccccgccaggcagacgggctcccagcgtgtgcatgttgttacagtggacctggggggaagggaagagggcacagggtcaaggctaggagtggtgggggcaccccaacggcaccctgcatggcttcagagccctcctcgagagccggactcactcacctgcatagcctggaaggccctcagccggtcaaactcaaactccatctccacatagccactggagaagctgtggttgctccatcccacatagtcatagcctggccagacccgcagctcctgactcttcctaaagtcatccagccccaccacaccatctgccagctggcccagacccccatactgcagtctggagaagaggggaccaaggaagaggaggttggaagggaagagggtcttgacatccaggcattctgctccgccaccctccggcacagtggcatggccagcctggctcccatccactagtcccattcccatcccacctcacactcatgcagctggcccttctcctctctccaccccaccccagcactacaggtaccttgcaggtcacatccagcacaaaggcaccacctctaaggggcaccatttcaatctatgatgtgtatatttattgcagcaatttccaacaatgtgtgttagcaaaggggtgcctttttcatacagtgtcatacgggctagtggtcaccctagtgctaccctttgaggccccacctaacccatccctcttctcagctcttccatctcactccccaccctacttaccagcccccctacacacacacactctcacacacacacacacacacacacacacacagtcctccctcccaccccaaactccatatcctgcaggggcctttcttacccgcccacggtatgtccgtcataggtggagtcgttgaggtacacggcctcagataaatacattgtctgccccacaggggcggtgtaagacaggagtccatctggggcagggtgagaggatgggggtcagaggcactaaggctccatcccccatccctgcatcaggcctgggcaggtttcaggtcccttcttgtatctctccactggctcattggcatggaggagacaatgctggctagccccctcctcagagtgacagcttcccagcaggagaagggatcctggatgcccattctccacactccccaccctccagtcccctgctcaggaaacagattcccaggaagctgagccactcacccctccagaggcagccatagagctctacccgcagacagacgctcatgacccggtcagcccgggggtagaagcgaaccagtcgggcaaccatggggggcccaaggtccttcagcaccactccctcagggtcctcattgcctgagatcacctgtgggccaggaaacagggggtgggtgggatggagtccaggtcagatcttacttcccacccaccagctgctccctggcccagcccacagtggccacttagagacccatgaggggtggcaccgagcacacagcactgtggggcgcagccaggcatgggtgaaatgaagatctgcagctgagacctctggctctgtcgcagctctgatgttccatcctcagacttcaggctcagctgccctcttctccttgcctggctccatccatttgtctccaagcctatcatcccattgtgcccagattctccccaatcctcacagccctgcacccctgcctcagcttccccttcatttcagcccattccctctgttcattcagcagaagttggctgagtgcccgctctgtgccaggcgcgttctcagtggtgaacgtcactccccacccttgtaggactgagatcccagcagggaaaacagctgcgaagaacaagaggcaggaagtatggacagagcagtgaggtgggtggccagaaaaggctctctaaggaggtgacacctggcagagaactgaatggagtgagggagagcctgtggttatttaggggaggagctttgcaggcacagagaaaatgtccagaagctgtgggaacgagccctggcttgttccagcaacaagaagaaaggcagcgtggccaaggaggcgccaagaaacaagtgatgcaggcaggagccaggtcaggctgagcatcctgcaccagctagggactcagcttttgttctggcagagtggaaagccagcatgggggtgtcagctaggtgtgacgtatctgatttacatgctctaaggtccactggatgccgcccccccaggtggagatttgactccaggcagaaaagggcagaagcagggagacgcgtttggcatctactgcactcatctaagctggagatggcgggcaggtggcctagggcagtagaggtggagtggtgaggagtgactggactcaggaacactatggaggtagaacagacggggctgctgatgctttggaaggaggtgagagaaaaaaaggaatcaaggatatcatcttaacttatagcctaggcaaccaggcaatggtgataccacttcctgagctggagaatgccaggggaggagcaggtttaggctgggaatgggaatcaaattcagcttgggaagttaaacgtacgtttgagatgcctattagacatctaggtggctggctacagtgcttgtaatcccagcactttgggaggctaaggtgggaggatcactgagcccaggagttcaagaccagcctgggcaacacagcaagaccccatctattagaaaaaaaaaaaaagacatctaagtggagaaatccaaaaggtggccaggtttacaatattgtttggagctcagctgagaggcttagtctggagatgatataaactggagagtcgtcagcgtataggtggtgtttaaagtacagctggaagtgaggagagccaacctcctctgggtgctgcccctgccagtctcacctcctgaccccagcggtccttccagcccatccagcggcgaccatcccgggagtaacgcagccggtagctccgggagaactccttgcccaggcccccggcatgccgtccctgggtgcccaccagagccaccaggtgcagtcgttgtagatccacctgcaagtactcctcctccttgggaaacaccgaccctgcggggcaccaggccccatccccgtcactgctctccaacctgagggtgaagaggggcacagagaacatctggccccaggtctgcctccatctccagtatttaaaccccacttcatttgccccctcagcctgcaggggtttcactggcatgggcagaggggttggaggggaagtagaggtcccaggagctcctctcggggcagctacaagtgtgccaggtgtgccaagtacctgctgtggcgggcggcagtggaatctgaccaggagctggaagcagagatgtcactgtctgggatggtccggtcctgcatgcccagggcatagcggcacttggctgagtaaaaagcaggcatgtaaca

SEQ ID NO: 1882472 - DNA, 4001 bp, Homo sapiens
ccctcacgttgctgctgctctgcccaggctccccgagcagagcgatctttcagctttaatgctcctcccctcccgcacctcggtgacacacacagggcccggtgaatagaggacgtttaatatttctgtgctggtcaaacggaacacaggtggggaatacatggggagggggcggagggccccctgcctctcaggaggggtggcttgtgaggggtgtatgtggggggttcttgggaaatatccaaggagtcttctcagtaaaggggccaggccaggggtgttatgagcatccgatacgcccagtccttggccttgagttgggggtcccccatagggggtctgtggagagtctgacttttttccagctcttttgctagaatccacactcccagcacgacgggtgacttggtcctagagaggggtctggagagcccccaggaagcagcccagggtcagggagaagggctcccgtgcccactcctgagggggtgagagcccgctttctcccctcctttctccttcccccaggctgggcaggagcggaagggaggggggcagggccctgcctccactgagccccagggtcctcagggtggatggaggaggggtggagagagaaggtcttggccaccaacagacactgtaaactttggtttaaaacaataacttaagtggagggagggcttccagcctggggccggggtgggagactgggagggcaggtgctggggaggcgacaaaggaaaaagccaacaaaaagttttggtttttgcttccggcataagaaaggtctttggtcatccgtttaactggtggggcggcggggggagaggcgggcaaggaaggggagctgagggtgactgcagaggaaggggagctgagggagggtgagaggactgcagagaggcctgcaggctggatgtgggtgtggagccggggtccagcctggccttcccctgggctcccggcccaggccccgcctctggcctcagggagagcttggctccacctgcagaagcgcacctggcacagacctctgtgggtgaggcggtaccaggcctcttcccatgggggcggctggaggagcccccagcaaacgggggtgggggtggaggcctggctcagcctggttctgtctcaggttgggggcgggtctggagccaggtgggcctgctcacacggacccccacagggcacacagacagtcccaccccagcagcagagggggctgtttcttctggggatggaggcacagttcctccacccaggccagggcagggtgggagctggggtggagagttctttcttcacagtacggaaaagaaggcggaagggagcacgagttaggaaagtgggggcctctggccagaaaacacggccagagccaggtgccagggggccctgggtttgaggggtggctaagccccgcctgcgggtctccatgatgctgaggggccctgtggggagagctggtgggggaggagggccctgctgctgctggtggttggggggaggcagtttcagatgtggggagggtctgaggaggggtctgaaccctccgtgtcctctactggtccaagaccaggggttgtgtccctgggggtggggaccgtccctgcccctacgtgtttttgtcaggtcacactgggagctgctggcccgggcctccccggtctgagtcctggacttgccttgaggctcgggaggggctgtggagttgggggagatggggcctggattctggaagggaggggtctcaccccagccctgccggtcactacaggcccttaggacagttcttctcccggcagctcctcctccaggtccctgtcttccggaggccccgaggcgctggggttaggggcgcccaggggaggcccgggctgcctgtcttcctctgcctctgctggctcctccttcacctgcacctggtggctgaggcaaaagtatggcatgggcaccaggcggctgtcctctgatgccctctgccccctgccccccaaactcacccagaactctggggcacagtggggtgcccacagccccctccccaggatcccatcagacctgagggctgatctcccctagggctctcttcaaagaaaagctggtcctggggcagagactgctctgggttggggaggagagaagaggggagcagaggggagatgagcgaacggaggaaggagaagaaagatagaagagaggccaggcgaggtggctcacacatgtaatcccagcattttgggagggcgaggccagtggatcacctgaaatcaggaggtcgagaccagcctggccagcacggtgaaaccccattctctactaaatacaaaataattagctgggcatggtggcaggcacctataattccagctacttgggaggctgaggcaggagaatcacttgaacccaggaggcagaggttgcagtgagccaagatcttgccattacactccagcctgggtgacagagcgagactccgtcttaaaaaaaaaaaaaaaaaagagaagagaggaggaggaaaaataagaaagggggaaaatggggaggagaaggtgggaaggtggggaggtggggagaggggataagaacaggcaggtgggacaagggagggctgagagggctgagggaaggaagagagaagccacttgtcctggggagaggcgtggtgggggtgggatggggaaccccacccagggtgggggatgacgcctcctccctggtggttgaggggtgctggggtgggtgggggtccgtgctgtgtgctcacctgtactggggcggggagaggcgaggagggctgctgctgccgttgctgggcagcggctccacgggggcacccacgtcatcgtggctgaggggcagcaggctgctggcggagccagggttcagcatgccagggctgttgaggagggggaagctgctctcggccagggcggcctgcaggggcacagggttgggcctcgtcagtggctccacaggatggggcacactcagtcaagtgctgtgccttccccgcccactagagagctgcctgtgtgtctgcctactggccccacgggcggatctgtctgggcaacccccaagccccaactcagcctttgaatgtagcacccctcccccatggctggaactctgaccccccgacctcctacctcctagctttcctggaacctgggcctggcttatcccctctcccagggaacagagaacccccagactgacaaaccaggaaaggggatgctataggtatgccatcctcccagctgcctgccttgtctgaacccagccttgaaagcagaggtggaggctggccccgagttggggtggggcagagaggtggggtctcggagagtttgggtcttcaccctccttccctcctctggtgagtcctctgcaggggaggatgggggtctcttgtatgagaaagcaagggggcgggaggtagaggtgagtgggtgggctctgggcaggtcacctggtagctggcattaagtgctccatagctgaggccagagatcatgttcttcaccagggtggggctcctggaggacagagaaggccatctttggctcactcattcacttagctcttcattcgcatctctttactctcactaagtaacggcctgtgctgggaatgggtcccattccctattccgggaggccagggcggatcagccgctgtcttggagctgtgtgtgtacttggtctgattcggtcttcacgctcaactggccctgcaggagcagccccttcacaggtgggtgcgatgggcttggttcagggacctgtccaggtctcggagctgggaagtgggaactggcatccccccagtgtctgccttcacagcatgctgcccccccacccgttttctctccggtctagattttccaatgtttggcaaggtctaatctatagtctcagtagttacacacctggtctgcccacactgtcttgccatcctagattttgggacatgtcagacatatgctcagc

SEQ ID NO: 1882473 - DNA, 4001 bp, Homo sapiens
tcttatactcaaaccatcagagattttaaaacttcaaagttgttagctttcctttaatgccaacaattttatttcatttagctcaagctttgcaagtcttctggctcaaatattgcgctaaggttccaagcaaatatggacataaattgtacaaaaattaacttaagcacagaaaaaaattaatttagccaaataactatatagtcattaaacatataaagaagaaatggactacagcttttaatattcaagttgaacttagttatcttacgcctgtcatttgattattaaaacacaaaggagggtatctgcatgctttgtaaaatgctcaacctatgactgctcaatatgctttaagaggaaaaatcctaacctacagtttctggtctttttcaagccaataaacctcaagcatgaaatgtacatgcatacagggacaggactagcttaaatcagcccagctcctcccaacacccatccacacacagaaacaacactgaggtacaagagagtataaaactttatttcctaaaattcaaagaaaaagggaaaatcagactcagatttaaccagtcagatttctaaattaattttttaaaacaagcactagcaactgccctgatggacaccttactttagaagccaccacactgtgctttaaatatgtactgacaaaaaatttctaatagtcttaaataaaatgaagttcactatcactgataggaatttaaagtagaccgacacttgatacaattaaagctgacttgatcaaatatgaaagggtaaacttcaattcaaagcaggaaattaagaatatatccacatacaaatcggtaggaaggccaagctgacaaatttcacgcaccgtaattctatttcataatacggtatctaaaatttgcttcaaaataatagtggaaggggggataacaggggaaacaagagtggctatgattgatgactgtcatagctgggtgagaatacatgaggatttattataccagtatactctggggtacatttgaaaattcttataagattttttaaaagtcaaattcaatattgtatctactctaaaggctactttctcaagaccatacaccacaaatcatgaaacatcaatgtagtgaaatataatgagacattaaaatttacaaatatgtcaactatttcaacacaccaaaatgtatacatgaaatgttagattaaaatccacgatgtaaaatctatttacgctaaccaaaatctgagttttaagcttcactcagtacaacaatctctctcctaaaatcagcccatgtctaaaacttcagacattcctcaaaatttacagaatataaaaacttagccacccgattgtttaaagtgaggttagttcctaatacctcatagtatcaaaccaagtataatccaatttaggtaactctaagggtgatatagacttgaagacacatgggaggagaattcccatttactaacacctgctatttgctaatcatacagtatctcatttaatcttatattatctcaaactcatgcttccatcaaataaaaacaattactcggctgggcacggtggctcacacctgtaatcccagcactttgggaggccaaggtgggtggatcacttgaggtcaggagttcaagaccagcctgacccatggtgaaacccgtctctactaaaatacaaaaattagccgagcgtggtggcaggcacctgtaatctcagctacttgggaggctgaggcaagagaattgcttgaaccctggaggcagaggttgcagcgagccaagatcgtgccattgcactcagcctgggcaacaggaacaaaattccatctcaaaaaaaaaaaacaaaaactattactcacccaattttacagataaggaaatgtgagacccagagaggttaagtagggcacaactgctggcatcatcactgagtggctttgtggcttgccctaggccacagccaccaggggacgatgccatgcagttgtgccctatttgaaagtccaatacactggtcacaccactgctaataaactgactgtccccctccttggctcagccccctgaaatgcaaacatgcctgaaaaaatttaagctgtggaaatgaatggcttaaatttcaccagacagctccctgaaaaataaattattctagacacatgtaaacaagaaataagaccttaattagcaattctgcccatcattcttaccctgatttagactctcacctacatgtacccacttataagaattttgacacctgagaaaagcttttactttcctcagtttgtattttaaaattctaaattcttttattaacaagctataaaactataagaaaacaaatatctctcaaaaaaattatacagaaaaaaaggttccacttaccacctttttagaagtagggtggaatataactagtgtttaatcatatttacaactattaaatgaaaaatgtagaatatgatcccagtttagttttaaacaccttcatccaaacatttaaaaaaaaaaaaaagatatatgggagtatgtgggggcagggggggcggggtgcatatatacaccacaatgtttaaggtgattatgtctggatagtaggttccttttcttatgttttctacttcttttaaaacttctacaaagcacaggtattatttatagaaagacgcctagaaatgttatttttttaaatgcatagaagagaaactgtctaaaaaagactggccagagaccaatggaaaactgatggtccccaggagatgaatcagtggaaccataagtgtttcctcgggtcattacaaaagggagctgtatgggacttatgaaagtgtaactgttactttcaagctaagtttgttaaggttactaagcttaagtaattccaaaataaacacattatccttgggtctccaatactgtcttcagtaaaagtccgttacagtgaggttcagaaacattaagagcacccctcactgaaactcttgcttgggggcccagaatataaccttataccactggaaaaacaggtttaaggatacccaaaataaacaggcagtcaatgggagctccacttcccagtccatcaatcagcaatatgatcccatataatagtcaagatgtggttcaatcaccaaaacatttgcaaacaacaggagtctatgagtgattctcctttaatctctataccaattaccagcatttttatcagtgaaccttctctactctgatgagacgcaggtccaagaaagtaattattgtttgcatctatgagttagcaaccatcagattgcatccctgaaaagcatgctaaccaggaaggcaaaaccttactaaaaacctttataaggacagtaatacatgaacaaagcaatacaagagcactgtacatctgcatacattaggaagtgaaatacgtaaactgcataaaacaaattcaattcatgttgaggcataacagaagcaacctggttgtatcaggatgtctgttccagctcataaagttcttaccagagacaactacgaaatctgtcagtgcctataagggtcatagcaaagaacagaatttgggaaagagagagtattccaaagtactgtgaattcctctcctgtaccacaagtcacttcccccacctctacacaaggcaacataagcataaacctgctgatatctgacaacatatagcactctacccagaactgtctactaactaaatccttgccctaagttttccctctttaaagtattaaggaaattttttcctgtgtaaaaatatctgactttataatgaaaatcactgagaaaatgagatctactgtgcagccaattttgcagaaatataaccttcagacaagtcaggggtcctcataagagctacaagtacactgagaaggattttaagtgtgttatctgtgttctttaagttactttacttctaagaagtctatgttatataatatttcttgactacagttgactgtgccagtaa

SEQ ID NO: 1882474 - DNA, 4001 bp, Homo sapiens
gtttctggatagactttagcactctgaaatacacatccaggatctgtccctcctgaaattagattaccaacttgcaatttgttttatccatgtccaaaaggctttcatgcagagctgaggctctctgggctgtgagtgaacaatagctctgttccctcctcatagggtgattcttcctacacaacttcaagctactacctttgtcttctgtcacctgaattgctgcaagagtgttctgattggtctgccagaatctagtcttgcctctttcgaatatgttttttacatcacagtcaaatttcatcatgtctctctcttggttaaagcattcaatggcttcccaacgctctcaggataaagttcaaaattattaacctcacagaggtacccccttgtattgtatctctttagcctctgccttgtgatctcttctccagccataatgagacactttcagttcccagaatttgttacatgtatccttgcttccaggtttctgcacagtctatggctcctgcccatactgttagtcttcctcctcaactacctctagagcttcactggttgaactcagtttcttcccttgaggtgtcagcatagccatgagtccctctaatgatccttccctgacacctcctcaacattttctcaagagctgttgagatgttcctatatggtgccatagattttgtacttctatccatacgtaggtcttgctactataattgctggtttacttgtttgtctctcccataagattttcttataaattccttgactgtgaggagtatatcttattagctattatatccctagcagaatacccagcacttaataaatgctaacaaatattgtttaatgaacaaaataattaaagttagttatgacacaagttatgtgtttatgagatgtgtttattaattaaaatgccaaacaaaaatttcattccaaagctaggaaatatgccctaatcaacaaatgagaaatagagaaacttaaaatcttcatgatctgtactatttatacagacttttaagttcattttcatttgaaatctttgataatcaattatactaaaaaagcaagataaataaacaataatctaaaaaccttcctttcttctttctattttaagaaaagaaaatatggggaagttacccttattcctaacctttgctgctgactccccatctaactcactttacctatcctgatgttatcacttcatttactgtcctggttaccttctgctgcataacaaattaccccaaatttaatggtataaaagtgaccatcatttattattgtcatctctcatgattctgggacttgagaaggataagctaggtgattgttgctcagtgcctctcatgaggttttagtcagatcctgtggctggagttggtttgatagcatcatcattcacatgtctggtgatgggtcatgactggctgtcagctagaactttatggggagcctttggccagaacattcctgcatagtctttgcatgtagactggatttcctcacagcatggaggccaggttctaaatatgaaccagaacctcagcagaagttgagtgacatttccaaacttagtctcagaagtcagcaatcttatttactctgcattttaatcttgagaaagaagtttgtaagaccagcccatatttaaaaggaagagaattggagtctacttcttgaggggaggaatataaaaaacctgtggatacatttaaaaccataaaatttactttccctctaggttccaaacattcttctttctagttggcatattccttcttcacttgtctctcagtacacataagcttcctctgtgtttagttgtctattctcaatacacatttgtgtgcatgtttttgtttatacctgtgaggtgagctcagtatgttgtagaagtaagtgtgctttagcatttatggtcatgtgtccacttatgatcatgtgaatgaacacatgattataaatgctagggcacacatactttaatgagcacaatacaacgtaatgaacatgcttgtgctgaatctgaaaggatgagcagctgtgtaagtgacattggtggaaagggcagccgtgtagtcacattggtggaagtatgcagacattccactgtgacctcctagtggtcacagcaaactcctctttccttttccctataagagttactatccttcacagaaaaaaaattaaaatatttctttctagtttgggaactttaattttttaaaattgtggcttacattttctgaatcaagagggatagtttctcttaaaatactctttctggggtaatgaaatgttttgaaaatagtggtgatggtagtacgacattgagaatatgacaaatgccacagaaccatgcacttaacaatgattaaaatagcaaattaaatcataatttaaaaactttttaaaatgtaacaatctgagaagactttttttaaataataatgttatagaccaaaaccattgaattatatactttaaatgggaaagttgtatgttatgtgaattatatcttgataaagttgtttaaaaatgtttatggtaaagacctttcactttccacaattatagagaattatagagggcttttactttccacaattatatacaggcttaacataaaaaagaatgaagtcatgtcttttgtagcaacatggatgagactggaggccattattctaaaggaattaacatgggagcagaaaaccaaatactgcatgccctcacttgtaagtgggagctaaacactgggtacacatggacacaaagaggaacacaatagacaccagagactactagagcggagagagaggaaaaaactctttggatgggtgtagaattaaaacaggatgctatgaattgtgatcgtgtgatccatcccccatttgctatgccaagaagctgaagagctttaactgagtctcgctgaaggtaggaggttgaattggacaactttttttaaatttttaaaattttttaaaattgttatttatttaatcctttgagcccaacctgaaatgaaaacaaatcataaccaaaattggtagtttgactgaaaaactaccagttgggtactatgctcactatctgggtggtgggatcattcacaccccaaacttcggtgtcacacaatagacccatgtaacaaacctgcatatataccccctaaattaaaaatgaaagttgaaattataaaaataaataaatacgaaggggcttgagtcatactctattcaatattaaaagaaacaaaattggctgggcatggtggctcacgcctataatcccagcactttgggaggccgaggtgggtggatcacctgaggtcaggagttcaagaccagcctcgccaacaaggagaaactttgtctctactaaaaacacaaaaatgagccaggtgtgatggcgcatgcctgtaatcccagctactcaggagtctgaggcaggagaatcacttgaatccgggaggcgaaggttgcagtgagccaagattgcgccactgcactccagcctgggtgacagagcaagactctgtctaaaaaaaaaaaaaaagaaagaaagaaagagagagagcgagacaaaagaaagaaagaaagaaaaagaaagaaagagaaagaaagaaagaaagaaagaaagaaagaaggaaagaaaaagaaaagaaacaaaataattatatatgtatatatttcagaccaatatgcttgaaaacaatgatatggggttttctggttctataatgtgtactttattggcccatccttaagtacttcatgttaccttttagcctccagagatgtgttaggtcttttgtgtttttgtttgtttgtgctgtgaacaattatcagaagctctctaagcctgaataatggttgcactacgtctatgctcacacgaaatgacatacccaaaggacagggaactgttcttaacttaaacacaagaaatctatgtcaggcagtgaatagttacag

SEQ ID NO: 1882475 - DNA, 4001 bp, Homo sapiens
ttgcaggttttcctgacaggtggacaggaagggcccatcggcaggatctcactttttttttttgagatggagtcttgctgttgtcgcccaggctggagtgcaatggcgtgatctcggctcactgcaacctccgcctccagggttccagcaattctcctgcctcagcctcctgagtagctgagactacaggtgtctgccaccacacccagctaatttttgtatttttagtagagacaaggtttcaccatgttagccaggcgggtgtcaaactcctgatctcaggtgacccatctgccacggcctcccaaagtgctgggattacaggcgtgagccccccaaccccacccagctgatctgtttttaatcgtatgttgtattcatgtgaatacttgacaggcaattggatgttctgttttccatttttgtctaaaatcatttggcaatattcctcatagatacggaaaagcacttaaaatttaaaatcttgtcttttgaattatcatcattattgatgatattgcattagtgcaagtgtaaataaggagtcacccattgaaataatctggaataaaaaattcaaatccaatttctagagtaacagctgtggaaatgagtgtgtttgagatgtggccctccgtgtaaaagttcaaatcctatgtctggagtaatagctgtggaaatgagtgtgtttaagacgtggccctccatataaaaattcaaatccaatttctagagcaatagctgtggaaatgaatgtgtctgagacgtggccctccgtataaaagttcaaatcctatgtctagaataatagctgtgaaaatgagtgtgtttgagacgtggccctccatgtagggcacaggcttccggagctccttccagaagagaacccaatgtgtggtccaaggtgctatacacacgctttcccactctaggagtgcaacagaggatgttttcacaagctctgaagtagtctctctaatacttatacaatttctggaatttattaaaacattatatagagtggcctttaaaattaactcttgacacaatgacgaacagtcaaatgttctctttaattcaaacaatgaaaagagatgtaatagtcattttccatattatatttggaaagatactataagatgaaaatacatatataataaaacatttttggaaaattattttggctatcctttaaaaaaatgctccttactgcaaaaacaaatgtcaatgcattctaattatgtttctctggtaagtacttttaaggttttagtgtatgattaacagaataaggaaacactccctacaatagcttttctcaacttctctctcaatacaattccatttatttaaaaaccaattatagtgctcagatctgtacttggtaaattacacgttcatgtcatggaaaatagtagcgaaaccagagaatttaatgcatatgaaaatggaatagcaaaactgtaggaaaatatttgttcggtgaaacaatgacatgagccactaaaaataaactctgaagcttagcctcctcttccttaactgtttgtgtgtagaaccctaccctgacacttgtacattcctgacctgtttcagatactacgaactcacagaaagaaaggctgctctttggatatacttcagctaatctgcaggtgaactttgtttttccttacctctcattaagctttaagatattgctcatgaaaatataaccttttttccagtggaaataaccctcctttatcttctctttctggtgccagaactcatcaaaatatgctttcagtggtggggagaaggtaagattgttgattcaagcagaatatcaagaatctatcctgttaaactctggacgtctaccaagcaacaactagacatcaggcactggggctgcggcagcaacatgcgctgaccacggccatccttctgtctcttttctctctccactgctgtggacctggaccagggtggatggagaaagaggcagagcaccgccgcagatggtccagggtaaacctgccacagcatcatccttccattattttgggactttgttagatggatacattaatcatgagccaagggtttaaataaaaactagtatttgtgcaattctggtaaaagatgctttccataactgatgcattcttagacttttatcatagaatggaaagatctgtggttcatttaaagaaaggctgcctgtacctggaatggtcatctgcagcggcctgacgaggtccgggtgcctcagtgggttcccaggatacacaaaccactccttgacagctaggcaggtgctggtgacatctgaagaaaaagagttgggtcagtagatgcatgagggcatgcatcgccaggctcacagtgtcacagacccagctctgcccaggtggccaattcaaaggtgagctctcaaatccaaggtgactgagtaaccttaagttatccaacaattaatttcttatcctccaatctgagggtaatctgttcattccatcaagaaccataccctgtggaaccgacaaaatcctcaggataatctgggtaagtaaacaataatatgggagagagagtttaccatgttaatgactcctacgatgtctttcctccctacctccctcacactgttccagaaaacacttaaagaaaactgctggaattggacagtcaacatggatacagttttttaaagcaagaccaggtaaagaagacagtgggtgtaactgaggaactctgaagggaggaggtcagcagagaacaggtgcttaagggggaagggaagaagaggtggtgtccctagatgccagatatcccagcacaaaggtgatcatcagtcagacagctgctcaagttgggcagagggcttcgatgcggggcagaaagaggcagtgggcttggtccagggctgggggaagcaggccttgatgaagagaagaagagtggacacttctataaaagagctgagaaatgaagtggagagatgtccccttaatgtagcacaaaaacacaaaaacaggaatcaaaagatgaagaaagagagtatcagtccaggaagccccacctgcatttcacagcacttccaggagagaactgagacaacagagattcgctaatcacaggataaagagaacacctcaaaaccttctaagaaaaaaaaaaaagtcggtaaaaaaggaacatgaatcactccagcactcgactttgcagctggcattatcagcacctgtgatgccacaggaccgcgggggtgactgtgatcgagcagagccactgagcaggggacagtgggggtggtcgtttgtgaaagggcagagccactgaccagccttcctaccatcaacactagaactgaagaaatggttctagcaactgcattcatgtgacggacaatgggcagtgccagattgttatcccagacagaagggaaacaactctctatcacgccaattttgtgcccacaggcactgtccagactgtatcctagtgagggaggtagttcctcagatgaggagacagagactggagatcaagactattgaggccaccatctgcaggacacagcaccagagagcagggcagtgtgcagatggcaagtgccctttagactctggctgaagagagagctatcaggatatagggtaagactcagagaagccaggcaaggtcctggggctggccaaccaatggagcttgcactgggcttgaagacagtggagcttccaccaccagcaaacatgaagagacctcgtcctacaccttgggcactctggtgatagcctggaaggccctgccttaggagtagggctgtgctagctgtaaagtaaaagccacaatggacacagcctaatgaagtttaaaggcaagtctcggaaggagcaggtagagtaactgtctgacagaactaaactctacactctttttagtatccaaaatgttctggcatataatcaaaaaacgctagacatgagaataagcaaaactatgtggaccctgta

SEQ ID NO: 1882476 - DNA, 4001 bp, Homo sapiens
tgcggtgctgaccctctgtatgaagcgtgttcacacggtgcggtgctgactctctgtatgaagcgtgttcacctggtgcaggacagactctctgcatgaagcatgttcacacagtgcggtgctgacccgaccctctgtatgaagcatgttcacacggtgcagtgctgactctctgtatgacacatgttcacacagtgaggtgctgaccctctgtatgaagcatgttcacgtagtgcagtgctgactctgtatgaagtgtgttcacacaatgaggtgctgacctcatgtatgaagcatgttcacacaatgcggtgctgaccctctgtatgaagcgtgttcacacggtgcggtgctgactctctgtatgacacatgttcacacaatgcggtgctgaccttctgtatgaagcgtgttcacacagtgcagtgctgaccttctgtatgacacatgttcacagagtgaggtgctgatcttctgtatgaagcatgttcacatggtgcagtactgactctctgtttgaagtgtgttcacatggtgcagtgctgacctgtatgaaggatgttcacgcggtgcggtgctgactctctgtataacacatgttcacgcagtgaggtgctgatcttctgtatgaagcatgttcacacagtgcagtgctgactctctgtatgaagtgtgttcacacggtgcattgctgaccttctgtatgaagtgtgttcacacagtgaggtgctgatcttctgtatgaagcatgttcacacggtgcagtactgactctctgtatgaagtgtgttcacacggtgcggtgctgactctctgtatgaagcgtgttcacacagtgcggtgctgactctctgtatgaagcatgttcacacggtgcggtgctgactctctgtatgaagtgtgttcacctggtgcagtacaggctctctgcatgaagcatgttcacacagtgcggtgctgaccctctgtatgaagcgtgttcacacagtgcatgtgaaaccagaaccgacagtcgaacccaagcagaagtcttgaccaagcacttccctcctgggaatgcaccatgatatcaccacaccgaagtccaggctggcaaatagggacatttaagtgacatttaagctcgtggtggccctatgaggagtcattgctgactgagatgggattttaaggtgttgcctgcctgtgtgttctcagaccctctcctgaagccccaccccttcccctgatcctctcctgggacccccctcccctatccctgaccctctcctggagcccccctcccccctccctgtccctctcctgaagtcccctcccctgaccctgtcctgggaccccctcgcctttccctgaccctcacctgaagtcccctcccctttccctgaccctctcctggagccccctcccctctccctgtccctctcctgaagtcccctcccctgaccctcacctgggacccccctcccctttccctgaccctctcctgggaccccctcccctttccctgaccctctcctggagccccctcccctctccctgtccctctcctgaagtcccctcccctgaccctctcctgggaccccctcccctttacctgaccctctcctgaaatgccctgcctgcaccattgtcttatatttttctcatggttagactggggttatggttttttctgggaaaggccacagaggtaaagtgacatctcattgtgtcatattcagggtccatgccatcaacatgactcatcagtgctgacgcggtgatgacctgggggacgcagtgtttctcaggttcccccactgagcctctgcaactccagtagtgacaaaccgctccaccccccgccatccattttcttaattgttcaattgctagtatcacatttcatcaagagacgcatagcagagtccaaccaagactccatgatagagaaaccaggcaagaactactgtctcgtcgcaacttgaggagacaatatttcttgcctggtttccctatcatggaaactgagtcccccacagtttcgtttcctcaatcgagctaattactgaggttgcttagcagcctccggagtgagcacagcggaaactatcattagggaactttgaacgtttctgtgaaatgccaacaggaaatgtttcggcattttcaaaatatttagaaaattccctgttcagttacaaaagtgaatctgaatcttaccctgcagaagttaaactgctccctcttctggataaaattacctttgtaatttctttttacaacctacagcctattgtgcttgggtttccaaatggtttaaagttcccttgtcccttactttgtgtcaagggggtgtttgtgccttaaagggaagatcctgtgccttaaaggaaaccagaactgatagtcgaacccaagcagaagtcttgaccaagcacttccctcctgggagtgcaccatgatatcaccacaccgaaggccaggctggcaaacagggatgtacacgcaggggagacgagaacttctcccgtgagaaacagcacagtccagccatatgaacccacagctcaggaagtattgctcacttttactgttctctcttagggaagggcattctcaaaacgtttccgcacaagcagaccatcccttttattttccccgtctgtctcctttccttctgctttcaaaatgtctcaagagtatttacaagagttgagcaacacaggcatctttatctggggtctttatccacagagcagaggacaggaagtcatcactacagagacgaagcgatgtatggtttgacccagtggaggactttgttaaggtggaggtgtgagtgtggagtgtaaacgtgggacatccagggcagtggagggtaaccactggagaggaagtctggggacagtttgggagcagccaaatataaaataagcatttctgttctaaatccaaatgaacattctacgctgctgtcatctccagtatacctcagagatcctaaagtttcctgaagttgtttggaagtcacggccgatgtaaagtgaaagcgcacacatatctgtaagctctgagctcaggatttcacgtgaggtcctttgttcgggaggcaggggggttctccctgttgctggctgaggtcactgcattcatagtgtgacaggagacagcacaatacagcaaagcagctggagggattgccttgtagagtggaagaccttccgcagaacagaacgctctctgtcctgttctgctggagaatgaaaagggatgggtggcctgcgtgaaacctctttatggggcttgtgcgttctgacactgtgaccgccgaggccacagctgcctttgtttcttcctctctgacctccatgaagggctagcgcacaaacttggacagggacggctctatctcttgggtgatattctggaaaagtcagtcttgacttagtcaaaggcatcggtaattccccaacagctgagagcagactccatgctgcggttttcttgtaacttgaatcgaggagacttccacatctttgctatccattgcgcctggctttgtccactcgctgacttcttcatatataagctcattttccacctggaagaaaagaggagagagccttagggccccagcattgggtccgcaccgaggcctacactgctccccccattcccacctaggaccatggcatcccagtcctctctccctgtgggaggctttcacagaggttcacatgggcccaggccactatgattttctgagtctccttgtttaataaagaaaatgaagtgccaaatattgtggtatgttttaaaattttgtatttaacaagtgatctttcaaaaatgcaatgcaatctaattgcgctattccgaagttaagcataggatttagaaaacattcttatggcatttctttcatggaacatgagcttaacttttatcattaaagtaatttctgtccgtcttttcagtgtatctgtctctgtgactctaagtatagtaagattactagg

SEQ ID NO: 1882477 - DNA, 4001 bp, Homo sapiens
tcactctcctaacttttgagaaaaccatgcccttgctgggcgcggtggctcaagcctgtaatctcagcactttgggaggccgaggcgggtggatcacgaggtcaggagattgagaccatcctggctaacacggtgaaaccccatctctactaaaaaatacaaaaaaacctagccgggtgtggtggtgggcgcctgtagtcccagctactcgggaggctgaagcaggagaatggcgtgaacccgggaggcggagcttgcagtgagccgagatcgcgccactgcactccagcctgggggacagagcgagactccgtctcaaaaaaaaaaaaaaaaaaaaagaaaaccatgcccttgttgtcttcggtgttctacctcaaacatgcacatcccttttgaattttatataaatgaaaacatactgcatacattattttgtggttagcttcttctatttaacacaacatttgagaaattcatctgcattgcttttgtttatctggagacagagtctcgctctgtcacccagactggagtgcagtggtgctatcttggctcactgcaacctctgcctcccaggttcaagcagttctcatgccttagcctcccaagcagttaagactataggcatgtgccaccatgcccagttaattttttgtattttattttttctgagatggagccttgctctgttgcccaggatgcagtacagtagcgcaatcttggctcactgcaacctctgcctcttggattcaagcaattctactgcctcagcctcccgaatagctgggattacaggtgctcaccaccatacctggctaatttttttttgtatgtttagtagagacggggtttcaccatgttggacagactggtcttgaactcctgacctctggtgatctgcctgcttcagcctaccaaactgctaggattacaggcatgagccactgcacctggcttcatctgcgttgttgagcgtagctacagtttgttcatttgcattgctatatagtgttctcttgcatggctattgcatggaacttttttttttttttgagacggagtcttgctctgttgcccaggatggagtgcagtagcgcaatctcgtctcactgcaacctttgcctcccaggttcaagctattctcctgcctcagcctcctaagtagctgggattacaggcacgtgccaccatgcccagctaatttttgtatttttggtagagacggggttttaccatgttggtcaggctggtctcaaattcctgacctcgtgatccactggcctctgcctcccaaagtgctgggattacaggcatgagccaccacacccggccacacagaacatattttatccatcctactatttgtagccactggagttgtttccagcttaggattattacaaacaatgttgtatgctgtattcttgtacatctatattgtttatacatgtgcaggagttttcctagtatgtatacatatatagaattgttgtagggtatatgcatcttttctagataaaagcagccaggcatagtggctcacatctataatcccagtacttcgggaggctgaggtgggaggatcactttgagttcaggagtttgagaccagcctggacaacatggtgagaccctatctcttaaaaaaaaaaaagcaaacctttttgttacttttcagttattttttcatatttataacccaagtcttttaaggaaaagatcatgccttaaaccattctcaatgattccctctcggaggcccatcactaaaatgtatttgcacaaggtacttaatttttaaccagtgacagtgacagataagattcaaaccaggtttcctctccacctacctcggaggcaggccacacctgccagaagtagcagcaatgtcccagcatagtgagaaaacggcaccactttggacaaactcaagtaacctgggaagggagagggacaatgtgagaccctctccgcaatgtccctcagctcctcttcccagttcagccccaacctccaccccacactccctgtttggaacagccataccctaagaggaagaagatgcctgatggaagagggaagccaagccatcttcacaggtcccctctcctctttagggagctggctcatctgccaacaacctgcccatttgctaccccaccacctttgaaaccacactgacctttcctgtacaagtagaagaaggcgaagggagaggagtaataagagatggaccagaatactgaagcctgcagcagagagacagggacaggcaatcaatacacacacacacacacacctgccattccaggcatatactatacactctgagcaagatggacaacctgagggatatcatatcatatttggtgtatgacaccatgaatacagtaggtgctcagtatttgttgaaaagtagtgtgtcaatgtaatggaggctgggaaaatttggtacaggctctattttcttcctctggaattatggaagaattatgtcttccatctccagacataattccatcacatttaaaggcagtctctctgtctactcaagttaatcaagccttttcaattggccctgctcaggacagcccctggcctggtccccaagagatgcgcaaacgtcaccacaggaactgtgccagaaagaacagctgtccctgcagccaaagaggttagttgccagggaggacaggtcactggggaactgcaggacttagcacctgcagatggtcccaagagtaaacatgttttccttacggctcaggttgcccccagagaaagcagtgctacataccaaaggggagtgccaagtatgcacatttagagtgtgcctgtgtgtctgtgttggagaggtctgctgcagagcccagggcatcccccaaccccagggcactgttgctcccaagttagggagggctaagttcaagaggacaggtgggtctgaaagatgcagagtcccagatgccagggtagacataccagtgccaggatgctgtcagcatgtttctccagggcacggggctgatagtacgtatcctgccaaaacagatggcctccttaaggaccctgcccactggcaggtcctttcccttccctttcagaagccctgctgtgtgtcctctggttctagtctcgttgactatctctcttgaaacatccctggcccccacagaaactcctcttcctcaccctcactctgaacctaatttcccacccctgaccatgggaacaaacacagggagctggatttggaagcaaaagtgaaagcagcattggacgatttttgctccttttccacagcctagtttcaaatggattgcaggcgcgtgcatgtggggagaagggttagtttgagaagaaagaaaagacacctagacaatctaagaaggaaagaaaagcatcagaaataagagtagttgactaagaagagaatgtgggtaggagcgggcagtttgtaggagacagtaacacaatgagacaactgataaaaaggaagagaatatttagaacagcctaccaccacccgccagctctccagaatacaatgactcgggtctccaggctaggttgggcgggggttgaggggaggaccgacggatacaggatctgtaaaagtcattctgaaattcaaggcgagggtaaagggaagataaaaacagagccgggggaggcatgaagaggcactgaagaagaggaaactgggagtctgacagcaaaattcaacggctccccagtccgcgcagggtctcttcccgggactcaagactcaactgggaccggcacgaaccacgacacacagggtcggggggacgcggagaggaaagaacaaagagtggcagtcggaatgagaaagcggtaaagagcgaaaaagaaaggaggcggccagtccgtaggcgtgactttaactcaggaagcacacagagcgcagattttgcggataactggcttgacaagcaggctccccttatttcccattatgggcacttctggggagcaaa

SEQ ID NO: 1882478 - DNA, 4001 bp, Homo sapiens
aggatatattttgtaacatcttcgaggtgggctccctcacaagcatgtttctatacaattagtggtttgaggcagcctatttactgtttcatgccttcttgcctcttgttctcttctctagtcaggtttaaggctattttaataaaatttggcacagattaggcattgcttcagttaacttctgagagtagataaaataccatcattttcttttttttttctttttttgagatggggtctcgctctgtcacccaggctggagtgcagtggcacgatctctgctcattgcaagctccgcctcctgggttcacgccattctcctgccttagcctcctgagtagctgccactacaggcgcccgccaccacaccccggctaattttttgtatttttagtagagatggggtttcatcgcgttagccaggatggtctccatctcctgaccttgtgattcgcccacctcggcctcccaaagtgctgggattaacaggcgcaagccaccatgcctggccgattttttttttttttggactggatctcgctcactgcaaactcaagtctcctgagtggctgggattacagatgtgtgctaccacacccggttaattttttgtagacagggttttgccatgttggccagcatggtctcaaactcaagtggtctgtccacctcctccccctgctggaattaggcttgacaatgcctgttttctctttcaaagtggtaatgtcaatctaaggcttttgtgatcgtccacaggtgacaatctccaatagacttgtgtcttcaccttgctgcattgtgaccagcacctacggctggacagccaatatggagcggatcatgaaagcccaggcacttcgggacaactccaccatgggctatatgatggccaaaaagcacctggagatcaaccctgaccaccccattgtggagacgctgcggcagaaggctgaggccgacaagaatgataaggcagttaaggacctggtggtgctgctgtttgaaaccgccctgctatcttctggcttttcccttgaggatccccagacccactccaaccgcatctatcgcatgatcaagctaggtctaggtaagtagctttggtacttggtgtggcaaggagtttgtgcaactcgtctcctctatggatttgacttaatgctatttggtcaagtctcacatggcttaattttacttcaggtattgatgaagatgaagtggcagcagaggaacccaatgctgcagttcctgatgagatcccccctctcgagggcgatgaggatgcgtctcgcatggaagaagtcgattaggttaggagttcatagttggaaaacttgtgcccttgtatagtgtccccatgggctcccactgcagcctcgagtgcccctgtcccacctggctccccctgctggtgtctagtgtttttttccctctcctgtccttgtgttgaaggcagtaaactaagggtgtcaagccccattccctctctactcttgacagcaggattggatgttgtgtattgtggtttattttattttcttcattttgttctgaaattaaagtatgcaaaataaagaatatgccgtttttatacagttctgctttcccttgtgaagtggatgttatccttccctagcttcttcatccctccagctcttgctgttttcatgagcacagcaagttgagctggttttgtagtgaaaataacagaataccagtgagtcttaagagttcacacactgaagctaaaggcagtttggaaaaactaccatataataatgccctttcagtcaaccaaaacacaggaccaagtccactgcagtaatttaatttaataaaataaaattataagagcaaaaagttacatttctaaagtaccaaaacctgcaacaggctcatggaacagagcctagggatccaggagcataggaggtggtggtgctgggcagggctctgcatcccctttcctcagcacagcaccatcttcaccctcctgggaaagcagcattggagcctacaccgcttgtgcttttctcaccagggtaagaaatgcaggtatttgcagaggggagtgagtctggaaggtggcagagcacagctagggcaagacttaagggaacttgtgggaagagtaactggaacctacctatgctctcttgaccccaaactccccaaaacccctcactgaggactgtctacccccggggctcagaataaactgcttactggaagatgggtgacttaaggcaaaagggaaggctgcctcctgggctccccaatcccctgctgcagagctggtctgtgatactgagaaaacacctgcattttgccctttcagccagctccctcagaggttacagcagaaggggatggtgggagggtcctatttcacttcacccctcaggccctttccaccctcaaaccttctgcacaggagactcaacaggcacagccttctttccccgttgctttagacggccccgcgcgtagactctgagcaggagggcagcaaagaccacagccacccccagccctcccaccacagtgacagtgtggccatagagaaggcaggaaagaaggatggcaaaggcctggcggagggtcatgatgatggtgaagacggcagccccaaactgcccaatggtgtaaaagatgaagagctggccacatgcggagcagatggagagtagcagggcatgggcagcaaactcactgtgtcgccccatgaagcgggttccctccagtagggccccctgttctagcagtgagcccactgtgaagaggcaggagaagaaattgaccccaaacatcatctgcaccgatgacatcttataggcaaacagggcatcctgccagtttgaggtgaagctgtcaaaagcaatataacctgccagtaagatgaggcctgagagtgtggtggctggggagctgcggggctctggtccgctggatagcagaaacatgctgaccccaatggagatgagggtggctgtcaggtactcccagtgttcgtagctgcgccgagacacaagctttcccatcagcatgacagggatcaccttagaggccttggccagcacctgggtggggaagctgacgaacttaagagcttcgtattggcaccagctgctaagcacattggacaggctggcaaaggagtaccggtacatgggtgccccatgccggggctgcttgcagagaacacaggagaggccagccacaatcagtgccagcactcggttcattagcaccaggaactgcgagtccgtaaagcgctcacccggtgatgtggctgtggccccatagctgcgggtcatcactctttcctgcagcacaccccaagtcagataagacacctgttggggaaggtagagacaaaggagacaataagcaagataatgaaaaggtagacaaaaattgacctctctctcttcaggattatgcctaagtgattcaaaggaaaatatacactttttggttcctctgtagaagtttcttctcccctcctaagtctggattcaccttgtagggaatcaactgtgtgtgaaaaacctattcagggaggcaagaactctcagaattgggtatctgtagttcaacatgatattcaaggtggaactagtacccactgcaaaatgccatggggtcagcatgttagcactctctcacatgcagtactgggggaaggctgaatggctcccccacaattttatcagtgggtttacagtatgtgagacaccagtgcaggaaggaagtataataacggcacagtagaaatcacagagaatagggcaagaggagtcctctcttctgcactagacatcttgaaataacagcatgaactttcagtaccagtgctggagaggagaaaaggaagaaacaaaagggcatttcccccaaacacctcaaagatggaggtgcagtgtgcccctgggaggaggacacgaaacacaccagccagcaaagctctgggactggtaaaatggaaaccttcacag

SEQ ID NO: 1882479 - DNA, 4001 bp, Homo sapiens
tctggattccagggaaatggggatggaggtgccccaggcatgatccccagtccctggaatggctcagagctcactccccgcacctcccagttccacttcaatgtcccactgacaccttaaactcggctggtgtaaagcagagctcaccatcgcccccacacctccaactggctcctcctcctgactttcctggttgtcaatgaggccaccggtctcccaaccaccagcctcatggcctcttgagtcatccgtgactccccacagacatgctccctcctttccaataagctgacaattcctactgatcctttcccgagagggtccttccagtagctccttcctaacttctgtcactgttctgattcaggatctgactttcatgcctccgagcccccagctggctctattccagtcatcccccaacatacatccctctactctactacatacactctacttatggattaattttttttttttgagatggagtttcactcttgttgcccaggctagagtgcaatcgtgtgatctcggctcactacaacctccacctcccagattcaagtgattctcctgccttagcctcccgaatagctgggattacaggcatgtgccaccacatctggctaattttgtatttttagtagagacagggtttctccatgttggtcagcctggtctcaaactcctgacctcaggtggtctgcccgcctcagcctcccaaagtgctggtattacaggtgtgagccaccgtgcccagcctatggattaatcttctaaatcacaatatttctgacacctttaatggcatcccaaggcctaccaatgacctcagactccttgaggccttccagtttctaaagctaatcttcctgcccagacatctctcccgccactccccattatgaggcacatgctccactaaacctgatgtaattgctactaacctactttaatgtcccctgaaaactcctgggccttttcaccatcacacatgtgcctttctcacagccttcttctgaaatgtctttcttgccaactatgtccatatatcagaacctaaaccagtcttcaaagcctacccaagggggcacctcttccccacttatctcaaagctctgccttctctctgaccttatgtcacacagaggttggggggacccttactcagcacttacacaccattatggctctgtggctttttttttttttcttctaatttgtccccattctggtggaggccctctgagggcagggaccaggcctctttcacctgtttgctctatagcgcctagaacaatgctttgcccataaatggtgctcagtcctctttgaggatggacagatagatgaacagatgaacacataattcccccgaccctggccccccagcccagcgttcccagtctcaccagtgggagttgaccaccttgcacagggccaactcacagcacattcgcaggttggcctggtgctctgccaaactggatgctgtgcacttgatagggtctacctcgcagttttcctcagattcatacagagcacggatgaattctcctggggggtgggggcacaagagggtgtggtcacactttccaagggcagggaagggggtggccagggttggggaaatttcagaatcaggtgttggaggctggagtcctaggactctgggttaggaagtatcaagctgtggaagggtggacttggggtctggggtggacatctggcaggtttgggaagaagagggcctgagtgtgggccataccaatggcatccttgaggtatttctgaccaatcagtctcatatactcttctatggctttagtggcaagcgtgttctcgcggaatatgaggtgctcccgttccatgaaccggtctacctcagacatggccatgtctgaaaggaagtcctgaggcccaggaaaatccaagtgtcagcctctgcacaacccaatctcgtgaatttgccctgtcctcactaacccccaagcaagtgcccattcccaagtcacctttccctgagggcacaacactcaccttggccttgcctgtactctgcaggatgtgaactagtgcactggcaacctcctccttgcctttgacattcagggcgggctccaagactgcacacagcatccgataatggttggtgacatactctgcaaactctttatatagctccatgggcaagatgctcattgtctggtaacgtgctttcagccgcacagccgggcaacctcctttgcccttgccccctgagccaccccccgagccccctccccctcccgaacccatgcccccagatcccccactgcctgttggcagggttacagggtaccactgctctgtgaagtggcgcccagccagggtggccactggcacagtcaccaggccgacatagcctgccttgtccttcttgcgctttttgtctgagtcacggtacagatgcagccgcagggcacggacagccggcaggttgttaaactcgaagtgctcgccccagaagacggtgtccccagaggcagagcggggcttggaggtggtgcgtgcatacagcatgtcatccaggcagagctcacagtagtaccgcttcttggggggcagctcccgggcctctatgatccacagctttagcacattgtctacccggcggctgttgtcctggcatggtggggtgggcatgatgttaaagggggaagggacagagagacaccaaaagaggagagacagtaagaaagtgggatacagacagcaatcataaggtgagacggtgtactgggttgaatagtatcccaccaaaactcatgtctaccctgaacctgtgaatgtgatcttatttggaaacaggatccctgcaaatgtaatcaaactaagaagaggccagccatggtatctcattcctgtaatcccagcactttgggaggccgaggtgggtggattgcctgaggtcaggagttcgagccagcctggccaacatagtgaaaccccgtctctaataaaaatacaaaaacaaattagctgggcatagtggcacgtgcctgtaatcccagctactcaggaggctgaggcaggagaatcacttgaacctggaaggcggaggttgcagtgagctgagctcatgccattgcactccaagcctgggaaacaagagcgatattccatctcaaaaaaaagaggccatactgaattagagtggacccttaacccaccttataaaaactggtgtctttatatggagagggagatttggagacacagagatacaggatacagagacacacagaaggaagccagctacatgaagatggaggcagaaattagacggatgcagttataagcccaggaatgccaaggactgctggcaacctccggaagctaggaagaggcaaggaaggattccctgctacagcatcaaagagagcgtggccctgctgataccttgcttttggacttccagcctcctgaactgtgagagaataaatttctgttgttttacgtgacccagtttgtagcagtttgttatagcagccccaggaagctactgtagaagcgtagacatacactagacaacacaaacagtattggaaagatttcaaaagctggaataacaagccaaaaatattaatgtagaatttgaagggaactggaaagtcctgcagagactatcagaaattgtgaaaaaagaattgcatatagaatgggtaaagcttggccagatgtggtggctcatgcctgtaatcctagcactttgggaggctgaggcaggcagacaacctgaggtcaggagtttgagactagcctggccaacatggtgaaacctcgtctctactaaaaatacaaaaattagtcgggtgtggtggtgcatgcctgtaatcccagctactggggaggctgaggcacaggaattgcttaaacccaggaggcggaggttgcagtgagccaagatcacgccactgcactccagcctgggtgacagagtgagactctgtctcaaaaaa

SEQ ID NO: 1882480 - DNA, 4001 bp, Homo sapiens
ttcctaggacataggactttcagtgctaaaaccagtaaagttccaggcaactaggaagagttggtcactctgatttcatctctgttcacgggagctgccaccccagatggggccctctgctctggaagtgaacactgctgtgttttctgagactcccaccacagctgctgcatcctcacctcctttccattgtccatcaccatttaccatgcagctttttgccagcctccattggcctcaggtgtttggggcagcatgtacacataatttgtagttcgagaatattctgggtctcctagtttcactgaaaatggaatttgtagatatttaaaatttgatttattgttctgtataatttccaagaggagaagtggcacaattcagactaggccactaccacgtttccttggagctcaagagatgtgttcagttgtcttcatggagttccagtttaaagagctccacttctgttataattgactttcttaaccaagtaaactctgcagttatgattatggtgctcagaataagcagaccatgtatgtaataccccatagagaatgatgaaccaacaagatgtatttcaggctgtgtatgttgcacgatacaaaagcacatgaagatacacaaaaacacaagagcacattataagcctcaagtactatatcaatataaagtactaatattaatactataggaatattgataactaaaaaatcagaatgaaaaataaataacagcctgtatatggtgcaaatggaatacaacactaggtttagaatagtccccctctgaatacaaaatttctgtttcttgattatagccaaattcatgaagataagtgtaagaaatagtcagagtaaatgctcctctatgcaagtcgttgtgggagatgctgttgcatgggttattttatatgatcctaacaactcttcaaggtaagtataatgagtgtcaaaaaagtgaaaatactcaagatcatgcatcaagtaaatgccagaagtaggatgcaaaccctgagcatctctgggaccaacaccaatactcttcttgctacaccactccatctcttttcaatcaaagaaaggaattacaagaagctccatgcatggaagagaaaccttgagggagataataacttaaaacaggcagagtggagcagacaatcattgaattcgaaccagctgtggcaaaaactcaagtgtaaatagtataactgcagcaggaacacagagggagcaagaaagtcagcaactatatttattaagatttttaatgcaattgcttcaagaagctggagagacatttaagactccaacaacctcgtgcatctggtttcctctctcgacaggagcccattttgacgaagtgggaactaaattcacaaatgtaagaaactagaatggtttatcaaatttcttcctgctgttatgaaaaacaatgttgtgatagggaatgagattaaatccttcaaaaatcaaatttaagttaaaaaacacagagagagagagagtggcaggataactggtctgccagagggaacagaagtatccggtctaactcttggaaaatggtttgtagaaagaaagtctgtttcttcatgtcactgaaaaactactaaaatcagagaagcttcaagcatttgaaagcgttagcccatagccccttcccaaattccagacacaaggcatccaaagactcaggtcaggatggcatcgtcagaatcatcttcatctcagtcaaccctcatagagaccccagtgttcatgttagctcttagcttctgcatagtgcccccataaatcggaagagactgagggttgtagcacttcagctaacagaaggaaattgcaccatttaggaagctaagtgatatttgaagggcatatgtagctatgatcaaaaataccaggtttggtgcaaaagtaattgccagttttgtcgttacttttaatggcaaaaatcacaattacttttgcaccaacttaatacctccctgcagtgcataaatattaatttcactaagttctaactattccaataacttattcagtagggaaataaaacattaaccctttatctccagatacttgtgcatttggattccattaaactttctcttaactgcattagcccatattgacttcttttttctgtaaaaaattacttctatgggtgatgtaatttgacccacaactgcttttttgtgattgtttatgcaagtaaactctgactcaaaagaataagttctttaagcattggagccaaactgataatccagagcaagtacttaacatatatcaattcattgatcacaagaaaagggaaattttaagggagggcttggaagggaaagagataattacatgcaaagcatggatcatgctggagaagagaaagacttcatgaagcatccaaacactggaattcgggcagccaaaagtttacaaaggaatcctgaaaacccgggagaagggagggcagaggtactagtagatagaggaaggtatgagaaatattgactggtgtgttgagatatttgtatgcactgaactaaacattgaattaaaggctatcctcttcaatagaacatgcagcttcaggaggtacacacatgaatagcaaagaaagagaggcacattcccctgtccagaaaggtcatcctcagagaccaatgtggtgacggttgtcaaagccaacttactcttttatcccaaaaaggagtatgagactatgtcaagtacgaacacaattcatccaatagaaatcaagccctggttgtatctttaggccacaatgtgttgcctttccttcactcagtttactccatcttcatctttctttttgtctctagcattcaaatttaaggaagaaaactcatatttacaaatgttataagacctcatatgattgatgtgtgtgtgtgtgtgtgtgtgtgtgtgtgtgtgtctgtgtcattctccatttcacaattttcttaagtacagagcattaatatcgcttttgttaaatgagcaaagatgctaaggaaatgaccaatcagaccatatggaaaaacaatttttgtccttaaaaagcttaatcatcacatggacaaactttgaagatggatgcattgtaaaacaaaattcagatgaagcagactttaatgtttctctttactgattttgttctctcttagccacctcttggcttttgaggggaatgaacactgaatccaagatgagacttttaaaatctgagtcgccctaaattctgtttcgcagctttatacttgatactaagaaactgagttacaatgctgagaggtggcagagcaaatgagaagcaaggaatcaaaggtaaataagaggaaggccttttttacttttattcaatttcatcaaagctgtaaatgttctagttttttaaacatatgtgcctaactgattacactggaattaaggagaggaggagaacaaggtctgtcatagtctaaaactccaatcagggaaataggaatgtcctctctatcctccaaaatggcacctatttgtttaattttcttctattcatctaaccaagataaaatgtattgcacatctggcatcaagtaatctgagttatacacaataaacaaggcaccacctttgaacccaaaggagcttataatcagttaaaggagaaactctaaaaattattatcatataattcaaggtggtaaatataggaagatcaaggcagtactgaatgtgattggagaatttatagtccagaactccagactcaaatttcaacatttttttcactatattggctgtattcactgacttctttggtaactggcttgcagtttttctcttcatcctaaattctgagtgactttattatcttcatagccagtctcacttcatggcttcagaaacttcctcttccacttcactttggctacctcctctgtctcagtccattttggctgccataacaaaatactataatctgcatggattataaataagaaa

SEQ ID NO: 1882481 - DNA, 4001 bp, Homo sapiens
tttcttttctagaatattctttgatatttaacatattccttcttttaaatgaaatttgaaatcatatcatcaactttaaagcatcatgttgggatttggtggtattgctttaaacctgagaaattatttcttgtgctacctgggataaagtaacaaacgatgactggaatattttagcaatggatattgtgagccaagctggactacacgaattttcgctcagaacagcctgaggcagatatgaaaggagaggccaatatacatcatagccaataagaggactgtagatccatatcagagagaaatgtcaagaatcaggtccaaggggagtgagtcaagccttgaaaggtacgaagactattaagacatttaaaaccaaggagcaagaatagaccagaaaacaggtgctacgtggccattggtgcataagcaaacccttggttcttcctcctggaacttttctacaactccattgactttcccttcatcttagcagtattgtcctgtgcctggctatcatttttgtaaactggaaataagcttttctgatccattgtaaactgtcctcatgaatgaaatccaagcatctctgagctttctccagtcttcaatgtgatctcagtgtttaatgaattctgtaaaaatctccagcaaattgagaatgcctctttccttgcagctgcctcattctgtattttttaataggttgaagaaacatttgctttataatattctgtaatattttgtttcaaaatgtgtactcttggaatcagctgtaaatcataatatatacctttaataattttccaacttcaaaattgcttttttaaaaaaataaagaagacatgatgctctcttaacgtgaaacactgttttctaagactaaaatattttcaacaaaaaatttcaggtatattccattttcttcagtcgagatcaagatagcagagaacagccagataagttccccatagatctgtctttactcaaacgctgctatgagtccaaacacattttatttatgaatggtttttgaaattctccagtgctttttatttctattagaaactctttttacaaatgacatctccatgagtaaatatttaaaagaacaagtgtcataaagaactgaatgttgcatccattataatactgtattccaatgttagatctcaagaccaagactccttgaaacttcaatgttatctgcagaattccagtttgaaagtgctttcatgttcttaatcttttagaagtatttttagtagacaattatattttacctgtctatcacattcctttggaggaacttcttctcctagttttagccatgagagccaatggtagcagccatcatttatgtcaccccacattcttggccacatcgctgttcaagaagagagaccttgaatcaacagaggatacatggaattccaaggcacttgaaaaagcctcgtgtaacagacactcttggttctttgtgccactccactggcgtacccatttctgcatgcctgtgctcttggctctatgtgctttttgtctaagagctcacatctgtgactcttttctgaggtctagcctaggctactgaagatgctttgcctttatgcgttgcctgcaggcaagtgcaaagagtcagaagcacttgaaattcatgctccctggggtggcctttggccaatgcctgactgctttgggagtttaaagcccaggaaacttgtctggtgtctggataactcagagcatcatttatacactacagtgaccttgcaggataaagctaagtctggaattttcctgaaatcatacccttgcttggcttcttccccattccctgtcctgttccctgtacttcccccgagccccctacctcccatttcctttctcttagagcactttcattatattagtttggtgcaaaagtaattgccagttttgccattacttttaacggcaaaaaaccccaattacttttgcacaaacctaatacacatcacacgcgcacacacagcctcatggcagggtctacttctagggaacctgacccaagcagcatggactcaggctgggccagtaagggagtgtctttccctgagatgttcatacttggagctgggaggtagcaagcttatcaggatatgagtctgaagctgctggtggcttgagagaatgaagctgacccacagaagaagcagaaacaacactgatgctattgtagtctctgcctccagctgcctttgaggctatccccactcctaccttctgaagatgtggctgagatagttaagttaggttcctgtcatttgcatccaagaaaaccgtaactaaaggggtcaagactaaagagttctcaaatcctaaagacccttttcgtggagaaaagcacagttatacataactttgtatgcaattgcaggggtacacagtcccattccttatagtttagctcaactatattagcatcttacatacacttacaattttataagcattaaatacttctgggttgcccatgacttttcctgacaacagagtttgccttgctaatctcttagacgtttttgagaaaaacaataaacaggacttctgtttgggttttttccccaagtaaacacagtcaccatcacagaaatcacaactgatcaagtcaataaataaggaagttaaaaaaaaaaagtatgtgcaagcagagtacatattcaaaactgtgcaaatggccaaaatggccgggcacagtggctcacgcctgtaatcccagcactttgggaggccgaggtgggcagatcacttgaggtcaggagtttgagaccagcctgcccaacatggtgaaatgccgtctctactaaaagtacaaaatttagttgggtgtggtggcgcatgcctgtaatcccagctactcgggaggctgaggcaggggaattgcttgaacccgggaggtggaggttgcagtgagcagagatggcgccattgcactccagcctggggaacaagagcaaaactccatctaaaaaaaaaaaaaaaaaagcaaatattcacatgaatagaaaacgtaggaggcaggaaagatgtatcactggaccattggactatcatctcacattcttttttttttaattattttttgtagaaacggggtctcactatgtttaccaggctggtcatgacctcctggcctcaaacgatcctcccacctcagcctcccagaatgctgggattacaagcatgagccactgtgtctggcctatcatctcacactgagcaacgtggaagtgactgtagtacatctttgattgggaaaaaatatttacactattgtaagatcaatagaactatgacttaaatccgacaattcccctagagtttatgaattttgtcattttttcatgtgtccaagtgaaaaaacaacaattctctcagcatagttgggaaagctcctgtcttctccctgccctgcccccttcagcaccctgaccccaccccccacacaatacattatgtcagaaagattaaatggcttaacaccatcaggcccaaaatgacagagtcatgttcagggcctacatttctttttttcttcctttcatttttagagatggggtcttgctttgttgcccaggctggagtacagtggcacaatcatagctcactaccacctggaactcctgggctcaagcgatcctcctgccttggcctcccaaagtgctgggattacaagcatgagctgctgcacccggccccacatttctgagtgctagttcacttctcagatgcacctcacattgttttccctgagccttctgaagctccccttcaaccatcaagaaaccctcatggtgctgagcatggcagctcatacctataattccagcactctgggaggctgaggcaggagaatctcttgagggcaggagtttgagaccagcctaggtaacatagcgagagcctgtctctacaaaaaataaaaaaattagctgggtgaggcagcacgtgcctatcat

SEQ ID NO: 1882482 - DNA, 4001 bp, Homo sapiens
ctttcgccattcaagttgctaataaattcagatgtttgtaataggttaacccaatttcactattctaaacaacaataaagagctgaaaaaaagctactatgttggtgagaagagggtgcttcgtggggacaattcttggctcctcttagcctaattgggctcaactttggaaagtcagtctcttcatcaagttataggattagaaagagatcaaatagaaatgcaagattttaattcagatctcataactgagagtctgggttgagttgcccactgcttggatgtttgcaggctatccatgaagaaatattaaaacattttcagttaaacaatagggcagtggtaacataacttacaatacatgctttttcaaaccatgttgtatgtcttaggctgaatatgttcagaatgccattgatttagatactttatttctgtgtttgaataccagagtaagacacctattaccataattggaaatttccaaatgtaaaatttcttcagaatcccaatgctgaagagtacatggctttaaaagatagcatgcaattttgttttattggttttcttttatgcatgaaaaattgtcagtcttgtgcatgactgccatcaataccccattattggttagagattagagaggattttgagtacaggatgtcttggttctggtagaacagatacactcagagtaaggaagtgactaggtaaaatgtgtcagtgcatctctgtgtaatttcctctgagttgagcatttatttaaatgaaataagtaaggaagatgcaatactgacttgaaagcttaattttttttagataaactttgtgtttggaaataatttcaatcttgcagaaaacttgtaagaattagaatagaacaaggtacatcataaagtctttagccacatttacctattaacattttacccaatttgttttattatttgtggtctctcttcatatctacatatatctctataatacaatatatgtaaatgtatatatactcatactatttttctgagccatttaaaagtaatttacatgtatattatggtcctttatcactaaatattccagggcacattcttagtacagggatacttttttttttttaaactttttttttttttttgagatggagtcttgctctgttgcccaggctggagtgcagtggtgcagtcttggctcactgcaacctccgcctcccgggttcaagcaattctctgcctctgcctcccgagtagctgggattataggcacctgccaccacacccagctaattttttttaattgttttatttttagtaaagatggagtttcaccatcttggccaggctggtctggaactcctgacctcgtgatccacccacctcagcctgccaaagtgctgggattagaggtgtgagccactgtgctcggcctagtacagggatattttcttatgtaatcatagtacaactatcagcttcaggaaatttaatatcgatacaatactttttatatgggctagtgtccatattttaattttgctaattggctcactagtggcccttgtagcattttgactcctcaatacaggatccagtctagggtcaggtattgcaattagttgtcatgtttctttagcctcctttaatctggagcatttccacaggctttgtcttttttgacattggcgtttttgaagaatacaggcccccatttttttttatatatatatataaaacacctctcattgtgtcagatgcttcctcgtggttagattctggctaacctgaatgtgttcttggctgacatgcaccgtagctgatgggacacatccagaggtgaacgatgggcatctccccctcattggtgatgttaattttgatcacttagtcaaaatgtttcctgggtcctccattatataattattaggttgatgcaaaagtaattgtgatttttttttccatattttaaatgggaaaaactgcaattacctttgcaccaacctaatactgtatttccccttacaactaataagcaatctgtagggaggcactttaagaccattcaaatgtcttgccttgcatcgaaatctcccctcaattttgcatccattgatgattctcttctgatttgatctttgctctaacgatgatgtgcaggctttctaatagtgaatatcaggcagccaaaaggtgattcattttataatgtgtgtaggcttagtgagggtggcatagattggaactcactagagctcagaagtcagtttattccctgtttttcttctttttgtcccatcaacatggattgatccacacgtgggcttctgagggtttccttcacttaacttgtaacttgatttttctttccctgaccccctaacccttgggaaaggaaggggagggggcaaaagaaacacctacctgtgaagtatcagcaaaacagtgtgtagaaagaataaataaataaataaaagaaggcaggcagccaactctgaggagcttgcagccccgccccctgccggggtttgcacttcggggcccacaattcgcacattaccacgggataaccaggaagatagcagtgccgcgcctctctgcctcgggggggggggctgcttttcctgtagcggaaactatttgtgctccccagtaagtccaggaacaatctccacttattataccagctcagaacccaggactgtttacagcctcacgcagacaagacactaaccctcactcattactgtcgctgtggggatttatctgcaccacactctccttgcatgtggcccacattttcatccagtaaaatcacatgttgttaactcaatatatacagtgaaaacagcatgaataatggaacctttaatccttatttctcaaaattagatttccactttatccttctcccatttcctctcttttaaaaaattcttctcagtgccaagcaatagatgttgtccagaccttaactctaaggagattctatggtatttctattccattaccaggtacctttgtggattcaatttctgggtggattgattgtatttctttccctggttgcttcacatgtgactcatgagaaattaacatcatccttgtcacagatgatgagaaaaagagccctattgacacggggtacgtttcaacaaatgtaataaaaactttaggtctgattaaactcacacctgtaatatcagatgtgaagacacactcataccctgtgtctttatctccgtcttccttggtaaacagatttatagggttggaattatttttggtattaaatcagaaaccaacaatactaaatcaaacttcaaggatggggtttgtcagagactggcgtgtggcattaagacccctttcttaacatgcatagtattatacattatgcagacaatacgtccaaaggttgtgctaaggatattcagcttggtaaattttcattattccagagatgggctggtaaagcaaaatgaaccagatttacattgaccattaagagggtctacatgcatagactgtctatttcttttaaaggtttagaaatggttgcccacattttttaagtaccgtggctctgaatatctgagtaaacacacacacacacacacacacacatatatgcgtgtgtgtatatatatgtgtgtgtgtgtttgtgtgtatatgtaatacatatgtacattaagatatatgtctctctatatatttgtgtatgaatcaatgatttgattccatgggttttatggagcatgtcatagtggttaagaggcccattttgggagtccactgagttccagtcctgactctgccctatttgttaggtagccttggcaaagtttccctatctgtaaatggggataaatgtgaacccttcttgcaaggctgtcgtgtagactgaatgtggtaatatatggacaaggccagcatgtgtctggtgtatgctaagtgtacaatcactattagttgtcattaccagagaggcagtttagtatgaagtggatg

SEQ ID NO: 1882483 - DNA, 4001 bp, Homo sapiens
ggtttactgtcaaaattattcaatggcttaccatggcccagaggataaagtctaggtttcttatcgtagcataaaagcttttttgcatttccatgattactaacgaggcaatcaaatagtcatatgtttcttggatatttagataatcacttttgtaatgtgcccatttgaatcttttgaaaaatggacttttttttttttaccttttctgatttacaactccttttttttttttttttttggttttgagatggagttttgctcttgttgcctaggctagaatgcaatggcgcaatctcggctcaccgcaacttctgccttccgggttcaagcaattctcctgcctcagcctcccgattagctgggattacaggcatgtgccaccacgcctggctaattgtgtatttttagtagagacagggtttcaccatgctggccaggctggtcttgaactcctgacctcaagtgatctgcccgcctcagcctcccaaaatgctactaatttttgcatccaaaatgattgaatgatggtccctaataattaataacatgtaagactttgtggtgctaaaagcttctgactttctaaagaagtttgggctgagtccaagtagagacttctcacttggagacacttagcaacttccctttccggccttcaggatttcttgtcagccttccttcttagatccacataggccagtctaagtccagctgcccctcacaagaagcctgggctgttaagtccaaatttaggctcctcatttggagagagttagagctccaccgcctcaaacagtatatttctttaggagattgccaagcaggaaaaatgcttcaagcaatatctaattactaatggaaatgaaatgaatgacttagcttcccactctttactgcattcaagtgatacccaacatgtttaagtgctgctctgaaagctcttttatacaaattatttatataatctttcatcagccttagtggactggatccaaatcctgcataggtaataacaaactgttgccgatcactttgacatcaatgagatataatgtcatcttttctctgcggttacatgtgcataagtgttatttcacttacatgtatacactgggggagaaatcaagtaggaatagatcgtgccaccagctagaagtggttgtttcttgtagctgagctggattctcccaaagaagtgtttcactaaagtgtttgcttcagaatggctctgttctgctgcagtgagaagagacttccagtgaaaacatttaattagctcccaatttagacggccagaatgatcagtcagcctgtgttttggaacctgcatttgtacattccttgggattggttagtgagttttcccagcggatgtggtcaaatgtgaatagtttgtatgtaattcacatcagagaataggtttttctccagctccttgtaggacagcgagaaagggattaggaaaaagtgagcaatatagcggtaatacttctctgtcttttccgcaaccaataataaaggtatctagtctcagaagtcacagagactaggaagaatatatggaaagtgagtgagcaagagtcaaattgaagatagtttgactgttttcactccctttcagggtaatcatgatttgggtagtggctttagacacactgaatattaagtaaatttttttagctaatacaaataaattgctatgctagagtttgtgtgtgtgtgaatgtgtgtgttgtatgtctgtgaaaaattccactcttcagtcaaactaacctccctctttatttctgtcacataaatttagcatcctttatctgtttggttcatgatgggaatcttttaatcaaattctagacagtagttataaattagcctaatgagtttataatacttcgctaagagaatatcttcagctgttctattaggttagtgtaaaagtaattgcagtttttaccattacttttaatggcataacctgcaattacttttacaccaatctaatacattccttctggtgaaaggggccttaggaagccgagtgcctttggatccttcccagcctagttctttctccttcacacaacttcaaatttgtctgtcatttttctaatcctagcattttatgttctaaaaatagcaaatagcttatggatccctgcattgtctatgacatttcacattactgtgcttttgaccatgaacttttcttgcccgtctctatcggggcgaagggcctctcctctgagttcccttctacggtcatgattaacacaatgcctggcaaaggaggttctcaacacatttgtgtgaatgaatacataatatcagcaacatatattgaattatcttccttgtgtctctgtttactagaatttgcacatcttgagatcaaggactctgttctattcgtggtattcatatttgtattcccagagttcagctggaagcctggatagaatatggagggtgcttaaaaatgatatgattacagaacagatgggaaacattttaataccttcgaaacaactagaactaggcttcattctgggggcaataccacttctttgaaatatttcctcatgtcagaatttcccaagacaccgaagccaagagctgacagatgaagatgtgtcactgtggaatgtgactagtacacaattttctcatgtcctcttgcctcaggtgatgcagctggtgagagggaaagagtaggcgatttacaaaggatatttgccagtaaatacaacagtctctcagagcttcaggagatgaattgacataatctgataaagcataagagtgtgaaggttttcattaagaataatttgtagaagaaagttttgctaatgtcaaagatttgtggggaagaatcggaacagaaacagaaagtaaaccaaggctactgtcagtgaaccatttgtatcgtaatagtccatcaattgaaatcttgtgtttccttttcaaatttcattctttttgatgcatacaagtgagttaaagcaaggaaggaaagaaacatacacgtgggcaacatggctaattaatacataattgctttgattcatatgccccattcatgcagagcgtatttttgtaaaataaacttcgtgagctttggaattggcaatgaactcttgagttgagtgtaaaagataacattcttggaaaactttttgagacattctagtctgtgtttcaaaaatgaatatgaataacaatgagaaggctttatttagaggaacctcatatctgtgaaagtctatattttttaaatggcctggatatttgtttctttgttctttatcatttagcaaaacagaaagaattttatttctttggattctaaaatgtaataccctacttgttgtcagatgcccaaatgagcactggaacctgggtctccacagaaaataagcagggaggactattaaagccaaaaacaaagtagtctgcagcaaaacaaaagacaagtacttctgaagaataagccctctgagaaaaccaagagctaagtgaggacattgctgtggtggtgtgggtgcataataggagatgatggaataaatgatctcatcaggtttctgataccttggttttctgggttattgtaataggttatcattattctgaagcaagcaatcttcgttttttcttacttgcatgggaaacacaattactcataagctgagaatatctgcagaagcttgaaagtagatgtatcaactacttaggactacttgatatgcttagcagaaagttattgcaagttttggctagtctattaatgcacacaattacaacacaaatcccaggttttgatttgtgcttcagtaaattcacactcatatcatacctttaatatgcatgagtttaaaaacaagacagccagatagaatataaattgacctgatcatcagtaaactttaattattttcttaggtttattgcagattccctgaaaacattctaattagtgtctaaatacagaaaattgaact

SEQ ID NO: 1882484 - DNA, 4001 bp, Homo sapiens
aacatacaaggaaagaatttatcccatgcttatgattgtagggtggcctgtaggtgactggcaagtcacacaaaagattagtatttcagcctccattatcctttccacccctttcatctgagggtgtttactgagataatgagagtcaaagtcacactcatgtgagggtgtttagggtggtaataagagtcatagtcacttaggcccctaacaatagctgataaacagcaggagctaagaaaacagcagatgcaaagttgtgcttccatttttagatacagttgatcttctttactcatggactccctatttgtaaattatcttacttgctaaaatttacatgtaaccccaaaatctaacactcaaggtgtgctaaataacctttgttcaggcatgagttatagtgatatttggctgtggcttcactgttaatggatcaatatatattttaaaaggtgttttaaacagaaacacacataaaacaaggttatacattgatcagttggtgaaaatgttgtgaccagagggtgtcaggaacctagctctgtattctccctagaccatgcaatacaacgaccacgaataatgagaactgactatattttatttgctgctcaacctttacttgacagctatggtccccaacaatgtagactatatatccatcagaaaagaaaatatagctgggcacagtggcttgcacctataatcccagctactcagaaaactgaggtggaaggatcacttgaccccaggagtgtaaggttgcagcaagctatgatggcacccctgcactccagcctgggcaacatagccagactctatctctaaaaaataaataaataaacaaacaaacaaaataaagacatataaaaacctactttattgtttttttgtgtgtgggttttttttttttttttttgagatggagtttcactgtgcacccaggctggagtgcagtggcgcaatctcagctcaccacaacctccgcctcctgggttcaagcaattctcctgcctcagcctcccgagtagctgggattacaggcatgcaccaccacactcggctaatttttgtatttttagtagagacagggtttcaccatgttggccaggctggtctcgaactcctgacttcaagtgtgatccacccacctcggcctcccaaagtgctgggattacaggtgtgagccactgcgcctggcctaaaaacctactttattgttaaagagtatgtcagcagaggcttaaccaagtggggaggggatagtgggtacaaactgacttctctctcctgcatcaattatctcctttaatctttataataattctatgaagtacgctttgtcattctcattttacagatgaggacaagacagccctgagtggttaaaatatgtattaaaagtcaaacactaggaagtggtgaaggtgaacttcaaataagggaatgcctaacttactgaaccacacctctgacccatatgatgggcactgctgcctcactgggccgtttggctctgggaacaatgtggctctccggctgcccatgagaaacctaaacctaacacaaacacattaactccggggtttccaagactgaaatttccttttacccgctctaccccccagccaaatatattagagatttgtaaccagaatatgtcaactgagtcatcaaaaccttattagagaatttagaaggtatcagtatagtttctttatccaagaaaagcacgtacataagttctacccaaaaagaacgaaaccaaatagaaaaatttgcccatgattacacatctaaaatttgtcagaattaatgtactgataaatatgttgtaattaaaatatatgattaatatattccagttacattttctcaagtctgttggaaaatatatgtgaagtattaggttggcacaaaagcaactgaggttcttgccattgaaaataaaggccaaaaccacaattacttttgcgccaacctaaatatatagtctgaaatggaataataaatagtattaaataattaatagtaccaagcacaatgtctttcataaagtaggcattcgacaagtttaccaaacacatagacctatatattctacttcggtcatatctaagtatattttattactctgagtagaccattaaacacacacacacacacaccttcctcccaaaattcactaggcgaaacatctaaaggtaggcaaagaatactatttagtattttggtcataaaatgttttctgaaagaaatgagaatctttaaaactgtgcttaaggagctacaggatgaaaaatgcaaatacctgtgaacacatagacacacattcgccagaataaacaaaatctgctcaaccaccaaggccaatgtctagaatttgtaaatatccaaatgcgacacttcattttataagtaaaaaagacatgacaagtaaaagggcaagtaacaatttattcagaaattaaatatcagcattcatggatttggcctaataggactagcataagtttggtccaatttcctatatatgcactgatgatcctaacaatgatctggagttgatgaagaactccagtgtgatatatgaatggtatgatgtaaatgtaagtatactatatgagaaagtgaaaacttattaacccctatggaaacttctagttaactaaaataattcattctctaataatttcgcataaataggaatttaccctgttattttactaaaattatcaattttattgataatttaaatattagtaatgcactttatagatgaaatgttttactttccaacttcctcaaactttggtatagagatggtacatgtaaataaggaaatacagaattagcaattaaaaaaatcaaagtactatctcctttacaattaaatgaggtagcacatggtagccaagtctaaaatatccaaatcccacatatgattgttaatcactaagtcttgtttttccatgtactatagatcctttgatagtttcagcttccatttgcatctcaagataatagtgtaagatacaggataaaaaattcatatattcaacttcactactttttatacattctcgttgaagttttggtagaaaagaaagatgtaatccttggtgaaataaggttacaaatgacagttgttcactgatgtaatttagttaaaagttaagaatcagagattttctaaaatttttgcttggtcttaaaggttaagcataccaaaatacaactggcaatctccaacttgcaaatatcattgtttcaaaaattcatttttatatattaattgattggcagccaaagaatattttccaatattttgaaggaccattaactctctaggtcaatctaaaaagccccctatggtttagaccacacttgacatataaaatataaacctaatagtttgatatgattcccccatatcaaactaccatttataacattgtttttctttatttttattttttaaaaagtagagatgggatctcaatgttgctgtttttatttatctatttatctaatcctgaaatcagttagtgattgtctcccataggtgtctatctccaaaaaagggacatggggcaccaattctgacatttacttaatgtcctttacattctgaagtgggctgcaggatagaaacttcctgtggtgaataaaaagaatggcgttacgaactcccgtcattcacatcctttccatttcatggcataatattcaaatttatttgaatgcttatgaagattttctttaaaaaaaaaaactcacaagatcaattgaaagggcaaaataacagtattttatcaatactcccctggcccccattacctcctattttcttccacaaactaattagctttatagacccaggttattcttcattcccatctcacatttaagagatacaaaattttcaaaaatatcacaattttaaaagttaaagtatagggaacttattaattaaaatgaagaaattactccagtca

SEQ ID NO: 1882485 - DNA, 4001 bp, Homo sapiens
gatcctacagatttgggacttcaacataactttttggggaacacaattcaaaccacaactactgaatgaggttaagacatggtggatgtgataaactgggagaaaagaaaagaggtcatgataatgtcaaagaacaagagtagtagaaaggagggtggttgaaggaataagtggctctagtgagaaactggaatattgaatgcctatatataggtcaatacctgttgaatagtacacctaaaatcaaaacattttgtgtatataaaatatacctcactaatggaaaatttttaaaataaaaaatgaattattgcaaacagggacttctgggaaaagaggatggatctaccatacacacttatattcactttcttgattttttttttttttttttagagacagtatctttctgttgtcacccagactcttgagtgcagtggtacaatcatatcctcaatacagccttcaaatcctgggctcaggtgatgctcccaccctagcctgccaagtagttggaactacaggtgaaagccaatgcacctggctaattttttaatttttggtagagacagggttttgctttgttgccctagcttcaagcaatcctcctgccttggcctcccgatgtgctgggataacaggtatgagccaccatgccagacctggtttttttttaaaagacatagatccataaagacaaagagggtgattaatagaatattagatggacaaacaaatggacacttggtaattgctttaggagacccaagaaagtttaaccctaaaacagaagtggagacagtcaaaatgcaaccaggggccaggcccagtggctcacacctgtaatcccagcacttttggaggccgaggtgggcaaaccacgaggtcaggagtttgagaccagcctggccgacatggtgaaacactgtctctactaaaaatacaaaaattagctgggtgtagtggcaggcgcgtttaatcccagctactcggaaggctgaggcaggggaattgcttgaacctgggaggcagaggttacagtgagccgagatcgtgccactgctctcctgcctgggtgagagtgagactccatctcacacacacacacaaaaaagatgcaaccaggttgagctgcaccaggtagttctgttagaggatgaaggtaggactagaaaacaagagagttggttgaaaatctgtttaagaagctgttagaaggccagattatttttctgcctccatgcagctggtgactgtgtctcttcccttttatcaagagaaaactggaggtgaggtctagtcgatgaagaaaataaaaccagagcccttggactctaggattccagaacagagaagcaaaacattaccatattaatataattaattaacatatcattaccataataatatggaaaatcaattgcaaatgtttatactgaataataatatatccgtcctttgaacacactgtataccaaggactgtattagaaacaatagggataaagaaaagaaaaaaagagtggcccattcttacaagaaacttctagcccagtggggaggacagagaaatatattaatagttaattgcaattcagtgtgttaacagctatgaaagaaaatacaatgtattggagtccgtcggaaaggtaccaattccaaattaagagccatagtccttttgaccatcattgtttacacctatcctgtgtccactttggaaaacctattctcctgacagccactagaaggggaagtcccacagatcctgggacatggcactgccccatgactaatttgaacagagagggaggcctcacagaaatccagcaacccattgactcagctgggactgaggtttccttggcttggtttgaggttttctgttgcttgagaattctgcagcagacatagctggaagatcatgacgtattaggctggcgcaaaagcaaccgtggtttttacagttaaaagtaatgacaaaaaccgcgattacttttgtgccaacctaatagaaaaaggggcttagggagaccatgctgtgctgtgcgcaaggtgagtcagcagaggaatctgccatacacagaaaggcaagcacggagcgagcttttggaaagaaacggagacaggagggaacatgaagtgacctgattgtcgggccctagcccccacctgcgtggctctactctccctcacctactgtctttgggttttaaatatttctttattcttaaaacaatgtccctcctttttgtcatgatctaattttagttggtttcttttattacatacaaaaagtactggggtcatagaagacttcctaaagaaagtgatgcctgagcgaatcttgaaggaccccccaagatttaggcaaagaataagagagaagataatatttcaggatgaagaagccacatacacagattcataggcatgacagtgttgcttcttccaagacctgcagtgcaagcactcgaatgcactgaagctcatcacagctggacagagagaggccagaaatgttcagctgacatctaggcactgaatgaatgaggtgattaagttagcgcttcgcccacccgtatcttggaaaattcttttctacaagtcagaaaaagataaataagattactagaaagtttggcaagccaattaaagacaggatgagttgtgatacttggttccaggagaaagatttacaggaataatactatgtgtaaatattctatgtacaaaattattccaatgggagaaaacagcctccaaaaatatcttcattgtctctgaactataagtaaaatcattttaagaaattaatgtaagatgaatggaatggtaattacgtacaagttgcaaattttccatgtagatctaaaatcaagtaattctgagaacttgctatcaacaaactgaggatcaaatattaagattgactttattatagcataaaaacattaaatataaagaaatctcccatactatttggattctcatactttttctttagaaagtgtttaaactgcagccggacgcagtggctcatgcctgtaatcccagcactatgggaggccgaggcaggcggatcacgaggtcagaagattgagaccttcctggctaacacagtgaaaccccatctctactaaaagtacaaaaaaattagctgggcatggtggcgggtgcctgtagtcccagctgctggggaggctgaggcaggagaatggtgtgaaaccgggaggcagggcttgcagtgagccaagatggtgccactgcactccagcctgggtgacagagcaagactctgtctcaaaaaaaaaaaaaaaaaaagaaacgaagtgtttaaactgcaataattttattaaaatatattcaaattaaaatgaaatttgaagattgaaaaatgtttcaataactttgtttactattggtaatgtatttcctgactaggaaaaaaatgaacattaaaaattaactcttttagtaaatcgatttagaaaatcaaggcaaaaaaatatatatacgtataaatacatatatgtgtacatgtacacatatatatgtacatgtacatatatatgtgtacatgtacatatatgtgtgtccatatatgtgtatgtgtacatatatgtgtccatatatgtgtatgtgtacatatatgtgtccatatatgtgtatgtgtacatatatgtgtgtacatatatgtgtatgtgtatgtgtacatatatatgtgtacctatatgtgtatatatgtgtacatatatatgtgtatatatacgtatatatgtgtacatatatatgtgtatatatacgtatatatgtgtacatatatatgtgtatatatacgtatatatgtgtacatatatatgtgtatatatacgtatatatgtgtacatatatatgtgtatatatacgtatatgtgtacatatatatgtgtatatatacgtatatatgtactggagtgcagtggcgcaatctccactcactgcaacctctgtctcctgggt

SEQ ID NO: 1882486 - DNA, 4001 bp, Homo sapiens
ccacaaaaagaataaaatacctaggaatacagctaaccagggaggtgaaagatcgcaacaataagaattacaaaatactgctcaaagaaatcagagatacacaaataaatggaaaaacatcccatgctcatggacaggaaaagtcaatatcattaaaatggtcatactgcccaaagcaatttatataattcagtcctattcctatcaaactatcaatgacattcttcacagaactaaaaaataaataaataaaaactattttaaagttcatatgaaactaaaaaagagtccgaatagccaaggcaatcctaagcagaaagaacaacgcttgaggcatcacactaccaatttcaaactacagcacaggatacagtaaccaaaacagcatggtacaggtacaaaaacaagcacatagaccaatggaacagaacagagagcccagcaataagcccacacacctacaaccatatgatcttcaacaaagctgacaaaaacaagcaatggggaaaagaacccctattcaataaatggtgctggataactggctagccatatgcagaagattgaagctggacttttccttataccatatataaaaatcaactcaaaatggattaaagacttaaatgtaaaatccaaagcaatgaaaaccctggaagacaacttaggcaataccatctggacataggaatgggcaaaaatttcatgacaaagacaccaaaagcaaaaattggcaaatgggatctaactaaacttaacagcttctgcacagcaaaagaaattatcaacagagtacacagacaacctacagaatggaagaaaatacttgcaaactatgcatctgacaaaggtctaatattcaacatctataaggaatttaaatatacaagagataaacaaccccattaaaaagtgggcaaaggacatgaacagacacttctctaaagaggacatacatgtggccaagaagcatatgaacaaaagttcagtatcaattgatcattagagaaatgcaaatcaaaaccacaatgagataccatctcataccagtcagaatggctattactaagaagtcaaaaaataacagatgctgatgaagttgcgaagaggagggaacacttatacactgttggagggagtgtaaattagttcaaccaatgtggaaagcagtatactgattcctcaaagagctaaaagcagaactatcattcaaccttgcaatcccgttactgggtatatacccagaggaatataaatcattctaccatcaagacatatgtacaccaatgttcattgcagcaccatttacaatagcaaagacatggaatcaacctaaatgtccttcagtgacagactagataaagaaagtgtggtacacatacattatggaatactatgtagccataaaaaagaatgagatcatgtcttttgtgggaacatggatggagcctgaggctactaactagcaaactaacccaagaatagaaaacctaataccacatgttctcacttagtgagagctaaatgatgagaactcttgcacacacagaaaagaacaacagacactggggtctacctgagggtggaggttgggaggaaggagaggagcagaaaaggtaactattgggtactgagtttaatacctgggtgatgaaataatctgtacaacaagcccccatgacatgagtttacctatgtaacaaaccttcgcatgtacccccaaacctaaaagttaaaaaaaaagaaatatgtgttgaatagacaacagattgtaaactgcatcttagaaaaaggttaacaaaccagtatctcacaaatagaacaacaatcaagttcagctgagcatcctcagtcaacaaacctgtcaaactagaaagagcatatgcttattttcccccgaaaaatgattttttttctgttattaggttggcgcaaaagtaattgcagtctttgccattaaaagtaaagaaaaaaaccacattacttttgcaccatcctaatagtctcatggctttcaactgcaacgttttgtttcccacagatcagcagcaagggagaccaaatgaactggtgcctgacagtaatggtggaagtgaaagcatgttatgcttgcatatcgtgatatgctacttgcatattgatggatttgctgcagcactgacaagttcacagtgacccactttaaaatggcattaaatgatcagtatatttaaaaagacatgttaaccagaacccaagaaatcagctagttgtacacaaatagtaagaaaactcctatatgattcccaactaagtaaccattcaagaaaattaattatatttaatcacagtttaaggaagaaaattgaacactacttttaaaaagaggatacaagatttaagaggattccaaactctttagaaataaaaattacctgatcaagtgcctacaaagcatatttttccaaacgaacaaataattagtgagccacagacccaactggtactttctaaatgtgaaaaaggaaatccttttcaaaaaagaaaatccttgcttttctctgtgactccaagtaagagccacttacctgcctttcaattatcttcctgggaacttctcagtccttttttctgtatctaaataagatgtgtataaatacattttttggaagtctggtttctttaacgttttaccagtaccttctaaagatgagtctcacaaatagaaagtgaaattaaggccaggcatggtgactcatgcctgtaattccagaactttaggaggctcaggtagaaggatcacttgaacacaggagttctagaccaacccaggcaacatagggatatccccaactctacataaacttttattaataaaaacttagccaggcactgttggcacaggcctgtggctccagctacttaggaggctaaggcaggcggactgcttgagcctgggaggtcaaggccatggtgagttgtaattgcaccactgcactccagcctgggtgacagagtagagaccctgtctaaaaataaaaaataaaaataaaaataaatagtcacactgtgtgaggagaaagagatttttgccttaaagaaatccagctccaatttaaggatctgccccattttctaacaacaaatgaagtatgttctctgcttaatgaaatcaagtggaagtgtatggaaaccaagctcagctgtgggccccctctcttctccactgacatcccacactcttcctggagtctcatggctgcacattctcctccccaaaaatttagacactcaaatccaacttcaaacttgccatctccatttgtgtaaccaataagcaccttctacttaacgtggtcagaatagaactctttattttattttacatatttttctcggagtcttctacatcttggcaaaggcatcaccccctaataaattattcaagccaaaattctaggcagtgtaatataatggtcaagaacatagaccttgatgccagactgtatggattcaaatcctgcttctgctcctcactacctgtataaagatactacaagcctcagagagtgataatggtacctgccttatagggttaccataaagactaaatgcattaattcatataaagcatttagaatagcacttggcaaatattaaattttcactatgcttaagctctcatcatcatcatcattatgctgattcttctctttctctcacaaccaatccaccatgtcaatattactttaaaaactaactgaaatccactgacttctgtcagtcatatcaccacaaccaatccatttcaagccactatctagattaatgtgaaaacttccagactagtcctcccgcttccattccttttttatcctccaaaatggctttcaagcagcagccacagtcatctatttaaaacataaatcagatcatatcactcacttattcaaaatcatccaatgtctttcaactacattaggctaaaaaaaaatcaaactctttaccctgggactctacct

SEQ ID NO: 1882487 - DNA, 4001 bp, Homo sapiens
ctcgagagatgagtcgatgtgttcaagcccccacacagcaatgagaggcaaagcagataatagagtagacagataatagcagtgacagtgagccagttcagggtaaacttggccccaagtgggccaggtcccttccttgtgctcccattacctggagtctagcacagatccttagacaaagaaccaaatgccagcccttttcccacctcacaagtgtcctgtctcataatctccttccccttccctctttaatccaattaaagaatgagcttgtatgggtgagtagaatgatatcattctctcagtcatcgacctagggacagctgaccaaacctatgcctgagtccataggaacacatctcccattcgcttggccagccccaggttgtcctgaataacttgaagggaactggagactctttgttcctttgccctgcaggcaggtggtattaactgtgaccaataaattgtatattgaaatataaattaaattgcagtgtattgcaaaaagccacataacttcaggccttgatcaagcattcttagatgcctctgctgcaaagaaagctttccaagtagaatgggaggcatactttccagattgatgattaaagggaatgtgtgtgctggaatcagcttgggagatctgaataacttaaacctctccgtaccttcaaaggtgctatcatttccacttggctatatttagttttctttgctttttggaaaagagatgaggcagctccagtctgtgtctcccttggctttccccagacaccgtaaatgatattggcagcatcccagccctaccgctcatagagcgaaaacctattcctccttctcctgccacgtttaataaactttatctagaacaatttcttgtgcagtggcaaaacacagcacttacataacatactatttcagaagcactgttctcttgggctctgaagcacagcctggtttctttagtgctatgatttagggagtgttctacctcagagaagaaaggggtcctgatactgagattataaaggtagcaagagcctctgtaaagaaatcatatcccattagccaaaagaaatccagtggtcaaacatagtcctctagaaatagtcagaagaagtcattttattattgttattactggaaacagctagaggcaaaaggcatcttcttcgaggccttccaccttgccacttcatccattctatctagagacacgataaactgaccatttgtgctcatctgaggctgtaaccaatagagggccagaacctcactcatctaaacaattaattgcaaggggagccatggaggaagcagggtccaggcttaggtccaaagacagcaatacgagagcgggtcattccaaaaggcaggacctgggggccaaggtcaaggcaaggtcatagctttaaagagtcagctctaaatggaatagctctgccccaggaatcaagccaacaaagctagctctttagcgcttgcccaaaataggccaatacattctaataatccacctgccctatgcggggtttcttggtttcagcaccattgacattatgggctggatactttgttgtgggactatcctgtgcattgtaggatgtttaactgcatttttggcccctatccaccagattccagtagtaacccaccctccaccccagttgtgacaatcaaaaagttctccagacattgccaaatgtcccctggggataacattgcctcctattgacaactactagtctaggatgaccaacctttctagttttccagggattgatggggttctcaggatgcaggcctttcaatttaaaacccaggtagttctcagtccaccctaactctgccctaacttaccccttctgctgttagaacctcctgtctctcagagtatctcacacttcaataggcattgtctggggtcttattcaaatgcagatcctgacttcactggtgcagtaagaagtcagagaatctgcatctgtaacaagctcccaggtgatgatggtgctgctggtgtgcagaccgcaggaggaacagcaaagacctggactggaaagccatcccttccactggaacccaggctgtctgcagggctgattctacagggatgcccctggttgttggagtggcccttctcaaccctggctgcacatcagagtcagctgcagagctgttaaaaatacagatgtctaggtcctccaaggctctgatttaattggcctggaatgagagccagcttggtaggtctttaagggtccccaggtgattgtgatatagagccatgactgagaactcttcaatcagaagtcctggaagcaaggcacagcacttacgcatctgtaaagagacttccaaatagaagtgctgcccaagacagaggctttcccagcctcttggtcttcaaggtccagagcaagctgctgcagatccatcgcaggtgtgagagttcctccacagatgatgggcatggctcaatgcacccacaccttcgagccagtggggagtcaggggccctgccctctgctctggtgcatgcccatccacaggcaccccaccctgctgcaaaactgctgttcagtacagcaggctaaaatgaattaccctctgtgctcaaactgttggccatgaagctgtttccttcaataacttccacaggaaggggaagtctttggcaaaagccagaaactgagaaggaaagcagtaaagacattcagttctgtgaaggttcatagagtctgttctctgtggctggggatggaggaatgagtcacccattcacctgcggagtctgccagctgtcggcacatacaggcatctggctccaaccaggtagcagtgggtgcacacctgggctcagcctacagaaaaactgcccattgctctctagaatcctggacagtgggaaatgggagttagagagaaagtgagccagagccacaagatagaactcaccatcctcagcccagatggtaattggaggggagccaggaccactctccatcttccaaatgccattctcattggcttgtccccaggacctagaaatctgacatcagtgactggtttccattgagaaaacaattgtttggcacagaggtcttctaaatcacaaacagaggttcggagatagttgaatgcctttggtagaaactggtttcaacagcttccttctcttaaatagaaaaatcatatcagattggagagaaaatgtggaatgctacagagaaaatgtgtaggtagttgacaatttagtctgagtgtggcccatggcctaggtgagacacttcttatttgacaagggatcctatgtggaatgggggccttggacttcagcaccccacatgttccattttgggatgatcccggcccaaatcaaagccaccattaaaacccattggtccttctttgccatgaaaatcacatcttttccatggcatttcttttacaacagcaaaagaactgtttggaaggtttgacacattttctccagtgagacttcaatgaatattaaatttccagcacattctttacctaagaagcaggacagcttatccccaattgactctttgttccacttgccccttacctttgctgtgttcctggtggcttccaggctaatgtgggaggggtagggaaacttggagaaaagtaaagcagaccctgtctcaagtcttgatgccaggcctgtgtgtgttttctcctactagtcaagaaagaggcggtgctgatccaagccggcgagtacatgggtcagctgctggaacaagcgtccctgcacttctttgtcacagctcgcatcaatgagaccagggatgttctggccaagcaaaagtccaccgtgctaaccatccctgagatcatcatcaaggtcagtcttagcgtctcatcctggaacagagacaaaggcacgcagacttagtgttcatgtgtgcatatgcgtgcttgtatgtgtgtgtgtgtgtgaatgaatgtcctgctcaaaaaaaaaaaaa

SEQ ID NO: 1882488 - DNA, 4001 bp, Homo sapiens
ggaagaggtccaatttgtgtgcacgtaggggagaagtgaaagataagcttgggaccacgttgtggaagactaaatacctggacactgcacctaggattcagggtttcattctgaaggcaatgatgactcactggagggttttaaatatggaaatatggaattcagtggtttgaggggcacagcggccccagtggaagtgtggtaggtgtgagtagcagtggagggagtgttgcattgaagcatgacagagctcctacagggaacctcaacaggtggaagaggaatggtgggcctaggtcaagtggagtggcaccgagtgagcagcttcttgtgtgtatacctggtttatgcttcaggagtgaaaaaagttcaccacccaatactgaggtttgagttctttaactaaactccaaagacaacaggtgttttatacatggattcccctgccccatttatgggtggggagagggcaaatggaacgttaggttaactagtttaaagagtcaaggcaatcccacctggatcccttcttaaaaaggaagcctgtgtccaagagtcccttctgctgagttaacaagaccccttcaacccgttctcatctttgggattgaggcgcctgcagaattacaagagaggatttgtcctcctcttctccagagagctaccttgattttccccacccctgccaagatagacattcatgaatgcagtcatccacacctccacaagtgcacacacaccagccatcctattttaaaacagacaaaagcaaaaccaacccaggatgtctctggacaccataaaccaaaatagtcgctggaaaaaacagtgatggtaggttccagatttaagattcataaaatggtaacatttccaaaaatatctctgatgaagacagtcatatgttagtacgtttttaattttgccaagagaggctgctgttttaaaaaagaggatcttttacattgcacgaatttatcttcatgaaaaccttactgcgttgtccttatttttcttattcgcggttgtcccacaaacatttcatcaagaagcaccagtttcctttctgtaccctcaagccacaggaggtagttccttggttccctcctggggtagaaagaagggcagcaaaaagagcactgtgctaagctggcccttccctctccaccccaggtctcaagagtgcatgccagcttcctcccccgacctccaacgcactttggattcagactttgtgtcttgcttcttaggacttctgatcagcctgcatggatcctgcttgactggccatgactttagagagtagtagaagacagaaaagttaatacaccttctaatgaattaccatgtgggtactgatctttcaaagatagtatagaatagtttgttgtgtggtctgtttttaaagtctgttaacatgaagctacagaaatttggaacagaccctttagagataatttagtccaacctcatcattttatagtaaaaacaacaaaagcccacaggaattagctggcttgccccaggtgctgggcctggcactcaagccttcctcctaattccatggctcttcatcatgaactgatgcttctcccatgctaaatccttgtgctcttctttggccatgaaaagcctgttaactctcagtgcttttttatgtgtagaaggtgacaaagcagaaggaaaatggcaagaagaaagataaccaaagaaaaatcagatagaaggcaggatacccagcgtgagtgcagcggctacacccattttttgccatttatttctgatgtcagaccaggtggaaatatcacaaggtgtcttcagatccttgtaatcacctcttgttccctgggggggaatctgtgttgctcgccaagctaaactcttgtgttcaaggacagggaacacaagaattggggtgcagactctacatcacagccctgcagttatcacgggcccattgaggggaggggcccgtgataactgctgggctgtgatgtagagcctgtaccccagttctggggtcctctctgtgacagcatagtgcctactgtgctgcaagtgattctgaggcatgggcacttgtgaagccttcagtttgtgaagcctaattcatggatccggaggattgtacatacaacaacaggaaataatgaagataaagttggactaaattatccctgagcctacagcagtggttctcaaagtatggtttccacatcagcagcatcagtatcacctggaccttgttagacatacaaattctaggcccccagacctactggaacagaaacacccccagggacccatgttttactaactcacccctcaggtaattctggtgctgcacactcaagtttgaggagcactggcttagggaaagcagccagaggcttctgtggggcagagcagggagcctgtgattggcttggtctgggcacttgtgctaggaccaagggggtgacgggctgagggttctgcagagaagcagcgtggtaaaggaaggtctctgagggcagcagcctgggagtgacttttaagcccaccccttaggaaattgagactcaagtcattaaagctttccttttgtttacacttgcctacaattgttttttctcagagcaaacttggctcagcacagcccaaggtaaattatcacagattctgcaactaataaagttcaatgaggactttacatggctcagatgctgttggtgactggctctttcttcttttttagttagtaacaggagtatgggaaggcaaatacaacttcttctgtcagggcacacgcaccgcaggagaatcagatatgaaggtactgtctctttttcagaaactttattattataagtgttgagtttttaaaaataaattgtataaaatacaaaatggcccataacctcactgcccaggcaatccctgttgatatttttaaaagaataaaaaaggcaatatatacacatcaaattaaaatttgaatgtgaaaggtataaaataaaacctaaagcatccccctctgtaaaaataactccggttaacaattggcaggaaaaatcacatgcagtcagtatgttatatttacacaatcaggatcataagagcaatgtcttaaatttttaaaatcattcatccaagtacttttttccgagtagtggtgttaaaaataaaatctgacttccactcatgaggtttgttttaaatcacaggccaacagtcgcagctcagcatgggcagtcatctccttagagcacttgtttgacatgtttaattgggcagagacctgacactgcaggttctgattccttttcttctgtgtcacttatcaggtcggctgctccatgttagtccctgaaatcaatagcgtttttcagatggttttcctttgctaatggctgtgcaggctgcttccagagggaataggcagacttcaaggttttgaaccttgagcctcatgtttttgttagtctcaaagagtgtcagggaccctttcaaaaatattccctgtagtcatttcaaacccctccagctgtcccaacccaatcatgttctttggttaaaggtacttggagagtgaccatagctcccagccactgatggacattaagagctcttggggcactcgggcttctccgagttgacatcagatttttggatattagtgaaacatgtcagaggtgatattccagagaagccgtgaggataagccttaaatctttgaccctttcctcttagattatccgtgtcctctggtggtactacttctccaaactcatagaatttatggacactttcttcttcatcctgcgcaagaacaaccaccagatcacggtcctgcacgtctaccaccatgcctcgatgctgaacatctggtggtttgtgatgaactgggtcccctgcggccactgtaagtattagagacggggacttggggaacaggtgtgagcagggaggagagttgaaactaaggctttcagaaaaggtgctgtttctgtaaatgtcta

SEQ ID NO: 1882489 - DNA, 4001 bp, Homo sapiens
attttttttttatagcactgtgagaacagactaatacataatgctaaatgtctcaacattctctactctttgggtgaatatttgcttacgtaagctgtggagagaagaaaattaacaaagctagggaaagctctctgggccaccatccactactagtgttgccttaattattaatcctacatcattttagagtttgtacttcaatggcaatgcgtattcctccaggaatggaatgcagtttcatcagaactttctcctgacacgccttgtggctctgagtcacagacgtttttcttaaagggagtgtctttcatctcagggcctcaagctgcccgtcattcccccatagtccagagatccccctcccctgtgatcacattccagcttgcaccctgtctcctcactccctttccttctatttcctgcagccactgctgaactaccgcatgccagctctctggctttctagggtttgccatttcacaaggcttagcctcagattttataaggtttattggtaaattgcagaatgagaggttttatcttgtgttacaggaatttcaggcagaagcaagcagatggcgtaacaggccagtccaagcacaacacaatccacaggccagggctcaaagctcatgttacctgcctctaccaggcactgagctgacaccctgggcacacctctcaatctcccagtcttcctcttgcaggaaagaaaagttaagcattccagcaaaagaaactaccatcagagtgaacaagcaacctacgaaatgggagaaaatttttgcaacctactcatctgacaaagggctaatatccagaatctacaatgaactcaaacaaatttacaagaaaaaaataaacaaccccatcaaaaagtgggcgaaggatatgaacagacacttctcaaaagaagacatttatgcagccaaaaaacacatgaaaaaatgctcatcatcactggccatcagagaaatgcaaatcaaaaccacaatgagataccatctcacaccagttagaatggtgatcattaaaaagtcaggaaacaacaggtgctggagaggatgtggagaaataggaacacttttacactgttggtgggaccgtaaactagttcaaccattgtggaagtcagtgtggcgattcctcagggatctagaactacaaataccatttgacccagccatcccattactgggtatatacccaaaggattataaatcatgctgctataaagacacatgcacacgtaggtttattgcggcactattcacaatagcaaagacttggaaccaacccaaatgtccaacaatgatagactggattaagaaaatgtggcacatatacaccatggaatactatgcagccataaaaaatgatgagttcatgtcctttgtagggacatggatgaaactggaaaccatcatcctcagcaaactatcacaaggacaaaaaaccaaacaccgcatgttctcactcataggtgggaattgaacaatgagaacacatggacacaggaaggggaacatcacactccggggactgttgtggggtggggggaggggggagggatagcatttggagatatacctaatgctaaatgacgagttaatgggtgcagcacaccaacatggcacatgtatacatatgtaacaaacctgcacattgcgcacatgtaccctaaaacttaaagtataataataataaaataaaaaacaaaataaataaataaataaacatctaaaaaaaagaaaagttaagcattccaaagtgttcagctgatttgagcattttgtccaggacatctgattccaatgtttgaatgtgtgtgtgtgtgtgtgtgtgtgtgtatgtgtgtatatacatttagagagggggtctccctgtgttgtccaggctggccttgaactcctgagttcaagcgtggtagcacacacctgtagtcctagatactcaccctcctgagtatctaggactacaggtgtatgctaccacgctggaattaaatgtgtattttgcatttgtaaatttattgacataagtgacagagtccaggcatataataaaactggtgactctgaagaacaaatatttcattttcttccattttctctcggttcttgcaaactttcctgaaatcttgtctcagctgagaaacatgttctcaccatatagtcatgtgaagggtgaaactcatcttcccagtggtcataatgaacacagctcatattgtccaggtcttttcttccactagagggattttaactgccctccactttattctcccaataaacttttagttaaaaagcttaaatgtggccaggtaatgtggctcatgcctgtaatcctagtactttgggaggccgaggagggtggattacctgaggtcaggagttcgagaccagcctggccaacacgtcgaaatcctgactctactaaaaatacaaaaattagccatgcatggtggtgcacgcctttaatcccagctactcgggaggctgaggcagaagaatcgcttgaacctgggaggtggaggttgcagtgagccaagatcacgccattgcactccagcctgagagacagaacaagactccatctcaaaaaaaaaaaaaaaaaaagcttaaatgttctcaccacacacacatagaaatggtaactgtgtgaggtgatggatgtgtgaatttgaattagcttgattatggtatctcacctcacaagatagacatatatcaaaacattgcattgtacacattttagttgtatatatatagttgcatatacatatctatacatatcttttagttgtatatattcaagctacaggggagggaaacttttagccacaaagcagatccagttggaaaatcttaacatcaaatgctagtttttgcatgtaatttttttctttaaaaaatacatggccataatataaaattcaaaaggcaaaatggtaagttgcaaagcttgtctctcttcctttcccctagtcatcagatcttcccaaagacacctatacatactgttactaggtacttgtgtatttctagacatcccaaacttttcttaacatatacagattatatattctcctcatcacataaatgttagcatactatgaaagagacagcaagtcgcctgtctcaacatccattctcccactttctttctttgttgatatggggttttgctctgccacccaggctggagtgcagtggcatgaacaaaggctcagcacagccttgacctcttgcctcagcctcctgagtagctgggactacaggcacgcaccatctggctaatttttaaatttttgtagagacagagtttcaccatgttgcccagactggtctcaaactcctgggcctaagggatcctttcaccttggcctctcaaagtgatgggattacaggagtgagccactggcgtctgatctcctcactctttttataacagccgtccaaatgtatttgaagccactcattgctgtccagcaaaaaactgcatttctcagcctttctgttagctaataatgcaggctatgtaactaagttttcgatactggagtggaagatactagaatgtaacatttgtcagatcttttgcctttctgctggctgggatgtggacgtgatgactggagcttaagcagctttcttggactgtaaaacagcccacttgggatggcagagcaacaagatggaggaaattaggtcctgagaatgatggagttcccttataagccatggccctgtccatatctgttttgttgttgttgttttttagcagttgaaacagcttaaacaccataacaagctcactgttacttgcagcaaaatacaattccttttttaaacatacgtaatttttatttgtcagttataccttaatgaaaaatgtaatagtcaaaacaaatgatatatttggaaatttttaaatatacacttataagtaaagccatggatcaaaaaataagtcacactgaaaactagaaaacattt

SEQ ID NO: 1882490 - DNA, 4001 bp, Homo sapiens
ttctaattatactatgaatcctacacaccatgaatacctactgaatatgaaatgtctgtaagaccctgttctaggagctacaaagaaaactgaaataagttagcccaaggattttttgtgaaggcaaagaaacattttaattccaaataattattattaggtagaagagagctacaaagtgtttctgagggtcccaaggaggcagaagatggcagtgtctgagctggataggcatactttcaaccggcaagggtgtggcaagagtaaaatcaaggctggtaaaagaacacagcacgtttcaagcctaagcagcttaagtgcaaagtggctccgggtggaaatgatgagagagcaagagcacaaagaggaccctctaaaacagagccagtgaccatgtgagctgagggggagggcttctcacagggcaaacggtacagaaagacgcgaagacacaaagcatcatgacccatccagggagctgcatgtgatcccacttggctaaagtgaagggtacatgtgggaaagaagcagatgatgctaaataaacaggcagaggcctgactgtgaaggaccttgtgtgccaaagtaaagtacgtgaacattattccaaaggcaacagggaactgaggcatttttaagaaaagaaatgacaagcagactagctttaagaaaaaattactctggcactccaatggtttcccatctcacacaggataaaatccaaagtccttcttatgcttaataccctatacatgctgatcactcgctatctctgaaattatttctccttttccctcactcactgctctggctacagtggccttcttgctgccccctcccatgtgccctttcctcagtgcctttgcacttgctatccccactacctggaactcttccctggttagctgcatagctcactccctcactcgcttcaggtctgccttcatgttcaaaccttttcttatcagagttgttttactgttaccggaaataaaagagcaaaaatcgactataatcagccccactatgttttcctccagtgtatttatagtatttgtatactgcctgtctctccttactagaatgtaagctctatgatggatctcttcaataaccgtgtgacattgagattgttactactgacacgtccagacagcaaatctaatggacgagctaagtaatctatccaaggatatacttctagtgaacagtggaaccagggagactgactctggagcctgcactctaactattttacatactgactccccagaagtgtcacaggtctctgactctgattctaaagcatttcctgtgaacaggctccatgctgacaagcactaagccagcaaaaattctgaattcacagtatgttcttctaaaaagatggtgattcttacaatttgtattagccaagttttaaaagccagggaatattttttaaataatcaattaaaatgtacaaagtatctggacttttacctatccaaaaattagctgttttttttttagacccacagatattcaaacaagatgaaagattttatgaactaaaaggaacacagcatatgacaccaaaaactacccaagaccctttttccgttaccatattcaatttcaggaataaaactcaacatctttaaaataatcatcaaattttctgacatgccactcccggaggaagaacaatgtggtatctacaggaaaacatccagcaaatacagtatctcatgcacagtaaaagaatgaaaggtaggctgcagtaacatttgtctttattctttccccactcctgaaattattaaatttcctctctgcctgggcattctttcatcccatctcccattactatcagtatcctctccttaaaatgcagttgtcaatcaacagttgtccccatcaaccacttcataccagaactcatccactcttaatttcaactattacctctattagtataactcccaaatcctaatagaggtagtagctgaaattaaaagtggcataatttctccctctttccttctccaatctttgatttctctcacttcaggacccttttatttccttatgtttttaaggaaaattaactttttcaaaattggtcccttctccatttatttcataatctgtattatctggccattctcctaggtttgcaacttcaatataatttttctccacttaatcaataggaccgccaactattcattgtgtttcttatcttactttcgactccatagctatcatcatattttgagttttcttcctctcctttgtgaattactacagttctccagaggacctgcctacctccagacggctcactcactcccactcattctgtatacactgctagtgaagcctttctgacacagcacacccaccacattactctctaattcatggaccttaaatagtgttccaacacaacaaatctaaacttctcaaaccagcactcagggtcttctgctcctttagaatgtcactagtaaatgctcctctttttttttttttttagaggagtctcactctgtcaccaagctggagtgcagtggcgcgatctcggctcactgcaacctccgcctcccaggttcaagcaattctcctgcctcagcctcccgagtagctgggactacaggcgcgtgccaccacacccagctaattttttttgtatttttagtagagatagggtttcactatgtttgccagaatggtctcaatctcttgacttcatgatccgcccgcctcggcctcccaaagtgctgggattataggcatgagccaccgtgcctggccataaatgtttatcttaaacattctaaaaagataaaaacctagaaacccaacattctgatcttcttcatctaaatctgtacaatacacactatgggtctgtagaggtcatagtacactatcttccacctaacttcaacagatcacatcaggcaatggaactatggacagtccccaacttatggtttgggttacgagtttcaactttatgatggtgagaaggcgatacacattcagtagaaacagtactccaagcacccatacaactattctgctttttcactttcagttttcaataaattatgtgagacattcaacacattataaaataggcattctattagatggttttgcccaactgtaggctaatttaagtgttctgagcatgtgtaaggtaggctatgatgttcagtaagttaggtatattaaatgcattttcaacttgtgatattttctatttacaatgagtttatcaggaggtaaaaccaccataagccaaggaacatatatattacctaatgtatcatcttctgaacatctcaagctactatgacaaggattcattttcagaagtttaatccttctaatccacaaaattaaagtgtgtacagttatcagaaaaataacacttcatatctttagtaagagtacaaatttgttgaatatttttaagggcgaatttcccaatatctactgaaagtttatgtgcaaatatcctttagcccagcaatatcacttccaggaaataacctgtagatattctcacagaagcaagcaaaaatacatgcagaaacactactattatagttaaaaaaaaaaaaaaaaaaaaaaaaaggaggggagtggatttccttcatagacttctattatacatctctacaatggaaaattatataattaaaaataaagacacagttacaaacgaattgatatggaaagtttaagaatgccatgaaggggaaaaaaagctatttatagaacagaatataattattctatttgtgtaaagaaaatgtatatgaaggctgggcacggtggctcacgcctgtaatcccagaactttgggaagctgaggcaggcggatcacgagttcaagagatcaagaccatcctggccaacacagtgaaaccccgtctctactaaaaatacaaaaattagccgggcatggtggcaggcgcctataatcccagctactcgggagactg

SEQ ID NO: 1882491 - DNA, 4001 bp, Homo sapiens
attatttcttttcctcttttaatagtatctgccccaaacataaggtgaaaaacaattggattcatgagtctttagtttgaatctcactgaggtcggtagttacaaactttctgatcccgggcaagttacttacatcagttttcttatttgtaagatgggaataatgatcattcttacccaaggaaggagaagattcaacgcctatgaagtgtatatgccagtagctggcatatagtaacaaatatttacaggttagaaaagtgagctgacactagcacgctaaaaatatatttcacatctatcaaaatatacttttagtttaatttatccaatctaccatagataatacacaatagatatctgactttatatctgtgacaatattcaatcattttaaaagggggtagggggcagatatattgctttagaagtactcctaccattctaaaaatactgtcccgcagctgtttaaaatttatttttttagaccatagcaccactgtttggttgtttccaatttctaaaaccacaaatagtaaaagtgtactcagtctactgcaaacataaatagcaaatgcacgcttcagcactttttaaaggatatggaaattggcaacaaaaatgcagttcatgttgaaaatttacgacagccctgccatatttcttcagaaatacaatcaggtaaaaattaggaagatctctaccagctgggtggtatttttgtgtttttatacttatattttcactaactgaaagactttcattatgcaatttctggcacttgataaaatagagcaatagtacctttgctaaaaccacagtttctttggttatgtttagcattacacaaacatctttcaccttagatatccttttgcattagagtgtttaattttaaattgactgaagggaataacttttttcagaatattatgctttctggatatcactaagcacaagaattgtattttcatgatttctcaaagatcatgtgtatgtgtttcaattattaggcatttggttccataaaaagtgtgacaactactgataaaagatgagaatacaaaaatgattcaagaaaacatggagaagattgacttacagtgttgctatattatttttttaaaaccctgtctttataaaatacgtaaaaagccacaacatggatttaccatctcttccttggtaaagatacatctaaaataacacatcctcagcttctgaggagaagaaaaaaaaatccctggtacaaaaggttaacataaaaaatagtatgctaaattcaacagtggaggaagaagtttcgttttaagacataattcttcaatactcatttctcattttaatattaaaattgctactacatatttaaattggttttaagtatcagaaataggaataaagattattttttaatattttgatgcatccaataaaattgtgttcaattaacactgaatgaacaaataatcaagtaaatggagagaaaatgtcacttgatcatttcagattttttcatgaaatttttaaaataaatgactcaaaaactcatgaacaatagttcatactatgatctaataacttaaatgatttgaaagaaaaataaatctaccaaggaatttttaagtggctcctgttttacatggtgtttcttctttacatacattgttactaagtgcatttaaccaataaacatttttcaaagatcagttaaattatgctatttggttggatgaatacttcatatatcctctataatacatgctttttaaaactaattaaaaaataagaattcaaattgaaatatgcaatgtaacaaaattaaggtaaactatgagaaagacaaaagttttgtggtatttgcagaaaaaaattgacaatactattttttcatttacataaaataagaagataaagagtgaaaaaccattatgcattgtatttttagggcccacatgtattgggacctaaaaatacaatgcataatggttttaccccatgtcttttaataagaatttgactttgttagataattgcttttctttgaatttacaaagtgtaaagtgagtctaactgccatattaatcaccaaaaaaacccaaattacatacaacgtaagaaacttaaagctgtatttctcatctgcaattagcatctattcagactgtaaacttacaaaagcattcagatttcttcttactctgaatactgtttaataacccaaacttgataatgttccatcactgcatttctagaaataaaaaaatctctcaaagttctcaacttatcttttggtctgctgaacaagatattatctgaaatgttatatgctttgaatacccatttttactttaaaatgatacttaatcatatcttcttaagagctggtctaatcaatatgaaagccaggcaggaacaaaaaaatattttaaaaatagcttttcaaaataggaatacatattctagtgatgcagttttctgatttgaaacaggatcacttttacaaatactgagtgtcattttgtattcaacagcagcagaaaaaaaaggtataaatgtctacctcatttgctataatgtaagttcttagatggaaatactgaattaaacactggtggcttatggaacacacaagccttgcaatttaaaactagaaaccttcctcctaatactttgttatatctttaggttaaaatatttgttttcttaattaaccataagaaaacaaagaaaaagaaaagaatcagtcccaatacattaatttgctgaaattttcacttgtgaaaacaaatcaagtttcagaacttgggaatagcatataacaatgaatcaatgtctcatctgtaacaacgacacagttaaaataacttcttgatataagttaatttttaagaaaattagtttgatccagggttatttataacaggtaacatgagtggtttttgactaagctgctatatctttccttgagttactctgagttaagtcacactacctgaagttacatttggaacaccaacatcttaattattatcatgaaatagctacctattatttttaagtaaatgtactaacttctaatcatatctgttattttaagctttgaataatatgaaactaaatcatgtaattaaggatatagaaaaatgcaacagaatagctttataacagaccaattacaacactttatttcccatactgttacttaacaaatatctgtgctattttataacattttaaaatcttaagactagaaataattacatcttttactagtgcttataagggctgttgtcatctttaaagacacaacatctttaaaattagaaatgcatacaattttatatttcaaaatgtattaactcaaagacaataaaatacacctatttcttaagatctattttaaaatactgttgttgcattggattaaatgtatatatgtgattaatgaatgcttccaatataaagatttaagtctatttttccttgccagaaaaaaacaactcagcttaatttttaactattttattatacccttcagaacttaaaattatatacaaataatgtaacctgagacctgctctggtcatctgaggaattacaattagagcatgaatctccacaattctgcagcaccttaagtaattttataaaaaaaagtattttttgcatatttctttaactccattaagatcatttcctgggcttcttacagtgaaaaaaaaaagtcatttgttttagaataaagaatacagcaaaaatacttcgtcatccaaaagactatttttcctacactatggtcaggcaaccaaccccactaaatatagaagactgacatttgtaggtaattcaatagtcagatgataattcttcagtagtttcacagtagcataatttttcacattacttgaaaccactgttaaacctataacacattttctgtttctctgtgggtatttttttctgtctttaaccctaaaaggaatatgtttcatctgaca

SEQ ID NO: 1882492 - DNA, 4001 bp, Homo sapiens
gggtgaatgggaatggaacccactgattagcttgtcgacatttctgtagactaagatttgtacctgcaactgtctagtgctaaatggtaaatatttttcttccagttgatttgcctggggttctcattaactttctagaagattttggatagaactcttggatatttaatgtcacaaattttagttttgatcttgcctcttgggctcaatgttgcattcctgtaactctccaaattaccgaaaaacaattattggaataacccaagtttacatgaaaagtaaacacagcaaagagctggaaaaacagcatgtgatgggtcatggccagatttgcccatggaaagcccctaagtggatgtaagtagaaaattcttaggtcctgtaacataagtgcagataaagggaagttgcttaatatggagcaccagcacagaaaagaagaatgattttacgtaaacattgtgcagtaagtctcttagaaccccaaacctggggcataggcctaggggatgtggtttattgggttaaagaaggattgtctgaaacggtgatatacatcatcctaggggctggcatgccctttctggaggggagaggagcctttgttctgggcttctggagtcttgtagattcctcatcctgagagctgctgcccacagccaccaccccacgtaggtgtatccagtttagaaacaaaagggggactctggcaggctggctgctatgctgtatttgtggtcattattactattattattattattattatttttttttttttgagatggagtttcgcttttgttggcccaggctagagtgcaatggtgcgatctcagttcatcgcaaccgctgcctcctgggttcaagcaattcatctgcctcagcctcctgagtacctgggattacaggcatgcgccaccacgccccgccaattttgtatttttagtagagacgaggtttctccatgttggtcaggctggtctcgaactcccaatctcaagtgatctgcccacctcagcctcccaaagtgctgggattataggcatgagccactgcacccggccttgtggtcattatttttaaatactgtagtataagtaatggaatatgtgtgtaaaccaattaatcctaatctgcttttactctttagggttgattaattaatggataacacaaaaaagtgaactctagtctgtgtcaacaactgagtttcctttatttgcacacaaaagtgttaaaagtaattgttgatttggcaaaccagcagatttttttttgtttggttaggagtaatctaatgggactaattgtcttgtgtgaataagggataaaaatgatcaagcccaataattatgccatctgtgtagggctgggagtctagagcccactggtgtgacatctccaaggataagaccactctccccttgccccccaccatctaaccataggaaaccagtctttgcgtttgcttcaaaaacttgtctccaacatttgcaggctggggcaagagtgcaaatggagacccacatagcatatgtttaaacatctaaaagctataaatccagctaagaaaccataatatagaacatactctatcctcttgccttgaaaaatatatattcagagggacctagaatatcaagtttggatatagaattcttcaactcagagttccatctgcttgtcccagtgtctccgttctctgtctgctcccagctccatccctcatcccatattaaagacaccccagtctgcatagcccattctttataaatggctgcctggtggcctagggatgaggacagccatgagacagatgatcctcaggactcagaccccctgaagaggcctgaagtgagttcagggcccttgggatcctgggcaccaaagagtggtttaggtgggatatgggatgggctttccactggtgatgagtcacaggtgcagacacattccctgagccctgtgactcatcacctatggaaagagggtgcataggaggggcagaaagagaccttttaaaggacagcaactctctcttgcctgggtatttctgctgttttttttggggggagccggaggttgcaaggagagagatagagagagagagagagagagacctctcctcttagcaaggttttaaaagattaatataatctggtatctaacaaagatccctgcatttgatgaaatgtggtctgagctgagacttgcatttattgcaacagctccacttggtagcaagctaatcagggtggggacctacagtctctacttgtgtccaaccacaggaggtgactgatattttttatggtgagatcatggcttactgatgcagaatcaagcatgccccaagagttctgtttgcatctgttcacctcctcactggacctgacacatgctgaatgattagttgggtgtagtaagagcgtctgtttctccttgcacatttgaaaatgaagttctcaagtaggtagtgtaaagtcatgaatctaattcatagttcctctctctcagtctaccatgcacccttcagcaagcactctcttcccactggtctttgagcctcattcagccccagctggtgagttgaggaaataagcctaggtgaatgtgagctctgataatccaagggctttcagaaaaccacaacaagccaggaaaactaccaagttttccatggaggcagcagggaaagggaggaggagggtctgagtgtctgccagattctagactcaactttgctgaggatttacccgtgaatttgtacaaatctcttccgtctttctttctcagtttcatctgtctaaaatgatgagtgtgaattaaatggcctaaagtccctcctagtgccaaaactcttgggttatttggctctcattggctacagtgccttctaatgtaagcaaatgtaaaattccctcttccctcttcagcgcaaatggacttcattctcaaggcacaatggggagcctgtatcctggagggccctaagaaaggagccaagtccattggctgtgagtcgacagggacaggagtccttctaccaatctctgtgtggctggcccagaccgcctgctcagccaggcagtgctcctgtaaaagcagaataattttcattcccctcacattagtttaagcgaggattcacttttgtgtctgcatgtcagttgatactcagcggatcgcgtggtttatagctggactgatatcgtttaaatctggaactcttttcctctggcctcaataacccaagcgacttgtatgcttttcctcagctccctcccttttcaggaaaagtgataaagaggtcaaagagaacacagtgagagggggaagttgctggagcaagctttccccagctgtaatgttctctcagacgtcaaggttgtaccctgttcttagaggttgttccagatcttagatagtcactatgcccagaggtaaatacagctggggcagcagccagagggaatgatcctccagctgcccgctgctgtccttaagtgtggctgtcatgagacgcacaagtttgcagggaagactgagtgcctagattgcgggaagaaagataaaattcctcagccttgtttacgtcctaaattggtagtctgacttggtgagctatagattataaggaggttgctttgcagactgtgaggagtcaccgagcagctattcaatggcagaggtgagcctggcatcgtggtggccccttctcatccaggggctcgcccaccttcctctcttcctcatgtccactttggttctcctgcctgatgctctttccctccctcggccgcctaggtcagctcaggccccacaagtgtttctcatcatgacacctctcttccctggaacccacccctacgttcctgcttcctgcctgtgagtatgttagggtgctgtcagcaggactgtggggtggagatgcctgacgcctctcacctgaagataagaggtgagcaggcaaagtgcctgagtctgtctgttctgctata

SEQ ID NO: 1882493 - DNA, 4001 bp, Homo sapiens
tacctgtatttattactgcctgtctttcagatataagccattttaactgaagtgagatgatatcttttgtctgagaaattctttatttctccttcatgttttaaggatattttcgctagttatactattccagaataaagtttatttttttccttaagcactttaaatatgtcatgccattgtctcctggcctgtaaggttttcattgaaaagtctgctgccacacatactagacctccattgtatgttatttgtttattttctcttgttgcttttatgatactttccttatctttgaccattggagtttattaaatatcttgaagttttcttatttgggctaaatctgcttcatgctccataacttcaattacatgtggaatttaaaataactaaactcatagaagagagtagaaaatggtagttacagaggctgggggtaggggaaataggggcatgattgatttccttgaatattggtatctttgtttaggtttctctgttattattcctttgaataaattttctatccctaccactatttctatctgccctattaaggccagtaactcttagattcgccttttacaggctgttttctagatcctgtaggcatgcttcattttttttattattttttcttttggatcctctgtgcattttcatgtagtctgtcttcaggctcactcattctttcttctgctggatcaattctgctattagatactctgatgatttcttcagtatgtctatggcatttttcaactccacaatttctgcttacttatttttaattatttcaatctctttgttaaacttatctgataagattctgaattgcttctctgtgttacccaaatttctttgagttttctcaaaacagctattttgaattttctgtctgaaaagtcctcatattgctgtttctccaggatttctccttggtgccttatttggttcatttggtgagttcatgttttcctggatgatctctatgcttgtggatgtttattggtgactgggcattgaagacttaggtatttattgtactcttcacagtttgggcttctttgcatctatccttcttgggaaaggtttccaagcattcaaagagtgttgggtgttgttatctaagtttttggtcactgcagccatatctgcattaggcagggcttttcctgtggctcttgcagacttgtagaggtactaccttggtagtcttggttaaaatccaaaagaattctctggattcccaagcagagactcttgttttcttccctcgctttctctcaaacagagtctctctctctctctctgtgctgagctacctggtgctgggggagggggtgacacaagcctctttgtggccaccatcactggggctgcaatgggtcagatctgaagccagcacagcactgggtctcacccaaagctcatggtaaccactgcctagttaccatctgtgtgtactcaaggccctagagctctacaatcagcagatggtaaagccagccaggcatttgtcctttccctcagggcagtgagctcccccagccctgggtgggtccagagatgccagctgggatccagggcctgaactcagaaaccttaggaatctacctggtgctctattctattgcagctgatctggcacccaagccacaagagaaagtctttcccactcttgcctatttcttccacaaatagaagagtctctccccttggccaccaccagcccaggcttgcagcaagtactttctggttactgctgatgttcacctaaggcccaaggacactccagtcagcttgtggtgaatgctgccaggctggtactctccttttaaggcagtgggctctccgctggcccagggcaggtctagaaattccatccaagagctgaggccgggaattgggaccccttaggcccaattttggccatggtgggtaagaacacaatggaatagtgttctaacccattgtggccaaattggtacctaagctgattttcggttctcatgaaggtgcttttttatttaaatagttgttcaatttggtgttcctgtggaggggacgaccagcagagacttctatttagccatcttgctccatcttctcccctaaaaattgtttttaaatgaaggtacaataaagatatctttgaaaacaatggctgagaaaattcttcaccacagacctgtgctaaggaaataaaaactaggtctttcagctaaaaagaaaagggtcccagttacaagcaagaagatgtaataagaattgaagtaaatattttgggcaagaaagaatattgataattattgatctaatctttcatttcaaaaagctagtggcagaagagcaagtacaaagaaagtagatgaaaaacagataatcaatatagccccaaaagtcaattcactagaaaataggcacacaaaaaaaataacaaaagcaaaaactttaaaaatattattgtgatatattaatatattaacattatatataactacaggtcctacagaatttagaagaaaataaaggacattactaacactttgatgctggtaatttggaaaaaaaggacaaattacttgaaaaaccacaagtaataattcacaaaaataaaaaatatgaacactccaatatctactaaaaacatgtaattttaagcttttcttacaaagaaatctttagacctagatgacatctctggaaaattctttcaaacatgtaatgaagagaaaaaaatacattctaacaaaaaattatccagaaaacagaaaacagagggaaaaatttcttaatttacgaggccagcataaccctgatgcccaaaccttacaataacaatgtaggactggaaaagtatagcccaatatatttcattaatctagatggaaaaatcctacccaaaatattatcaaattccacctagtagtgtatttaaaaatcataggttttatataaaactaattggagtttttgccaggattggaagtttggtttaatattttaaaaatcaatcagtgtaattcatcaaattagaaaaaatagaaaaactttatgaatatttcaaaggaatgtggaaaaaagcatttagtaaaattttacatctgttaataaaagagaaaacccatttgatgattttagtatattcaataaaaaagctcttaataagattctacacttgttcatgatttgtttaattcagtaagttaggaacaggagtgtattttcctaatctgataaagaggtctactaaaaatatatagttaatggtaaagttttaatgcaattgaacaaggataaggaaataatatcaattatcagcacttttattcaacatttcactggagtttcaaagcagttcaataaagccagaaaaaaatataaattttctgcagaaaatttacaagaatctacaaaaaaattaaaaataagaaaatttacaaataaatgtttccaataatcagtcacctccatttctttatactagaaataactgaaaaatgaaatttaattaaaaagcaaaatcatttataataacatctaaaagggtccactacctaggatcacatatatagaaacattgcaaggctttttccttaaggaccataaaacattggtgagaaaaattaatatcaaaataactaaatagatatactctgtatattgactgaaagacacaatattgataaaatgccaatctccctcaaatcaacataatctctatccaaatcccagcctgttattttgtgcaaattgacagttttattctaaaatgtacatagaaatgcaaggactttatatagtcaagaaaatattacagaagaaaaactaaacaggaaaacttatactaccaaatatcaaagcttttataaggctaaaaataattaagatggtgaggaaataatacaacaaaaggtaaacaaatgaaacaaattagagagttcagaaatacactcactcaaaaatacttagctggttttgataaaacactattg

SEQ ID NO: 1882494 - DNA, 4001 bp, Homo sapiens
cccagctcctatccctggtcggactacatttccctgcacgtgtaatccaataactaactgtcgggtctcattggaagtgattgctcccgagggcacatctctctcagagcctgactcttacttagggaggaattagccacaactggggagaagtgttctcggacaggagttagctgagacctggcacagttttgggtgggcaatgttaagacggaggatgtaaacctagtgacagctgcacaccccttcaggactgactataaatatagccatctcgcttatctcagggtctttctttttctttctctttctttcttttcttccttccttcctttttcttttgcacttttttcttacagaacactaactggggtgcgggggtggggggaagaagtggaagcaaatgcaaccctaagtcccatgagatccaggtttccagagtctttgaaacttggcctaggtttctcagtgtaaatccctctgctcaaagttccgaaaacgtccacgatcgccagcggcccgcaaccctgcggcggcccccagtcgccctaacaattgtcggggagcctgcaggccctgccagaaagagagaggattggcacgttacctttgggcgtctggcaccccggcgtgtggctgagggcggcaaagtctaaacgaagttgacagatggagtcagtatcggccctggggagggcggccagggaggctccgagcagccgcacccgcagcagcaccactcggcccggcgggccaggaggaggaagggggcgcggaggggcggggctgggtcctgggatgggacgcggggcttgctgcggggggcaaacagaaagaatatttcatgaagtcagaggtggtcgagttttgcgaggggtgggggtcgtccccctggcagaaccggagtgagtctgtgatccctcaattggaaagagggtgagtgagggaaaggggaggaggccgcgagaggaatgaagagcgaggagaccctggagagcggggagcgagataagagagggaggcggccgccaggtcgggagggggaggagtgagcgcggcggcgcggagcgaggagggggcagggcggggtggggggggagggagggagggagggagcgaggagggcggccggggagggcgagggagggaggaagtccgagagacagagcgaggagcgctcctgaagggagacgtcgggctcgtccccggggtccaggccgcggtcccactcgcgggcgcagtcgcccggcgccggccgctcggccccgcggcctgggaggccgttgcgcaaggcagggcccgcggctcggggagggatgcgccgggcgttgcctcccgcccgccgccgccgccgccgccagaagccccagaggagctgagggaggcgacgccgaagcgctggcccggagtggccacggctgcagcccgggcggcgggctagggcgctcgcagggcttctgggccgaccccgctccggcgcctccgcttcccgcccggggcccgccctcgcggcccggcctcgctcccgggtcccagatgaccaccgagggcgggccgccgccggccccgctccgccgcgcgtgcagcccggtccccggcgcgctccaggccgccctgatgagcccgccgcccgccgccgccgccgccgccgccgccgccccggagaccacctcctcctcctcgtcgtcgtcctccgcctcctgcgcctcgtcctcgtcctcctccaattcggccagcgccccctcggctgcctgcaagagcgcgggcggcggcggcgcgggcgccgggagcgggggcgccaagaaggcgagctcggggctgcggcggcccgagaagccgccctactcgtacatcgcgctcatcgtcatggccatccagagctcgcccagcaagcgcctgacgctcagcgagatctaccagttcctgcaggcgcgcttccccttcttccgcggcgcctaccagggctggaagaactcggtgcgccacaatctctcgctcaacgagtgcttcatcaagctgcctaagggcctcgggcggcccggcaagggccactactggaccatcgacccggccagcgagttcatgttcgaggagggctcgttccgccgccggccgcgcggcttcaggcggaagtgccaggcgctcaagcccatgtaccaccgcgtggtgagcggcttgggcttcggggcgtcgctgctgccccagggcttcgacttccaggcgcccccgtcggcgccgctcggctgccacagccagggcggctacggcggcctcgacatgatgcccgcgggctacgacgccggcgcgggcgcccccagccacgcgcaccctcaccaccaccaccaccaccacgtcccgcacatgtcgcccaacccgggttccacctacatggccagctgcccggtgcccgcgggacccgggggcgtcggtgcggccgggggcggcggcggcggcgactacgggccggacagcagcagcagcccggtaccctcgtccccggccatggcgagcgccatcgaatgccactcgccctacacgagccctgcggcgcactggagctcgcctggcgcctcgccttacctcaagcagccgcctgccctgacgcccagcagcaaccccgccgcctcggcaggcctgcactccagcatgtcctcctactcgctggagcagagctacttgcaccagaacgctcgcgaggacctctcaggtaacgcagcacgctccagcccagccagctgggcgcaccgcttctaggcctccagggctggcggccactgccactcccacaaacagggaccccgaagctaggaggtctgagggcactgggaaaagcagatgctggggaaagccggcatcttattcgtgggagcagggatcagggtcttactgtcctcccagtatccctggccagcagccgaagcttcagaattgtctggctgctgtgagcgtggtgtaaagtcccctgccttcctgggctctttggggatccctgtgcaggagactgcaggtctcccgttcagagtctcacttagcttggagagaaggcatctggcctttggggaacttggtcaggaagctgtgtctagttccttttgtccctttttttccttgcgttcattttgctgtacttctgtcccgaagtaaatgtcagaatcagatatgttctgtatgttggggtgtctgcagcgagatgtttgcagctgggcaagtgttaagaggagggggtgggagggacagagctggatcccaggatctttcactaaagggacatttgccagtggagggggtcaccaaactgttggagactcctccccttccctgcctccccccccgcccaacaatggacccacattgatgatacaggtcctgggtggcaggacctgaaggaccctgctaggactcccctgagaaatgcgcctgccctgtggatgccacttgtagtgtggctggtttacattgttctggttgcagattatgaaaaattattgacttgctgaaggcggtgaaaggtgggaggggacggtagggatggaagagggaatttgaatatttgaccaggttaatgtgaagaacagagataaacccttacattaacccctcgctcggagcacctagggctgcagattaaaatcccatgggcctgccagtcaaaggcaaggccccaagctactctctcacactggcctcccacagcaatgagacagtggcttggagggtgatgcatgctttatgtgttcctgagccggtgtgcagcgggagcacccggggagaaggaaagcccagaaatgggcaaaagatgttggttccctggacggtgaaatttcccaaataggccttttaaatgtgggtctcagaggttaaccaaacaaagacagtctcggcaggaccacaccggagaggattttagcctgacttaacccactgagaacagagtcttgttcaattttatgggaatttcaacaagtaaccaatacaggcggccttcccctcttatttttgta

SEQ ID NO: 1882495 - DNA, 4001 bp, Homo sapiens
cttggcctgcccctgagtcttctggctgggggcaggttgcctgggcaagaactgcttcttcaattccttaacaaatgcaaccaccaacacccagatctctctctctctttattttcagtttttttgctgttatccagataattaataaaaaccaaccacgcaaaactgggtcccaccctctccttttgctcccagcctacctccccagttgtgggaacaggtctggagtgagaggcagggagtggctaatgccaccaggaagaaatgaaaactggctcagagagggggaagcctcaacagaaaaagaaataaattaaaagccctcctatcccctccagccagggttcgttcctttccccaactccccagggggcagaagtgagtgcagcacctgatgtctgcttcttccccttgtgtctggtgagatggtgcagcagggctgcagggggctgggtggggtcatgtccactgaagaactgtactatggggacagaaaaccagaaatgtggagactgaactggtatcccagagagtgcacgaccctgggcatctgggcaagggcaggcatgagacctctgaattagaagggtccagcccccactgacaggaggctacactgggagggaaggtgaaggtgctgaggaaagctcccatgatgagcctgggagtgcttcaggtatcagcttccagccagagggcgagaagtcctcctcacaaatggatgagtccattgaatccatggactttggagtgggggggatttgttccaaagaatggatgagtccactggccaatgtggggtagaggggtagagaagaccacataggaagagactccactggggatggaatgttcccctcccttgtgtaggctgagtcactggagatgagggggaggcaactgtcccacagacaagacagtaggaggtgggggtcaagagtggagactgcaccgaggcaagagtccatggatggggccaagagggggcaggagtggcgctgtatccacattcacttcagaagttgaagattccaaagaggagaataagtggggagaggggagacaaggaagagggtttggccctgcttcagggcccactgggtgggtaggtgtggggaggaagatggggacagatgggaggagagctcagagccagggttcacccaccgcccccaggcttcttcagatagtcaccaccaccccggccatcagtggagatttcccggaaaacagtgagcatggagtgccggactctgtcagccagagctgggacgtcatctggtgtcagcccttccgtgggcactgggggcagcacccgcacctgacattgtcctggggcaaggggagcaccatcatggcctgtccacccaggtctttgcccacaggtggggcccagcttccgagtgatactcttcctcaacctttcagttctcttcccccaaccctggacaaccatccctgggcttgccagctgccacttctgaggcccttctcctatacaaagccttctccaatccccagttcagacatctcctcagcacccctccagcccccctcctctgggtttggcatttactgctgaatgagtgttattcattacagctttgtgcacacaggccttatctttcctgttaagattagtaacagcctctcttggtgggaccaagtgctacccatctggcagggtatggtgggtgcttagtaaagacttattggctgatgtggggttagactagatgactgtgtagacatctcatggctctgacactgaatgatccccctgcctcacagggatgtcctcccagcctctccggacacaccctaccccagaactgctcaaagccctcacccgaggtgaagcgacgctccttcttgcagtagaagtcttggtaggaggacatgactatggggacaatgggaacctggggaagggttaaagcaggtcagtccacagctctcttcagagactcctacaataagcccctgcccagagatgagggaatggtgggggttggcagctgagtagcagaacgaagagcagtagtcacctgggcctgcactgcaagatggaaggcgccacgtttgaagggcagcatggagccattgtggtttctcgttccctcaggaaacacccagaccctcacctgggggagaaagagggtcaaagaagacaaatacatatggaggagtcagaataggtgtgatgttataatgggacctttgaggcccactggccctgcatatcagtttatttacaactgttctactctgtatccctccaatcccccatttccccaggatgactcacgtcctgggtgagcagggtctgggcgacctcagacatgacactgatggcatcccccgtgcgcttccggtcgatgaagatgactcctgccagccagcaggccagcccggcagagccagcccacagtagctcgcgcttggcaatgggcacacagcggcctggcagtacctccatcatcccttgggcagggtgggagtgggtgaggatcggggtggaggcagagtgtcacagaaggcaacccacctcacccagctcatcaccctctggtagggactggaggtgaaggaggagactaggcagggaggggggccccaagtgaaggaaagggtgaccaaaagtatatgtaacctgcttatgagggcagttctacccagggaatgaaggcctgagtgggaggcaagggggcaatgtcccagaggaaggggaattgaggatctctaggagaagatattctagggaaggtttcaggaggggaggcatggctgggggaggtgtgccctgtggtggggtctcaccaagcagatcgagagagctctggtggttggagacaacaacatagggctgcgagggagggaagtggtgagcccctcgcacctccactcggatcccgtacaggtatttgatgtggagcagcattagacgcaagatcctgtggggtcatggcaaggggtcccagtgggatccattgatgtccatctgcatgcctcagctccccccaccttactgtctttctgaccacctttgcagtcctctccccattccctgtctctggtctctctcagtcttttctacacacaccatgcccccttcccccaatccactactcactttgtacccttaggttccctcattgcccaagaccccttgcccctcacttcatgttctcgacgttgcgtcctcgcacggcacacacagggatggcgagcacagccaggaagaggatccagccattgtagaaggccatcttgaagaagtacttggcactggggctgcagaaccacagggtgggcagcaggaagagcagcagcaggaagagcagcagcagcagcatccatgcccctggccacaaatccattctggccacctgcaggggatggggcaagggacaatcagcctggtttctggaggagagtggggtaggcaaggcacagaaggcagggctgggggctggtgctatgaggacaagggcctgagacacaaactggggcaggggtctcattgaaaccttcccaggaaggctctctaggatgagggtggtggagaaagagctcaggactgctctcccaccactcttcccaaaggctccggatatattcagacaagagacacaagacacagacatctacaattcacagatacctgataataaatgacaacaagaataatagctaacacttgtagctggtaagggtcttataatggtctatacttgtgctgtccgagaaagtagccaccacctacatgtggctacttgaaatgcagctagtctgaactgagatgtgctggaaatgtaaaatacacatcagatttcaaagactgaataaaaaacaaaatgtgagatatccattactaatcttttatgctgactacattttgaaattataatcttgggccgggcgcagtggctcacgcctgtaatcccagcactttgggaagccgaggtgggcagatcacgaggtcaggagttcaggaccag

SEQ ID NO: 1882496 - DNA, 4001 bp, Homo sapiens
cctgttctgaatgctgcagcttctgagggacatggagagacaagcacacccattggtctggactggatggatacaagctgcctaaagaccagagagaggtgcaactattctgagattcagatgtgaggtgtcatctcctcatgattagaacctgctcaccaaatgcctatccctcctgcagcaattagagctgcagagccatcagctatgattggctcggtcactgcttctctgacatgagttcccatctctctcgttagtctgaggactctcccagggtgtctgtccaacaaacctttttcacttcgagatgactgatgaaggtctccaggctggttccaactgggtcccaggagaacaaggctccatgcagctccaatactgtagatggctctgcagggggatctgaacagagaagccacttgatttgggctcctaatctaccacaatctgtttggggagggtaaatcatgtaattcacttgccagccccatatctacctgcccaaagctaaatgagtctgttttggattccgctctctctaagccctcttggtgacatctatgcgcagcacccaagtggctccacttccctcctcaccctgtgccaggttctgcccactagcttcccattacctgggctgtagtaggcctgggggttgtggtttggaaggtcgaggaaaagctggatccggtccaaggacactttggcctccaggagaccattgatcacccaagggaagttgttgagaggaagaatgagcattcgcaccagtgccagggccgtgaacacctgagtgaggtgggtgcagggtgaagccccaggagttatctaagggcctgtttctatgggaagccctgtggacaggtctacggagggaagaactgggcaatgacagaactgaagggctggctggccaatcctgggatcagatgtggcagagatggtcacttaaagaatcctagaaattccaatgttcctcaagggattcaggttgcatttttttttttcttgacgagtcttgctctgtcacctaagctggagtgcagtggcataatctcggctcactgcaacttccacctccagggttcaagtgattctcctaccctagcctcctgagtagctgggatcacaggcatgcatcaccacacctggttaatttttatatttttagtagagacaaggtttcaccatgttggtcaggctggtctcgaactcctgacatcaggtgatccgcctgccttggcctcccaaagtgctggaattacaggtgtgagccaccacgcctggccaaggttgcatctttttaactaggcaggcctagctcattttgagtcttttttttagaatttccaagtagcaacatcacctggccttggctagacccaggattgcatcatacatttttttcctaaggccattagaacgaggatgaagagacctaaccccaagcctggaactgaatagaagctggagtgaaaggtagaggagaggaaagaaaggaactccttcacagaggggagggttatatatccaaggcccccacaaaaaggtttcttcagttttcccttggttgagagatgaggcagtcagggatccctccctccttctcagccagcactgagggcccaagcctctgtcttcacttcgctgaagtctccttgatgctggtccccttccttcctggtcctcaccttggtggcagtgagctggtgccccatgaggacataggtgatgaagataacgatggagatgacaaccggtagggcagcccacaggtatacacaggccgcatccaggtatttgatgacccggagtcgccccagctctcgagcccggcaggcctctactcgggctcccagtgcctgctcccacccgcagaacttgatgacccgaatgccactcagcagctctgtcacaagctagggaaaggagacaagggagaggcgtgaagtggaggcactgctcatgtgtcttccctgccaagccttccccaggctgctggcagaatgttcagtactctaagctcccagatactctgcactgccctagtcttggttttcttcctcacctcagtactttctggaaatcctgcccttcaaatccttttcagccctgggttgcttcccctcccagtctcttacttctccatttgctccagctggggacagcttggagtgggaattccccaccttcctaggaggagtggtggaaggtggagccaggtcaccacagtggagtaaaagctctcctcccattagatgagggacaaagggctatctcccaaaaccaaaagatgtgggcttcgggggctggccccccagttccggcccccggcttgagtggcacagaaactattcctgtagaagtacacaggcataagaggccacactacagcccagggtcaaacaggctaatgggcccagggaagatgggcaagggccaaaactcctcgtctgtagctgtcacaggtaggggaaaatgcctcatgccataaccatctatcaacctcccttccctccaggagcactctgagctgttccactaagggtcgacaactatgctgtatgaacccccaggactgccatcccctttgtgaaggtacccacaatcactgcagaacccagagctctgcagattcagccaaaccctaaacacctggagttgacccaggcaggaaagtgacctattcccttcccctcagcctacccaaagaggcagctgaggttctcctaggtctctacatgcagccatggggtggtctgtgccctagataaggaggttggagacttgggtcccagctctggccctaaagacctgtttggagccagacagatgacttcctacctcccagggtggccacatgtattcagagcttactttgtgactggcactacactaagcattatctcatgagatccttacaactctacaaggtaagctactactattctcactttacagatgaggaaggggaagcccaaataggttaagtgacttgtctgaagtgattgaaccagtaagtgtagagccaggatttgaacccaggtctacctttctccagtctcagctcttaactttgaggtcactctcactccctcaggtagtgtgcatgggaagacctggggacctgggctgggtggggtctccagatagctgagggaccccaagtacccgctcaccttaacccgcgcatccttgtgctgtagcatttcctggttgctggccatgatgcgggtggcaatcactttgttgacgggtaccagcagcagtgccaagatgagaccacccacgaaggccacgcctacctgctggtacagcaggtagagggtgatggccagttgcaggggcaggccccaggcttcatggaagctcccagcaaagttaagcagccgttcagagtcagtgcctagtaggttcagggcctccccagtaggagggcggctgggccccagctgtaaagccttgcagtacaggatgttcagcacagccccccgtgcctgaagtgttaccttatatacctcatacccatactgattctgcagcacagcacccagcacagccccaccggctagccccagagcatagagcaggccgtggcttagtggctcctgcccctcttccaggaagcccaccagtagggagagcaacaggggccctgagaatcccaacatggtccccaccagcttcagcagtccaagtgccagatagcaccgtccaaaggccccatacaaggccctccacagccgtgccccctcctgccagtgtgcctggaagacacgagccaggtaggttggctgcagtctgtgggggaggcggcaaatgtcctgaggctgccggagctctccacaggccccacgggccagcaagggtgccagccaggcataggaaaagcgtgacagccaactctccccatcttcagccacctcaggttcttgatcctcgggcaggaggggctcctgagcccagggttctcgtggtcccccaggagctgcccatcc

SEQ ID NO: 1882497 - DNA, 4001 bp, Homo sapiens
ttcactgaaggggtcatgcaatgggaagcggggcctacctgagaactggaaggcccagcactgccatagaaaacctcaggatacaggcgctggcctgaggagctgggctccgggacacagtgcccagaatccaggttcttggattgtggctcagcagaggcagcagcactgggaagcagctcccagtctcgtgatacaggaatggcctgggaaggagaggcctcgtggagagggatgtctggcatcctggacgccctggtcactcccagcaatcttccccagaaatcttgggcctttccaccaaactcttactcccacttacctcagtgactgatgctgttagctccttctctgctttcaagctgtctcctaccactaggcgtaagtctgagtcctgtgatcacaagaaggcaggagacattgtcccgtgacagacatgtgtcctctatgtcccacctttagtccttcccttctctccacccaactcaggatacccagatccagcccacacagaccttgtcactagtgccaaactggactgggggaccaggtcgatgggatggccgaatggggccaggctctgtgcctcggtctgtacgctgtgatcgttctgtgccaatggggccagggggcagaggctgctcccggggcagctcctggattgggcacacagtaaagtgcattgggggagggaaagggaaatccaaattggaatgcccagaacacacacgcagagagaaaaagcagaaaaaggtagggccaaagtcagattcctggaaacattccccttatccttttttggtcttttacctttctgtccccatcgtggggggcaggtggtggtctcctaggaggttcagagccaggtggaccctcacaaggaacagcattcaggggtgaggagcctccaggcctcttggggggtccctctgctgcccccttgagtcctccatcaggggaacttcgctggctgcagggacctgatgacacctgagaatccccactcaggtccaccccactgtcagactgactcatctgagaggagtggagaaggagctagttaagtcagggtagaaagcaccccaatacctgactgatgcacacatacaaactgcagaaaggggacagccaagtgagagaacagctccagactcaacccagagcaggtggggggtatgaccagtgctcaaaaaagtcccagctcagacacaccctcccaccctcactcacttctgtgccagccacatcctcaaaaggactcaggggctccatccaaggctccatggagctgggccggtaactctttcggctagtggctggagaagggagcaccaaccagaagagaagtgaggagatgacagttcagaagcccctctcattcttaacccttctaccatagtcctttcactcagctttactcaccagtatgtaaacggttccagatgtgaggggtcagggcctctgtgcctgtatctctggactctgcctgagggcctgggccctcaggcttagagcccaagaatccagagctatgaggaggtggcaaagattcctacagatgagaagggccagaagcaaaacatgaattgggtgggaattgggaattataggaagccaggacagagtggggtgacacagggtgtggggacaacaagggagacacatgggagactaatactgagaattctggagtaaaaacacagtgaaagaaacaggaaagaaaacagagaaaacataacccagaagaattttcacgagtaagagtgcagtgaagcacaatctcaaacccatcccttacctcctgtagcagctctggttttctgggaggccgctcccgacgtttagggggaaagggactaaccccggcagagtcccgaggagtcccacccacccctctcaccattggccccggctcctcaaagtgggggtctgggaaagagaaaaagggtcagcatctgcctggctctgccactgaccctaacttttcctctctactccacctcccaattcttctacccttgctccctgcagaaacgcacccagcagcagggtccctaggccaggttctccacccgctccctccagcacttgaccttctctggggatggagatattcccacccataacccctccagcttaccagaactgaggccgctgttgaccctctggggctcgtatcgggttgggggcctaggagaggggccctgaggggcttggggaagcccaggcttgtgccttggatgaccccctggtgcagttacactcccttgacggctactaagctgggccagagcctgttggatgccagcagggttgctgtggataacttggtccaggcggaagacagcagaactgctgggaggtgggggaggcaggggaagccccgggggacgctcctctggaggacgactggagaaaacagagcattagctccagtatccactaaatcgttactttttcccacaagttatgtttcccaacttctgcttacaacctattctcttccctattaaagtccaggtgtttttgagtccttctaaggattcctatgcatacagatgcacagactggaaagcaaagaaccagcaatgaatacataggtgggtgttcttgactctaacaccctaccaaccgctttccagttgccttagccagacatggaaatcctactgacattctagagcccatggcccctcaggccacaatctccactccacccaaacttatctttccctcaggctttttccccctcctccaatttttaaaccacaataaatttgtttgttcctacccaccttcggttcttgggagagggccagctcctcttgtcgcctcgtcctggcccggtccttcctccaggacccccaccgcctcctccactgctgctgccactgctgccagccttgccccctgggccagggcgccgattctgccgttccatgcctggccgctgacttgagaagctccgtttactcaaatccttggctctctggctcagatctccgcgggacatggctgaaatacctggtacggctccacctccacctcccccaggagttcccacagccttgggtgtcagcagtactggtgggggtgcctctttgtcccctcggcgctcactggtgaagtcactgctctctgatgcagtctcccattcctcattggcttggtctgagttctggtttgacagatcaggagacttggcagctgcccggcgaggtgctggggccactgtgactgttgtgagggcctcctcaggtccaggagcggaggctggaagggttagggagggcttgccctcagacccccttgcggcattctcccgttcctgcttcagcctccggaaacgaggcggtttatcctgctgctgagccctcccatgtcgcctccttcggggtcgctccccatcttccatgcccacattgctacctccattgctgcctccgcgcgccacaggggacagaggccctgggatcaacttctctttcaaaggctccttacttggtggcaaagggcctgtgggaggtttcttgggagccagagacttggctggagggctccagcctgggcaaacttgaggagggggcctccctcctcctcggccccggcgagatggcacccctctgggagtgaagactcgcccaccccgggcagtgaagcgggctggggctggtgaaggtggggctcctggtggtgggggagcgagagggacctgggtgagtgttccctccttgggtgtgggagcctccttgtctgaaggagccagatcactctcatgggtctcgctgcctgtttctgagccccgctgccggcgccgcttggggatttcctcatactctgaaccctcgctccgtgtctcgctggcagtgcggcctcggggagcaggagggtggtttggtccccctgtcccacctccacgcccatcatctcctcgaaactctcggtaactgcggaattcccggcttcgggctccccgccctcgtcccccataggtcccccga

SEQ ID NO: 1882498 - DNA, 4001 bp, Homo sapiens
gaacccaggaggcatagattgcgatgagccaagatcgcaccattgcatgccagcctgggcaacaaaagtgaaactccatctcaaaaaaaaaaagaaagggaaagactccactggggctcccactaaataaccctctctcaacccgaagtcttcctttctgactggatccaactttgtcttccagaaccaggcgaggaggggccaactgcaggtgaggggtttgataaagtcagggaagcagaagatagcccccaacacatgtgactggggggatggtcaacaagaaaggaatggtgagtggtggtggctgtgctctcaattttccctgtctccgtacaggctctgtgggaggatcagggctgggaactctagccctggccctggggatcctgggaggcctggggacagccgccctgctcattggggtcatcttgtggcaaaggcggcaacgccgaggagaggagaggtgagtggagaaagccagacccctcagacctagggcttccaggcagcaagcgaagaggggtcggggggtggaacgacaacgtgccgcattccccccaatctttctcctcaggaaggccccagaaaaccaggaggaagaggaggagcgtgcagaactgaatcagtcggaggaacctgaggcaggcgagagtagtactggagggccttgaggggcccacagacagatcccatccatcagctcccttttctttttcccttgaactgttctggcctcagaccaactctctcctgtataatctctctcctgtataaccccaccttgccaagctttcttctacaaccagagccccccacaatgatgattaaacacctgacacatcttgctcttgtgtgtctgtgtgtgtgtatgagacacaacctcacccctatacccttgagggccctgaaggaaagggactcacccccatacttcaccatactataccaaacatctactcaagttggggagaagatgcttctgtcgggggtgggggcgaacttgggaagagatcccatcaatatatttcaccttttttattgaatttgtattaaaggaggtagtgagggggcggaagcacttaagagtcagaatccatattagactctggggagtgaaaaattaaattaaatcagtaagatggggagtgggggaagagtcagagggaactttgcccacctttgaagatcaaatcaagaaatcagggaaagcaaagacttaggagaggagaaagacattctctcaatccatcctccttccccagggcagagaattaaacaacgttactgagtgagcctctgagcagaaggctctcccatctatgcacagacttcactcctcctccccaggccttcctggacaatgtccagggctggccttagccaacagaaatagaggggtcaagggggtccaggagtacggaagggtcagcagggaccctcaatactgattcttctctggctggaggtgggcaggaagcagacatagctcaaatactgagcagccaaaaaaagaagaagatggcgagaaacaggaagagggaatcctgccagctggaggctgggtgaccctgtcccagatccacacctgtgggagagaggaaagctgtggaagcatatgctcctaggctgggagggggcctgaggggattcacagggctccctgatgggagctgagtgtgactcttacctgtaccccggcggaaaggctcatgggcattgaagacggtggtgaaaaagccaaagggaaaagcaccaacaccaaatgagaagtggaagcccccggtatcaccaaatggctggaatccctagggaggcagaaaaagtcagacaggaagccggcaaatctgtcaaggaagggacacaactggacaagaagactcacccctctgctctccggagctggtctctggccctgggggcggggtggagtttttaatctgaggaagtggagagagaaagttaacagggatttttctcctcccatcttccacaccgttttccaagggcagaagccttcaatcttccctaagcaacacctccagtctctcacctgggatcctggggcttctggctccctcgcccataaagcgggacaaccttctctctgctgatcccagctttacatactggacactcttgccgttctggccgtgtctccagccactggggagaaaaaaggtggtttccagtatacaagagggtcttacagctcctcagacctccccatttccctcttcatctcctgagtacgcacctgatgaagacatggccaactggatgggggagaaaaaaaaaaaaaggtcaaactagctacagaaaagagagacacagaccctagacttcgcagaatcccatctaacccctcttcccaagcaacctgctgttgcttttcagattttctgcaacctctaccatgccagccaacttagttagccttcctgcttgtctgatcttccaacacctaaagctctgtccatcctcaacacactcaaccctctcctttctcctctccccaacaaacacatacaaattttcgtgccctctcttttctgcctttcaagttaatttctaatttccttcagccacctctttctgggtctcctcttttcaaccccaaccccatcactccaaaccaaacccctttactagcacattcccccattactcactttcaagctcaataatgtccctatctttatgaccctttaacctttcaagtctgcctctccacagtgcccttataccagccccctcccagatctcatctgaatgtgatccatatttcctggttctccccgactcaactgatgcgtgcctcccttaacctttgtgtctcacttgtttccacctgcacagctaagacccctcacttctctggggtaaggtggctcgggtctcacattgtcctgccactccccgccccaccttctcttctcagcacatcacgtgcctcagctcctggttcctaagacctttctttccacagatctcgaccgttatactcccacccacacataccagcaaagtcttatgtctcctgtcgggcttcacctatgggaacgtgccctccgattatctgtatgactgtatgattattcgctcctagcctctccagtatataagcgagacccaccacctcccgcccccctcctcgattctcaccagtacaggtggccacacacactgaccacagcttcccgagcagtctccaaacatatattacattcgaaggtcgcgcccgccccgccccgctcgcgatttggcccttcggggcccccgtcctcctcctccgctgctgccatggccggttttgtttcgccccacgtacccttcagtccccccaaatacacatacacacgccccaacaaaccagaaaccacctcctgcccacgatcgttgggcaggcttcaaggtttcctaatcactattggtctgaatgcctgccagtcacaaagaattcaaaagaaaggattggcccaaagggtaggggcgggaaaaggttagtgcagtcctgccttcgcacaatggctattggctgatacggtctaagtcaatgtgcaatgccaagggattggtaataactcgctacacgctgtcgcctggccaaggagggctttattcgtctgagtagttgtcagtcataaccaaagccataagcaatttgctcgggactacctatagacctcgcccactataagcccctttctttccttcgcttcctcttttagagaatgtccggattgctattggactttggagcgtatggctccaaatcaactcattggctaaaacttgacggaaaatggtggttaggtaaaacgcgcctgcgcagcacgcggcgggacgggggtgggccaatcctgtgagggtttaaccttctctttttccacctcttcacccctatcttgtcgccatggtgactgctctacaattggcgaggcttgcacttcaaagtcctaggctcgcttcatccgggtccttcagctgtggactttctg
